United States Patent Application Publication US 2011/0183924 A1 - sequence listing, part 81

SEQ ID NO: 284015 - DNA, 5535 bp, Homo sapiens
gagaaagctgcctggaggaagctgctggggtgcggggggctgagggatttggctccccgccctctcccctagatggcggagaaatcgggctagctggaagggcgcagctcctctcccagagctcattctggagtcggagaactgggagagcggcccccgaggcggagcctccctcccgccccgagtcgcgctgccccccacctgggggagaggggcgggcgccgcgctgccttccctccgcgcctcggccgcgtggcttgcggcttattttcccagctggcaagcgtcgcgctgcagacaagggaatgcctgtggtgagttgtttattttgttgaagtttgcggtgggcccgggggacgtggggggcgagcggcaggcagcggccgggactgttttgtttaggtctccatccacctgtgtggtataaatctgccagcctcaaggcggcgggggaccggagtgagaaagctctgacgctcccaaaagccccttttcgcaacttacagatctaggaccacatttgattctccacgcctggaaccggctagatcctagtttacgctcaccccgccctccagcctcccatcaacgcttcccgcacccgctgtgtgcagggctggcgctccgcagagcaaacagcgcccacgacccagggacagctggccaccgaagtccctccccggcgcccttccccgttccttgaggataggggagctgaggttttcatgtgaagggcgcccatgaaattcgtgggaacttgttctggcgtcttctggagtggagttctttcaggggtttcgggtctgcccgggactacaaaatgggatcctgggttggctggagtttcccagactaggctggagagaggtcggctgttggctcgcgggagagcccagaggaaccccttgggcgatggcagtcaagaccggcggctgcgtttgcctggaagaaaagcctaaatacattagcgagctggtaaagcttttaaggccttcttgggagcgagtggctggctaatgagaggttaattttgtttcgaagggaaggctgcactggtttcctgagataaatggacaggaagcgcattacctccgcgcgctggcaagcggctcccaaatgctttttgcacctgccgttttgagcggtgagagcagcggcggagcccgcagggattgcgggggcccgttgtctacgagcgggtgatgagccccccgcaagccccgggctctctccctccgcgagtgcattgctcacgccaagctttgggactcttctctcacacccaggtcctgcgtgttccgaagttcaggggccccctgatcccgctgagccccctccaggagcgaaagggttaagaatgataaggaagaagaggaagcgaagcgcgccccccggcccatgccgcagccacgggcccagacccgccacggcgcccgcgccgccgccctcgccggagcccacgagacctgcatggacgggcatgggcttgagagcagcaccttccagcgccgccgctgccgccgccgaggttgagcagcgccgccgccccgggctctgccccccgccgctggagctgctgctgctgctgctgttcagcctcgggctgctccacgcaggtgactgccaacagccagcccaatgtcgaatccagaaatgcaccacggacttcgtgtccctgacttctcacctgaactctgccgttgacggctttgactctgagttttgcaaggccttgcgtgcctatgctggctgcacccagcgaacttcaaaagcctgccgtggcaacctggtataccattctgccgtgttgggtatcagtgacctcatgagccagaggaattgttccaaggatggacccacatcctctaccaaccccgaagtgacccatgatccttgcaactatcacagccacgctggagccagggaacacaggagaggggaccagaaccctcccagttaccttttttgtggcttgtttggagatcctcacctcagaactttcaaggataacttccaaacatgcaaagtagaaggggcctggccactcatagataataattatctttcagttcaagtgacaaacgtacctgtggtccctggatccagtgctactgctacaaataagatcactattatcttcaaagcccaccatgagtgtacagatcagaaagtctaccaagctgtgacagatgacctgccggccgcctttgtggatggcaccaccagtggtggggacagcgatgccaagagcctgcgtatcgtggaaagggagagtggccactatgtggagatgcacgcccgctatatagggaccacagtgtttgtgcggcaggtgggtcgctacctgacccttgccatccgtatgcctgaagacctggccatgtcctacgaggagagccaggacctgcagctgtgcgtgaacggctgccccctgagtgaacgcatcgatgacgggcagggccaggtgtctgccatcctgggacacagcctgcctcgcacctccttggtgcaggcctggcctggctacacactggagactgccaacactcaatgccatgagaagatgccagtgaaggacatctatttccagtcctgtgtcttcgacctgctcaccactggtgatgccaactttactgccgcagcccacagtgccttggaggatgtggaggccctgcacccaaggaaggaacgctggcacattttccccagcagtggcaatgggactccccgtggaggcagtgatttgtctgtcagtctaggactcacctgcttgatccttatcgtgtttttgtaggggttgtcttttgttttggttttttattttttgtctataacaaaattttaaaatatatattgtcataatatattgagtaaaagagtatatatgtatataccatgtatatgacaggatgtttgtcctgggacacccaccagattgtacatactgtgtttggctgttttcacatatgttggatgtagtgttctttgattgtatcaattttgttttgcagttctgtgaaatgttttataatgtccctgcccagggacctgttagaaagcactttattttttatatattaaatatttatgtgtgtgcttggttgatatgtatagtacatatacacagacatccatatgcagcgtttcctttgaaggtgaccagttgtttgtagctattcttggctgtaccttcctgccctttcccattgctactgatttgccacggtgtgcagcttttactcgccaccttccggtggagctgcctcgttcctttgaactatgccctcacccttctgccctcacttgatttgaaagggtcgttaactctcccttacaggtgctttgactcttaaacgctgatcttaagaagctctcttcatctaagagctgttactttttcagaagggggggtattattggtattctgattactctcaattctaattgttatatatttgagcccatacagtgtattaggttgaaccatagaaactgctattctcgtaggtcaaaagggtctagtgatggaagttttgtagataagtaccaggcatctcagtaactcctagactttttctcatcccatgccccgttttaaattgtcagttttccctctgactcttctgtgttaaaacatgaaactataaatttagtaattatcatgccttgctctttttaatctatatgactgatgcaagcccctcttcttaaccgtttcttggctttgagcccagaaacacagctctccctgtctccaactccagtaagccctcctcagcctcaccttacgaatccaaagaactggggtttgttaggttctttctctaatgtagaggcccagatcccatcacaaagtttttcattcttccttgtccaccatgatcttcatcacagtctttgatatgtctgcatgcaaagtggaacagagttgggcggcaatgacagaagagcttccttggcctgactcggtgtgcggccacttcggcactgcttaatccagatattcttgttaactaagcattgtgcttcccaggtggtctgaagtcaggtactctctctctcaacacctgtagttgaatatgatttggtcagttgctcgttgtaacttggagaaattcctataaagtaagatctccttgcctcttccatccattgttggcacccccttgcaaaaggaaaagaacagcaaaagtcaggagcagtaatctgagaaagttaactccaggataggtaggtttctattgttatagctagatgtaaatctttagttccaagaagtgatagagtttctgctttaataatttgttgataagtttacataaacagaaataaaagatactatctttaccgtagtagttcaggccaagattatgcttagttttagttctccaggtagttacttttgccatgtcctattgatcagtgacactgccagaggcccataccggcaagaggaagaggacgtcattttgtaaagtttaacttcttagcgaactgatgtgccacccagtcacagagtggagttgtgaattcatgtagaggtggcaaacctctaccttgtgttgatgagagaataatcttgggcagtctgggaaaataaggaaggcatctccttcttactcatggagattcaactatagagagttgaaacctaaacccgccttccttttatagaagctggactagagacggactgaccatcagctctgaactgtggctttttttgttcacctatgatgccatgtaccaaattcagaagctatcgttaataatttgttttataattgagtagtacaagcgaggaaaaaatacggaggataaccactatttttgtgcaaataatatgaaagtgaagtaaaagcaatagaagaaatttctataggatctgggtttagagtgtgtatcattaataaatatacctttgctcttttcagggaaaataacaaccacccttactgatagttgggaaaagaagattgggttattttgccatatcatttagctggaagtgacatttaaaagcaccctgcatcactagtaatagtgtattttgctattctgcccttgtaatcggtgtccctgtaaaacaatccccacagattactttcagaaatagatgtatttctctacgtaagggccaggtttattttctccttttttgagatttctagaaaaaatgctgcttgcacatgttggttcttgaaaccttagctagaagaatttcaggtcataccaacatgtggataggctatagctgttcagaggtctcctgggggagcttaaaacgggggaaacactggttttcacagatgctccacatggctgtctttaaaagactcaaaacttttttttgtcctctttgttatgcttggaagctcccccccccccaacagtgtgtcgagtctttgcaaagaaacctttagatgtggttcatagatatatgaatacgtatctgtgtaaaacagtgagtgtgcagtgtgtaaatactttaaattattatgctagaaaaataaagttacataccttgctgtggaa

SEQ ID NO: 284016 - DNA, 4453 bp, Homo sapiens
ccgggccgccggtgggtggtcgctagggctgggccagcctcttggaggtccacgcccgccgagcccacgctggctggggccggggtgccggcgcgctcgggactcgtctcagcagtcgctcacggtctttgtgtcttctcttccgcccctttccctgcctgccgcctccggccgccacgatgcccctgcgccccgctgctgccgccgcggactggctgcgccggctgcgcgctgcttgctgcggcggtggtggcgccccatctgctacacgggcctgaagaaggaagaagaggaagcgaagcgcgccccccggcccatgccgcagccacgggcccagacccgccacggcgcccgcgccgccgccctcgccggagcccacgagacctgcatggacgggcatgggcttgagagcagcaccttccagcgccgccgctgccgccgccgaggttgagcagcgccgccgccccgggctctgccccccgccgctggagctgctgctgctgctgctgttcagcctcgggctgctccacgcaggtgactgccaacagccagcccaatgtcgaatccagaaatgcaccacggacttcgtgtccctgacttctcacctgaactctgccgttgacggctttgactctgagttttgcaaggccttgcgtgcctatgctggctgcacccagcgaacttcaaaagcctgccgtggcaacctggtataccattctgccgtgttgggtatcagtgacctcatgagccagaggaattgttccaaggatggacccacatcctctaccaaccccgaagtgacccatgatccttgcaactatcacagccacgctggagccagggaacacaggagaggggaccagaaccctcccagttaccttttttgtggcttgtttggagatcctcacctcagaactttcaaggataacttccaaacatgcaaagtagaaggggcctggccactcatagataataattatctttcagttcaagtgacaaacgtacctgtggtccctggatccagtgctactgctacaaataagatcactattatcttcaaagcccaccatgagtgtacagatcagaaagtctaccaagctgtgacagatgacctgccggccgcctttgtggatggcaccaccagtggtggggacagcgatgccaagagcctgcgtatcgtggaaagggagagtggccactatgtggagatgcacgcccgctatatagggaccacagtgtttgtgcggcaggtgggtcgctacctgacccttgccatccgtatgcctgaagacctggccatgtcctacgaggagagccaggacctgcagctgtgcgtgaacggctgccccctgagtgaacgcatcgatgacgggcagggccaggtgtctgccatcctgggacacagcctgcctcgcacctccttggtgcaggcctggcctggctacacactggagactgccaacactcaatgccatgagaagatgccagtgaaggacatctatttccagtcctgtgtcttcgacctgctcaccactggtgatgccaactttactgccgcagcccacagtgccttggaggatgtggaggccctgcacccaaggaaggaacgctggcacattttccccagcagtggcaatgggactccccgtggaggcagtgatttgtctgtcagtctaggactcacctgcttgatccttatcgtgtttttgtaggggttgtcttttgttttggttttttattttttgtctataacaaaattttaaaatatatattgtcataatatattgagtaaaagagtatatatgtatataccatgtatatgacaggatgtttgtcctgggacacccaccagattgtacatactgtgtttggctgttttcacatatgttggatgtagtgttctttgattgtatcaattttgttttgcagttctgtgaaatgttttataatgtccctgcccagggacctgttagaaagcactttattttttatatattaaatatttatgtgtgtgcttggttgatatgtatagtacatatacacagacatccatatgcagcgtttcctttgaaggtgaccagttgtttgtagctattcttggctgtaccttcctgccctttcccattgctactgatttgccacggtgtgcagcttttactcgccaccttccggtggagctgcctcgttcctttgaactatgccctcacccttctgccctcacttgatttgaaagggtcgttaactctcccttacaggtgctttgactcttaaacgctgatcttaagaagctctcttcatctaagagctgttactttttcagaagggggggtattattggtattctgattactctcaattctaattgttatatatttgagcccatacagtgtattaggttgaaccatagaaactgctattctcgtaggtcaaaagggtctagtgatggaagttttgtagataagtaccaggcatctcagtaactcctagactttttctcatcccatgccccgttttaaattgtcagttttccctctgactcttctgtgttaaaacatgaaactataaatttagtaattatcatgccttgctctttttaatctatatgactgatgcaagcccctcttcttaaccgtttcttggctttgagcccagaaacacagctctccctgtctccaactccagtaagccctcctcagcctcaccttacgaatccaaagaactggggtttgttaggttctttctctaatgtagaggcccagatcccatcacaaagtttttcattcttccttgtccaccatgatcttcatcacagtctttgatatgtctgcatgcaaagtggaacagagttgggcggcaatgacagaagagcttccttggcctgactcggtgtgcggccacttcggcactgcttaatccagatattcttgttaactaagcattgtgcttcccaggtggtctgaagtcaggtactctctctctcaacacctgtagttgaatatgatttggtcagttgctcgttgtaacttggagaaattcctataaagtaagatctccttgcctcttccatccattgttggcacccccttgcaaaaggaaaagaacagcaaaagtcaggagcagtaatctgagaaagttaactccaggataggtaggtttctattgttatagctagatgtaaatctttagttccaagaagtgatagagtttctgctttaataatttgttgataagtttacataaacagaaataaaagatactatctttaccgtagtagttcaggccaagattatgcttagttttagttctccaggtagttacttttgccatgtcctattgatcagtgacactgccagaggcccataccggcaagaggaagaggacgtcattttgtaaagtttaacttcttagcgaactgatgtgccacccagtcacagagtggagttgtgaattcatgtagaggtggcaaacctctaccttgtgttgatgagagaataatcttgggcagtctgggaaaataaggaaggcatctccttcttactcatggagattcaactatagagagttgaaacctaaacccgccttccttttatagaagctggactagagacggactgaccatcagctctgaactgtggctttttttgttcacctatgatgccatgtaccaaattcagaagctatcgttaataatttgttttataattgagtagtacaagcgaggaaaaaatacggaggataaccactatttttgtgcaaataatatgaaagtgaagtaaaagcaatagaagaaatttctataggatctgggtttagagtgtgtatcattaataaatatacctttgctcttttcagggaaaataacaaccacccttactgatagttgggaaaagaagattgggttattttgccatatcatttagctggaagtgacatttaaaagcaccctgcatcactagtaatagtgtattttgctattctgcccttgtaatcggtgtccctgtaaaacaatccccacagattactttcagaaatagatgtatttctctacgtaagggccaggtttattttctccttttttgagatttctagaaaaaatgctgcttgcacatgttggttcttgaaaccttagctagaagaatttcaggtcataccaacatgtggataggctatagctgttcagaggtctcctgggggagcttaaaacgggggaaacactggttttcacagatgctccacatggctgtctttaaaagactcaaaacttttttttgtcctctttgttatgcttggaagctcccccccccccaacagtgtgtcgagtctttgcaaagaaacctttagatgtggttcatagatatatgaatacgtatctgtgtaaaacagtgagtgtgcagtgtgtaaatactttaaattattatgctagaaaaataaagttacataccttgctgtggaa

SEQ ID NO: 284017 - DNA, 2308 bp, Homo sapiens
  misc_feature (294)..(294): n is a, c, g, or t
  misc_feature (303)..(303): n is a, c, g, or t
ctgtcgtcgttgcccgtgttgccaaggtcgtctcctgatggtgtcggttcgaatgtcaaagcgcataggtctatggaaacgcatctaaatatagcacactgttgctttcccagattcgggttgccaattactagggctctccatgcttacccatcgacttcctactatgggtcttctgatttagactactactactggccgatacattaagggtatgcagaccagtacaggatgtggatactctcctcactcaccgctcacccatggtgtctacgcagtactggcaatggtggncgtgggagntccgtcttactgatggctatttgatacaaactcctaccatgatgcactcatcccatgccccgttttaaattgtcagttttccctctgactcttctgtgttaaaacatgaaactataaatttagtaattatcatgccttgctctttttaatctatatgactgatgcaagcccctcttcttaaccgtttcttggctttgagcccagaaacacagctctccctgtctccaactccagtaagccctcctcagcctcaccttacgaatccaaagaactggggtttgttaggttctttctctaatgtagaggcccagatcccatcacaaagtttttcattcttccttgtccaccatgatcttcatcacagtctttgatatgtctgcatgcaaagtggaacagagttgggcggcaatgacagaagagcttccttggcctgactcggtgtgcggccacttcggcactgcttaatccagatattcttgttaactaagcattgtgcttcccaggtggtctgaagtcaggtactctctctctcaacacctgtagttgaatatgatttggtcagttgctcgttgtaacttggagaaattcctataaagtaagatctccttgcctcttccatccattgttggcacccccttgcaaaaggaaaagaacagcaaaagtcaggagcagtaatctgagaaagttaactccaggataggtaggtttctattgttatagctagatgtaaatctttagttccaagaagtgatagagtttctgctttaataatttgttgataagtttacataaacagaaataaaagatactatctttaccgtagtagttcaggccaagattatgcttagttttagttctccaggtagttacttttgccatgtcctattgatcagtgacactgccagaggcccataccggcaagaggaagaggacgtcattttgtaaagtttaacttcttagcgaactgatgtgccacccagtcacagagtggagttgtgaattcatgtagaggtggcaaacctctaccttgtgttgatgagagaataatcttgggcagtctgggaaaataaggaaggcatctccttcttactcatggagattcaactatagagagttgaaacctaaacccgccttccttttatagaagctggactagagacggactgaccatcagctctgaactgtggctttttttgttcacctatgatgccatgtaccaaattcagaagctatcgttaataatttgttttataattgagtagtacaagcgaggaaaaaatacggaggataaccactatttttgtgcaaataatatgaaagtgaagtaaaagcaatagaagaaatttctataggatctgggtttagagtgtgtatcattaataaatatacctttgctcttttcagggaaaataacaaccacccttactgatagttgggaaaagaagattgggttattttgccatatcatttagctggaagtgacatttaaaagcaccctgcatcactagtaatagtgtattttgctattctgcccttgtaatcggtgtccctgtaaaacaatccccacagattactttcagaaatagatgtatttctctacgtaagggccaggtttattttctccttttttgagatttctagaaaaaatgctgcttgcacatgttggttcttgaaaccttagctagaagaatttcaggtcataccaacatgtggataggctatagctgttcagaggtctcctgggggagcttaaaacgggggaaacactggttttcacagatgctccacatggctgtctttaaaagactcaaaacttttttttgtcctctttgttatgcttggaagctcccccccccccaacagtgtgtcgagtctttgcaaagaaacctttagatgtggttcatagatatatgaatacgtatctgtgtaaaacagtgagtgtgcagtgtgtaaatactttaaattattatgctagaaaaataaagttacataccttgctgtggaa

SEQ ID NO: 284018 - DNA, 2110 bp, Homo sapiens
gagaaagctgcctggaggaagctgctggggtgcggggggctgagggatttggctccccgccctctcccctagatggcggagaaatcgggctagctggaagggcgcagctcctctcccagagctcattctggagtcggagaactgggagagcggcccccgaggcggagcctccctcccgccccgagtcgcgctgccccccacctgggggagaggggcgggcgccgcgctgccttccctccgcgcctcggccgcgtggcttgcggcttattttcccagctggcaagcgtcgcgctgcagacaagggaatgcctgtggtgagttgtttattttgttgaagtttgcggtgggcccgggggacgtggggggcgagcggcaggcagcggccgggactgttttgtttaggtctccatccacctgtgtggtataaatctgccagcctcaaggcggcgggggaccggagtgagaaagctctgacgctcccaaaagccccttttcgcaacttacagatctaggaccacatttgattctccacgcctggaaccggctagatcctagtttacgctcaccccgccctccagcctcccatcaacgcttcccgcacccgctgtgtgcagggctggcgctccgcagagcaaacagcgcccacgacccagggacagctggccaccgaagtccctccccggcgcccttccccgttccttgaggataggggagctgaggttttcatgtgaagggcgcccatgaaattcgtgggaacttgttctggcgtcttctggagtggagttctttcaggggtttcgggtctgcccgggactacaaaatgggatcctgggttggctggagtttcccagactaggctggagagaggtcggctgttggctcgcgggagagcccagaggaaccccttgggcgatggcagtcaagaccggcggctgcgtttgcctggaagaaaagcctaaatacattagcgagctggtaaagcttttaaggccttcttgggagcgagtggctggctaatgagaggttaattttgtttcgaagggaaggctgcactggtttcctgagataaatggacaggaagcgcattacctccgcgcgctggcaagcggctcccaaatgctttttgcacctgccgttttgagcggtgagagcagcggcggagcccgcagggattgcgggggcccgttgtctacgagcgggtgatgagccccccgcaagccccgggctctctccctccgcgagtgcattgctcacgccaagctttgggactcttctctcacacccaggtcctgcgtgttccgaagttcaggggccccctgatcccgctgagccccctccaggagcgaaagggttaagaatgataaggaagaagaggaagcgaagcgcgccccccggcccatgccgcagccacgggcccagacccgccacggcgcccgcgccgccgccctcgccggagcccacgagacctgcatggacgggcatgggcttgagagcagcaccttccagcgccgccgctgccgccgccgaggttgagcagcgccgccgccccgggctctgccccccgccgctggagctgctgctgctgctgctgttcagcctcgggctgctccacgcaggtgactgccaacagccagcccaatgtcgaatccagaaatgcaccacggacttcgtgtccctgacttctcacctgaactctgccgttgacggctttgactctgagttttgcaaggccttgcgtgcctatgctggctgcacccagcgaacttcaaaagcctgccgtggcaacctggtataccattctgccgtgttgggtatcagtgacctcatgagccagaggaattgttccaaggatggacccacatcctctaccaaccccgaagtgacccatgatccttgcaactatcacagccacgctggatccagtgctactgctacaaataaggcaagtataccttcttttttccctctccctactcagctttcaaaagatgtttgattcttcagataacttttgaaatgtgctataaagggcctagtttaaaaggaacttcttttgaaaagcaattaacagttgataaaggattaaataaaaattatctagtaaggaatt

SEQ ID NO: 284019 - DNA, 873 bp, Homo sapiens
caggtgctggagaaaaattattctcatcacaatgcggtaaaatggccaataaagcaaacacttccggtgactttgagaaagatgatgatgcctgtaagactgaggacagcgatgacatccattttgaaccagtagttcaaatgcctgaaaaagtagaacttgtaacaggagaagaaggtgaaaaagttctgtattcacagggggtaaaactatttagatttgatgctgagataagtcagtggaaagaaaggggcttggggaacttaaaaattctcaaaaatgaggtcaatggcaaaccaagaatgctgatgcgaagagaccaagtactaaaagtgtgtgctaatcattggataacaactacaatgaacctgaagcccctctctggatcagatagagcatggatgtggttagccagtgatttctctgatggtgatgccaaactagagcggttggcagcacaatttaaaacaccagagctggctgaagaattcaagcagaaatttgaggaatgccagcggcttctgttagacataccacttcaaactccccataaacttgtagatactggcagagctgccaagctaatacagagagctgaagaaatgaagagtggactgaaagatttcaaaacgtttttgacaaatgatcaaacaaaagtcactgaggaagaaaataagggttcaggtacaggtgcagccggtgcctcagacacaacaataaaacccaatcctgaaaacactgggcccacattagaatgggataactatgatttaagggaagatgctttggatgataatgttagtagtagctcagtacatgattctccgttggcaagtagccctgtgagaaaaggacgaccgatgggcggccgct

SEQ ID NO: 284020 - DNA, 2447 bp, Homo sapiens
caggtgctggagaaaaattattctcatcacaatgcggtaaaatggccaataaagcaaacacttccggtgactttgagaaagatgatgatgcctgtaagactgaggacagcgatgacatccattttgaaccagtagttcaaatgcctgaaaaagtagaacttgtaacaggagaagaaggtgaaaaagttctgtattcacagggggtaaaactatttagatttgatgctgagataagtcagtggaaagaaaggggcttggggaacttaaaaattctcaaaaatgaggtcaatggcaaaccaagaatgctgatgcgaagagaccaagtactaaaagtgtgtgctaatcattggataacaactacaatgaacctgaagcccctctctggatcagatagagcatggatgtggttagccagtgatttctctgatggtgatgccaaactagagcggttggcagcacaatttaaaacaccagagctggctgaagaattcaagcagaaatttgaggaatgccagcggcttctgttagacataccacttcaaactccccataaacttgtagatactggcagagctgccaagctaatacagagagctgaagaaatgaagagtggactgaaagatttcaaaacgtttttgacaaatgatcaaacaaaagtcactgaggaagaaaataagggttcaggtacaggtgcagccggtgcctcagacacaacaataaaacccaatcctgaaaacactgggcccacattagaatgggataactatgatttaagggaagatgctttggatgataatgttagtagtagctcagtacatgattctccgttggcaagtagccctgtgagaaaaaatattttccgctttgatgagtcaacaacaggatttaacttcagttttaaatctgctttgagtctatctaagtctcctgccaagttgaatcagagtgggacttcagttggcactgatgaagaatctgatgttactcaagaagaagagagagatggacagtactttgaacctgttgttcctttacctgatctagttgaagtatccagtggtgaggaaaatgaacaagttgtttttagtcacatggcagaactctacagatatgataaagatgttggtcaatggaaagaaaggggcattggtgatataaagattttacagaattatgataataagcaagttcgtatagtgatgagaagggaccaagtattaaaactttgtgccaatcacagaataactccagacatgagtttgcaaaatatgaaagggacagaaagagtatgggtgtggactgcatgtgattttgcagatggagaaagaaaagtagagcatttagctgttcgttttaaactacaggatgttgcagactcatttaagaaaatttttgatgaagcaaaaaacagcccaggaaaaagattctttgataacacctcatgtttctcggtcaagcactcccagagagtcaccatgtggcaaaattgctgtagctgtattagaagaaaccacaagagagaggacagatgttattcagggtgatgatgtagcagatgcagcttcagaagttgaagtgtctagcacatctgaaacaacaacaaaagcagtggtttctcctccaaagtttgtatttggttcagagtctgttaaaagaatttttagtagtgaaaaatcaaacccatttgcatttggcaacagttctgccactgggtctttgtttggatttagttttaatgcacctttgaaaagtaacgatagtgaaactagttcagtagcccagagtggatctgaaagcaaagtggaacctaaaaaatgtgaactgtcaaagaactctgatatcgaacagtcttcagatagcaaagtcaaaaatctctctgcttcctttccaatggaagaatcttcaatcaactacacatttaaaacaccagaaaaggagcctccattatggcatgctgaatttaccaaagaagaattggttcagaagctcagttccaccacaaaaagtgcagatcagttaaacggcctgcttcgggaaacagaggcaaccagtgcagtccttatggagcaaattaagcttctcaaaagtgaaataagaagattggaaaggaatcaagaggagtctgcagctaacgtggaacacttgaagaacgtcttgctgcagttcattttcttgaagccaggtagtgagagagagagccttcttcctgttataaatacgatgttgcagctcagccctgaagaaaagggaaaacttgctgcggttgctcaaggtcttcaagaaacctccatacccaagaaaaaatagaaagcaaccatgttctactatggtgccaaaaatagttgaacatcgacatcaaaaagattctttctgtctgcttattcacatattctggtttgaattaaaagtgatgaaattatcctaaaaacagttggccctctgtatcc

SEQ ID NO: 284021 - DNA, 868 bp, Homo sapiens
gtaaatgttaatgctttccttatacgtgaaatgacataaaatcttggaatattaatagatgggaagaagatgtgtaataaaactgtctataaacacaattctgacaaatttcagaactgggactcatagggcttgtattcagttagattacatgctttacaacagagatactgttttatttgtgtcacctacaacatataatctgttgattgaggtatgttgaatagatgaatggcaaagaaagcagacctataaaatatcacatagtaagatatttatatttagatttttcttatttagaatcttcatctgtaatgtatgattttgaaaattaattcttggaacaacatgttgcagagcctccattatggcatgctgaatttaccaaagaagaattggttcagaagctcagttccaccacaaaaagtgcagatcagttaaacggcctgcttcgggaaacagaggcaaccagtgcagtccttatggagcaaattaagcttctcaaaagtgaaataagaagattggaaaggaatcaagaggagtctgcagctaacgtggaacacttgaagaacgtcttgctgcagttcattttcttgaagccaggtagtgagagagagagccttcttcctgttataaatacgatgttgcagctcagccctgaagaaaagggaaaacttgctgcggttgctcaaggtcttcaagaaacctccatacccaagaaaaaatagaaagcaaccatgttctactatggtgccaaaaatagttgaacatcgacatcaaaaagattctttctgtctgcttattcacatattctggtttgaattaaaagtgatgaaattatcctaaaaacagttggccctctgtatcc

SEQ ID NO: 284022 - DNA, 1787 bp, Homo sapiens
tagtgaggccgcgcgtgtttatggcagagggtgcagccggtgcctcagacacaacaataaaacccaatcctgaaaacactgggcccacattagaatgggataactatgatttaagggaagatgctttggatgataatgttagtagtagctcagtacatgattctccgttggcaagtagccctgtgagaaaaaatattttccgctttgatgagtcaacaacaggatttaacttcagttttaaatctgctttgagtctatctaagtctcctgccaagttgaatcagagtgggacttcagttggcactgatgaagaatctgatgttactcaagaagaagagagagatggacagtactttgaacctgttgttcctttacctgatctagttgaagtatccagtggtgaggaaaatgaacaagttgtttttagtcacatggcagaactctacagatatgataaagatgttggtcaatggaaagaaaggggcattggtgatataaagattttacagaattatgataataagcaagttcgtatagtgatgagaagggaccaagtattaaaactttgtgccaatcacagaataactccagacatgagtttgcaaaatatgaaagggacagaaagagtatgggtgtggactgcatgtgattttgcagatggagaaagaaaagtagagcatttagctgttcgttttaaactacaggatgttgcagactcatttaagaaaatttttgatgaagcaaaaaacagcccaggaaaaagattctttgataacacctcatgtttctcggtcaagcactcccagagagtcaccatgtggcaaaattgctgtagctgtattagaagaaaccacaagagagaggacagatgttattcagggtgatgatgtagcagatgcagcttcagaagttgaagtgtctagcacatctgaaacaacaacaaaagcagtggtttctcctccaaagtttgtatttggttcagagtctgttaaaagaatttttagtagtgaaaaatcaaacccatttgcatttggcaacagttctgccactgggtctttgtttggatttagttttaatgcacctttgaaaagtaacgatagtgaaactagttcagtagcccagagtggatctgaaagcaaagtggaacctaaaaaatgtgaactgtcaaagaactctgatatcgaacagtcttcagatagcaaagtcaaaaatctctctgcttcctttccaatggaagaatcttcaatcaactacacatttaaaacaccagaaaaggagcctccattatggcatgctgaatttaccaaagaagaattggttcagaagctcagttccaccacaaaaagtgcagatcagttaaacggcctgcttcgggaaacagaggcaaccagtgcagtccttatggagcaaattaagcttctcaaaagtgaaataagaagattggaaaggaatcaagaggagtctgcagctaacgtggaacacttgaagaacgtcttgctgcagttcattttcttgaagccaggtagtgagagagagagccttcttcctgttataaatacgatgttgcagctcagccctgaagaaaagggaaaacttgctgcggttgctcaaggtcttcaagaaacctccatacccaagaaaaaatagaaagcaaccatgttctactatggtgccaaaaatagttgaacatcgacatcaaaaagattctttctgtctgcttattcacatattctggtttgaattaaaagtgatgaaattatcctaaaaacagttggccctctgtatcc

SEQ ID NO: 284023 - DNA, 824 bp, Homo sapiens
gcggaaacgggttttgccagttatgcgaaaacatggctgcggccggtttggcccttctttgtaggagagtttcatccgccctgaaatcttcccgatcgttaataactcctcaggtccctgcctgcacagggttttttcttagtttgttgcctaagagtacaccaaatgtgacatcctttcaccaatatagattacttcataccacattgtcaaggaaaggactagaagaattttttgatgacccaaaaaactgggggcaagaaaaagtaaaatctggagcagcatggacctgtcagcaactaaggaacaaaagtaatgaagatttacacaaactttggtatgtcttactgaaagaaagaaacatgcttctaaccctagagcaggaggccaagcggcagagattgccaatgccaagtccagagcggttagataaggtagtagattccatggatgcattagataaagttgtccaggaaagagaagatgccctaaggcttcttcagactggtcaagaaagagctagacctggtgcttggagaagagacatctttggaagaatcatctggcacaagttcaagcagtgggttataccttggcacctaaataaaagatacaataggaaacgattctttgccttgccttatgtggaccattttctcagactggaacgtgagaaacgagcccgcatcaaagcacggaaggaaaatttagagagaaagaaagcaaaaattcttttaaaaaagtttccacatcttgctgaagcccaaaagtcaagtcttgtctaagatgtctgaactattaaatttaccattttgtttttcttg

SEQ ID NO: 284024 - DNA, 1189 bp, Homo sapiens
gcggaaacgggttttgccagttatgcgaaaacatggctgcggccggtttggcccttctttgtaggagagtttcatccgccctgaaatcttcccgatcgttaataactcctcaggtccctgcctgcacagggttttttcttagtttgttgcctaagagtacaccaaatgtgacatcctttcaccaatatagattacttcataccacattgtcaaggaaaggactagaagaattttttgatgacccaaaaaactgggggcaagaaaaagtaaaatctggagcagcatggacctgtcagcaactaaggaacaaaagtaatgaagatttacacaaactttggtatgtcttactgaaagaaagaaacatgcttctaaccctagagcaggaggccaagcggcagagattgccaatgccaagtccagagcggttagataaggtagtagattccatggatgcattagataaagttgtccaggaaagagaagatgccctaaggcttcttcagactggtcaagaaagagctagacctggtgcttggagaagagacatctttggaagaatcatctggcacaagttcaagcagtgggttataccttggcacctaaataaaagatacaataggaaacgattctttgccttgccttatgtggaccattttctcagactggaacgtgagaaacgagcccgcatcaaagcacggaaggaaaatttagagagaaagaaagcaaaaattcttttaaaaaagtttccacatcttgctgaagcccaaaagtcaagtcttgtctaagatgtctgaactattaaatttaccattttgtttttcttgaatagtctgtgtacaggagtaaatatgttaagtggtttataaagaaattctgtttttagtcaagtgactttactaatcagttgttctaagtgtgaatatggcatgctaattagctaatttggtagaagctaatttgcttctaaaaatcaggtataaagttcagatgagattcccactttataaattctgacatttaagcaggctttaaatgtcacctgctaccttagagtgtgaaaggtgatggtaactgccacagcaaaggcaataccgtagtttttgaatttgaataatagttttacctctgttgttaataggctatgaagaggatgtgggtattgctgttaataaacggaggactttgattc

SEQ ID NO: 284025 - DNA, 1264 bp, Homo sapiens
gcggaaacgggttttgccagttatgcgaaaacatggctgcggccggtttggcccttctttgtaggagagtttcatccgccctgaaatcttcccgatcgttaataactcctcaggtccctgcctgcacagggttttttcttagtttgttgcctaagagtacaccaaatgtgacatcctttcaccaatatagattacttcataccacattgtcaaggaaaggactagaagaattttttgatgacccaaaaaactgggggcaagaaaaagtaaaatctggagcagcatggacctgtcagcaactaaggaacaaaagtaatgaagatttacacaaactttggtatgtcttactgaaagaaagaaacatgcttctaaccctagagcaggaggccaagcggcagagattgccaatgccaagtccagagcggttagataaggtagtagattccatggatgcattagataaagttgtccaggaaagagaagatgccctaaggcttcttcagactggtcaagaaagagctagacctggtgcttggagaagagacatctttggaagaatcatctggcacaagttcaagcagtgggttataccttggcacctaaataaaagatacaataggaaacgattctttgccttgccttatgtggaccattttctcagactggaacgtgagaaacgagcccgcatcaaagcacggaaggaaaatttagagagaaagaaagcaaaaattcttttaaaaaagtttccacatcttgctgaagcccaaaagtcaagtcttgtctaagatgtctgaactattaaatttaccattttgtttttcttgaatagtctgtgtacaggagtaaatatgttaagtggtttataaagaaaaaaaaaaaaaaaaaaaaaaaaaattaaaaaaaaaaaaaaaaaaaaaaaaaaaaaaaaaaaaaaagaaaaaaaaaaaaagaaaaaaaaaaaaaaaacaaaaaaagaaaaaaaaagaaaaaaaaaagcgccaaaaaaaaaaaagaaaaaaaagaaaaaaaaggggggggcacgcgccaaaaaaaaccacccggagaggccccaccagcaccaccccaccacacgataaaacaaaggcacacgaagaggagaggagagagtacaaccagacgagcgagagagagggagcgaaacaacaacagcagggcgagcaggaagaacaaaccacagcaatcaagacaccgagggaagcaacaccaacaagcgggcgacaaccaaaagaggcagagaacaagg

SEQ ID NO: 284026 - DNA, 1043 bp, Homo sapiens
gcggaaacgggttttgccagttatgcgaaaacatggctgcggccggtttggcccttctttgtaggagagtttcatccgccctgaaatcttcccgatcgttaataactcctcaggtccctgcctgcacagggagcagcatggacctgtcagcaactaaggaacaaaagtaatgaagatttacacaaactttggtatgtcttactgaaagaaagaaacatgcttctaaccctagagcaggaggccaagcggcagagattgccaatgccaagtccagagcggttagataaggtagtagattccatggatgcattagataaagttgtccaggaaagagaagatgccctaaggcttcttcagactggtcaagaaagagctagacctggtgcttggagaagagacatctttggaagaatcatctggcacaagttcaagcagtgggttataccttggcacctaaataaaagatacaataggaaacgattctttgccttgccttatgtggaccattttctcagactggaacgtgagaaacgagcccgcatcaaagcacggaaggaaaatttagagagaaagaaagcaaaaattcttttaaaaaagtttccacatcttgctgaagcccaaaagtcaagtcttgtctaagatgtctgaactattaaatttaccattttgtttttcttgaatagtctgtgtacaggagtaaatatgttaagtggtttataaagaaattctgtttttagtcaagtgactttactaatcagttgttctaagtgtgaatatggcatgctaattagctaatttggtagaagctaatttgcttctaaaaatcaggtataaagttcagatgagattcccactttataaattctgacatttaagcaggctttaaatgtcacctgctaccttagagtgtgaaaggtgatggtaactgccacagcaaaggcaataccgtagtttttgaatttgaataatagttttacctctgttgttaataggctatgaagaggatgtgggtattgctgttaataaacggaggactttgattc

SEQ ID NO: 284027 - DNA, 1041 bp, Homo sapiens
  misc_feature (968)..(968): n is a, c, g, or t
  misc_feature (994)..(994): n is a, c, g, or t
  misc_feature (1014)..(1014): n is a, c, g, or t
gcggaaacgggttttgccagttatgcgaaaacatggctgcggccggtttggcccttctttgtaggagagtttcatccgccctgaaatcttcccgatcgttaataactcctcaggtccctgcctgcacagggttttttcttagtttgttgcctaagagtacaccaaatgtgacatcctttcaccaatatagattacttcataccacattgtcaaggaaaggactagaagaattttttgatgacccaaaaaactgggggcaagaaaaagtaaaatctggagcagcatggacctgtcagcaactaaggaacaaaagtaatgaagatttacacaaactttggtatgtcttactgaaagaaagaaacatgcttctaaccctagagcaggaggccaagcggcagagattgccaatgccaagtccagagcggttagataaggtagtagattccatggatgcattagataaagttgtccaggaaagagaagatgccctaaggcttcttcagactggtcaagaaagagctagacctggtgcttggagaagagacatctttggaagaatcatctggcacaagttcaagcagtgggttataccttggcacctaaataaaagatacaataggaaacgattctttgccttgccttatgtggaccattttctcagcaattgcatatggcaaggccaaggtgccttagctggaccaggaggtgcccactacagaggaggatgacgccaccagccagcgccagcagccaggagaggagccagagcccttgtgccaggcggatgcggggctgcaggggcagcaccaggggcaacaccggcgccatctcccatctctgcccaagggagtgcagaggtgtcagggatggaagctggctggggcaggatgctgagtcagcccggcccggcttgagctgggctaatgccaccctgaccccaataccctgagcattctcccatcctcagncctaataacccgcccccctgtcagcnccaatacaagatgccttggncttgccatatgcaagggtaccgagctc

SEQ ID NO: 284028 - DNA, 811 bp, Homo sapiens
atagatcgagctcgtacctgcatatggcaaggccaagtccagagcggttagataaggtagtagattccatggatgcattagataaagttgtccaggaaagagaagatgccctaaggcttcttcagactggtcaagaaagagctagacctggtgcttggagaagagacatctttggaagaatcatctggcacaagttcaagcagtgggttataccttggcacctaaataaaagatacaataggaaacgattctttgccttgccttatgtggaccattttctcagactggaacgtgagaaacgagcccgcatcaaagcacggaaggaaaatttagagagaaagaaagcaaaaattcttttaaaaaagtttccacatcttgctgaagcccaaaagtcaagtcttgtctaagatgtctgaactattaaatttaccattttgtttttcttgaatagtctgtgtacaggagtaaatatgttaagtggtttataaagaaattctgtttttagtcaagtgactttactaatcagttgttctaagtgtgaatatggcatgctaattagctaatttggtagaagctaatttgcttctaaaaatcaggtataaagttcagatgagattcccactttataaattctgacatttaagcaggctttaaatgtcacctgctaccttagagtgtgaaaggtgatggtaactgccacagcaaaggcaataccgtagtttttgaatttgaataatagttttacctctgttgttaataggctatgaagaggatgtgggtattgctgttaataaacggaggactttgattc

SEQ ID NO: 284029 - DNA, 678 bp, Homo sapiens
gcggaaacgggttttgccagttatgcgaaaacatggctgcggccggtttggcccttctttgtaggagagtttcatccgccctgaaatcttcccgatcgttaataactcctcaggtccctgcctgcacagggagcagcatggacctgtcagcaactaaggaacaaaagtaatgaagatttacacaaactttggtatgtcttactgaaagaaagaaacatgcttctaaccctagagcaggaggccaagcggcagagattgccaatgccaagtccagagcggttagataaggtagtagattccatggatgcattagataaagttgtccaggaaagagaagatgccctaaggcttcttcagactggtcaagaaagagctagacctggtgcttggagaagagacatctttggaagaatcatctggcacaagttcaagcagtgggttataccttggcacctaaataaaagatacaataggaaacgattctttgccttgccttatgtggaccattttctcagactggaacgtgagaaacgagcccgcatcaaagcacggaaggaaaatttagagagaaagaaagcaaaaattcttttaaaaaagtttccacatcttgctgaagcccaaaagtcaagtcttgtctaagatgtctgaactattaaatttaccattttgtttttcttg

SEQ ID NO: 284030 - DNA, 1179 bp, Homo sapiens
  misc_feature (1)..(1): n is a, c, g, or t
ncgattctataggatccccgctatggctgcggccggtttggcccttctttgtaggagagtttcatccgccctgaaatcttcccgatcgttaataactcctcaggtccctgcctgcacagggttttttcttagtttgttgcctaagagtacaccaaatgtgacatcctttcaccaatatagattacttcataccacattgtcaaggaaaggactagaagaattttttgatgacccaaaaaactgggggcaagaaaaagtaaaatctggagcagcatggacctgtcagcaactaaggaacaaaagtaatgaagatttacacaaactttggtatgtcttactgaaagaaagaaacatgcttctaaccctagagcaggaggccaagcggcagagattgccaatgccaagtccagagcggttagataaggtagtagattccatggatgcattagataaagttgtccaggaaagagaagatgccctaaggcttcttcagactggtcaagaaagagctagacctggtgcttggagaagagacatctttggaagaatcatctggcacaagttcaagcagtgggttataccttggcacctaaataaaagatacaataggaaacgattctttgccttgccttatgtggaccattttctcagactggaacgtgagaaacgagcccgcatcaaagcacggaaggaaaatttagagagaaagaaagcaaaaattcttttaaaaaagtttccacatcttgctgaagcccaaaagtcaagtcttgtctaagatgtctgaactattaaatttaccattttgtttttcttgaatagtctgtgtacaggagtaaatatgttaagtggtttataaagaaattctgtttttagtcaagtgactttactaatcagttgttctaagtgtgaatatggcatgctaattagctaatttggtagaagctaatttgcttctaaaaatcaggtataaagttcagatgagattcccactttataaattctgacatttaagcaggctttaaatgtcacctgctaccttagagtgtgaaaggtgatggtaactgccacagcaaaggcaataccgtagtttttgaatttgaataatagttttacctctgttgttaataggctatgaagaggatgtgggtattgctgttaataaacggaggactttgattc

SEQ ID NO: 284031 - DNA, 979 bp, Homo sapiens
  misc_feature (1)..(1): n is a, c, g, or t
ncgattctataggatccccgctatggctgcggccggtttggcccttctttgtaggagagtttcatccgccctgaaatcttcccgatcgttaataactcctcaggtccctgcctgcacagggagcagcatggacctgtcagcaactaaggaacatgcttctaaccctagagcaggaggccaagcggcagagattgccaatgccaagtccagagcggttagataaggtagtagattccatggatgcattagataaagttgtccaggaaagagaagatgccctaaggcttcttcagactggtcaagaaagagctagacctggtgcttggagaagagacatctttggaagaatcatctggcacaagttcaagcagtgggttataccttggcacctaaataaaagatacaataggaaacgattctttgccttgccttatgtggaccattttctcagactggaacgtgagaaacgagcccgcatcaaagcacggaaggaaaatttagagagaaagaaagcaaaaattcttttaaaaaagtttccacatcttgctgaagcccaaaagtcaagtcttgtctaagatgtctgaactattaaatttaccattttgtttttcttgaatagtctgtgtacaggagtaaatatgttaagtggtttataaagaaattctgtttttagtcaagtgactttactaatcagttgttctaagtgtgaatatggcatgctaattagctaatttggtagaagctaatttgcttctaaaaatcaggtataaagttcagatgagattcccactttataaattctgacatttaagcaggctttaaatgtcacctgctaccttagagtgtgaaaggtgatggtaactgccacagcaaaggcaataccgtagtttttgaatttgaataatagttttacctctgttgttaataggctatgaagaggatgtgggtattgctgttaataaacggaggactttgattc

SEQ ID NO: 284032 - DNA, 832 bp, Homo sapiens
atctcctagaggatcccctgtattgcaaggccaagcggcagagattgccaatgccaagtccagagcggttagataaggtagtagattccatggatgcattagataaagttgtccaggaaagagaagatgccctaaggcttcttcagactggtcaagaaagagctagacctggtgcttggagaagagacatctttggaagaatcatctggcacaagttcaagcagtgggttataccttggcacctaaataaaagatacaataggaaacgattctttgccttgccttatgtggaccattttctcagactggaacgtgagaaacgagcccgcatcaaagcacggaaggaaaatttagagagaaagaaagcaaaaattcttttaaaaaagtttccacatcttgctgaagcccaaaagtcaagtcttgtctaagatgtctgaactattaaatttaccattttgtttttcttgaatagtctgtgtacaggagtaaatatgttaagtggtttataaagaaattctgtttttagtcaagtgactttactaatcagttgttctaagtgtgaatatggcatgctaattagctaatttggtagaagctaatttgcttctaaaaatcaggtataaagttcagatgagattcccactttataaattctgacatttaagcaggctttaaatgtcacctgctaccttagagtgtgaaaggtgatggtaactgccacagcaaaggcaataccgtagtttttgaatttgaataatagttttacctctgttgttaataggctatgaagaggatgtgggtattgctgttaataaacggaggactttgattc

SEQ ID NO: 284033 - DNA, 544 bp, Homo sapiens
  misc_feature (1)..(1): n is a, c, g, or t
ncgattctataggatccccgctatggctgcggccggtttggcccttctttgtaggagagtttcatccgccctgaaatcttcccgatcgttaataactcctcaggtccctgcctgcacagggagcagcatggacctgtcagcaactaaggaacaaaagtaatgaagatttacacaaactttggtatgtcttactgaaagaaagaaacatgcttctaaccctagagcaggaggccaagcggcagagattgccaatgccaagtccagagcggttagataaggtagtagattccatggatgcattagataaagttgtccaggaaagagaagatgccctaaggcttcttcagactggtcaagaaagagctagacctggtgcttggagaagagacatctttggaagaatcatctggcacaagttcaagcagtgggttataccttggcacctaaataaaagatacaataggaaacgattctttgccttgccttatgtggaccattttctcagaggtaagcatcagaagcacatgggagcttttccaaaaca

SEQ ID NO: 284034 - DNA, 4234 bp, Homo sapiens
tcccggggggccaggggcgggggccctggaaggagcgggagttcaagccgagcagggacggggctaggggtcggggggtgggggcagaaagctgaagctgacacccgtgcatccggacaccgcacgagcatcgcctgtgacagcgccccgggtccggtggagggcagcggggggaggagggaaggaggaggagaaggaggaggaggcgggagcagcatccggagcggagctgcagcagcgccgccttttgtgctgcggccgcggagcccccgagggcccagtgttcaccatcataccaggggccagaggcgatggcttgcctccatgagacccgaacaccctctccttcctttgggggctttgtgtctaccctaagtgaggcatccatgcgcaagctggacccagacacttctgactgcactcccgagaaggacctgacgcctacccagtgtgtacttcgagatgtggtaccccttggtgggcagggtgggggagggcccagcccctccccaggtggagagccgccccctgagccttttgccaacagtgtcctgcagctacatgagcaggatgcagggggcccagggggagcagctgggtcacctgagagtcgggcatccagagttcgagctgacgaggtgcgactgcagtgccagagtggcagtggcttccttgagggcctctttggctgcctgcgccctgtctggaccatgattggcaaagcctactccactgagcacaagcagcagcaggaagacctttgggaggtcccctttgaggaaatcctggacctgcagtgggtgggctcaggggcccagggtgctgtcttcctggggcgcttccacggggaggaggtggctgtgaagaaggtgcgagacctcaaagaaaccgacatcaagcacttgcgaaagctgaagcaccccaacatcatcactttcaagggtgtgtgcacccaggctccctgctactgcatcctcatggagttctgcgcccagggccagctgtatgaggtactgcgggctggccgccctgtcaccccctccttactggttgactggtccatgggcatcgctggtggcatgaactacctgcacctgcacaagattatccacagggatctcaagtcacccaacatgctaatcacctacgacgatgtggtgaagatctcagattttggcacttccaaggagctgagtgacaagagcaccaagatgtcctttgcagggacagtagcctggatggcccctgaggtgatccgcaatgaacctgtgtctgagaaggtcgacatctggtcctttggcgtggtgctatgggaactgctgactggtgagatcccctacaaagacgtagattcctcagccattatctggggtgtgggaagcaacagtctccatctgcccgtgccctccagttgcccagatggtttcaagatcctgcttcgccagtgctggaatagcaaaccacgaaatcgcccatcattccgacagatcctgctgcatctggacattgcctcagctgatgtactctccacaccccaggagacttactttaagtcccaggcagagtggcgggaagaagtaaaactgcactttgaaaagattaagtcagaagggacctgtctgcaccgcctagaagaggaactggtgatgaggaggagggaggagctcagacacgccctggacatcagggagcactatgaaaggaagctggagagagccaacaacctgtatatggaacttaatgccctcatgttgcagctggaactcaaggagagggagctgctcaggcgagagcaagctttagagcggaggtgcccaggcctgctgaagccacacccttcccggggcctcctgcatggaaacacaatggagaagcttatcaagaagaggaatgtgccacagaagctgtcaccccatagcaaaaggccagatatcctcaagacggagtctttgctccctaaactagatgcagccctgagtggggtggggcttcctgggtgtcctaagggccccccctcaccaggacggagtcgccgtggcaagacccgtcaccgcaaggccagcgccaaggggagctgtggggacctgcctgggcttcgtacagctgtgccaccccatgaacctggaggaccaggaagcccagggggcctaggagggggaccctcagcctgggaggcctgccctcccgccctccgtgggcttcatcatgacctcctgctccgcaaaatgtcttcatcgtccccagacctgctgtcagcagcactagggtcccggggccggggggccacaggcggagctggggatcctggctcaccacctccggcccggggtgacaccccaccaagtgagggctcagcccctggctccaccagcccagattcacctgggggagccaaaggggaaccacctcctccagtagggcctggtgaaggtgtggggcttctgggaactggaagggaagggacctcaggccggggaggaagccgggctgggtcccagcacttgaccccagctgcactgctgtacagggctgccgtcacccgaagtcagaaacgtggcatctcatcggaagaggaggaaggagaggtagacagtgaagtagagctgacatcaagccagaggtggcctcagagcctgaacatgcgccagtcactatctaccttcagctcagagaatccatcagatggggaggaaggcacagctagtgaaccttcccccagtggcacacctgaagttggcagcaccaacactgatgagcggccagatgagcggtctgatgacatgtgctcccagggctcagaaatcccactggacccacctccttcagaggtcatccctggccctgaacccagctccctgcccattccacaccaggaacttctcagagagcggggccctcccaattctgaggactcagactgtgacagcactgaattggacaactccaacagcgttgatgccttgcggcccccagcttccctccctccatgaaagccactcgtattccttgtacatagagaaatatttatataaattatatatatatacatatatatatatatatgcgccacataatcaacagaaagatggggctgtcccagccgtaagtcaggctcgagggagactgatcccctgaccaattcacctgataaactctagggacactggcagctgtggaaatgaatgaggcacagccgtagagctgtggctaagggcaagccccttcctgccccaccccattccttatattcagcaagcaacaaggcaatagaaaagccagggttgtctttatattctttatccccaaataatagggggtggggggaggggcggtgggaggggcaggagagaaaaccacttagactgcacttttctgttccgtttactctgtttacacattttgcacttgggaggagggaggctaaggctgggtcctcccctctgaggtttctcaggtggcaatgtaactcatttttttgtcccaccatttatcttctctgcccaagccctgtcttaaggcccagggggaggttaggagactgatagcatgtgatggctcaggctgaagaaccggggtgctgtttaagtccctgcttttatcctggtgcctgattggggtggggactgtcctactgtaacccctgtgaaaaaccttgaaatataacactccatgcaggcccagctgttgagggttttcttgatgaatgaatggggtaccatacatggttaagataaagccttgggctccggactttatctgaggtgtctggagaagttctcctgcccctccacttttttgcatctactctcactaaatgagtataatgtcaagccccaactttctaaaattataggaataaatggtagcagatacatccttctaacttgttatggaggactataaatgaagttactaaaaacaatagactgaaatttttagtttaaaatatgcaagcctgaacaaggggaccaacattcccaagaaactggaacccagtcagacatatgatcaactgcttaatgtgtatgccatgtatgtcatgtgtcattcctttcccccaccccctccctagtggaagtgcttgcctactcccctaggacaggtaagtcctcggaaagtctaatcctcaatcttttgggcacaagttttataagggccaaccaagcatggagtcagggaaaaataggatcgagggccacaaaaaaagatggaagtggtaaaatagaagaaaaca

SEQ ID NO: 284035 - DNA, 3996 bp, Homo sapiens
ggaggaggatggggcctagagccgagtgaattccaaggcccagtgttcaccatcataccaggggccagaggcgatggcttgcctccatgagacccgaacaccctctccttcctttgggggctttgtgtctaccctaagtgaggcatccatgcgcaagctggacccagacacttctgactgcactcccgagaaggacctgacgcctacccagtgtgtacttcgagatgtggtaccccttggtgggcagggtgggggagggcccagcccctccccaggtggagagccgccccctgagccttttgccaacagtgtcctgcagctacatgagcaggatgcagggggcccagggggagcagctgggtcacctgagagtcgggcatccagagttcgagctgacgaggtgcgactgcagtgccagagtggcagtggcttccttgagggcctctttggctgcctgcgccctgtctggaccatgattggcaaagcctactccactgagcacaagcagcagcaggaagacctttgggaggtcccctttgaggaaatcctggacctgcagtgggtgggctcaggggcccagggtgctgtcttcctggggcgcttccacggggaggaggtggctgtgaagaaggtgcgagacctcaaagaaaccgacatcaagcacttgcgaaagctgaagcaccccaacatcatcactttcaagggtgtgtgcacccaggctccctgctactgcatcctcatggagttctgcgcccagggccagctgtatgaggtactgcgggctggccgccctgtcaccccctccttactggttgactggtccatgggcatcgctggtggcatgaactacctgcacctgcacaagattatccacagggatctcaagtcacccaacatgctaatcacctacgacgatgtggtgaagatctcagattttggcacttccaaggagctgagtgacaagagcaccaagatgtcctttgcagggacagtagcctggatggcccctgaggtgatccgcaatgaacctgtgtctgagaaggtcgacatctggtcctttggcgtggtgctatgggaactgctgactggtgagatcccctacaaagacgtagattcctcagccattatctggggtgtgggaagcaacagtctccatctgcccgtgccctccagttgcccagatggtttcaagatcctgcttcgccagtgctggaatagcaaaccacgaaatcgcccatcattccgacagatcctgctgcatctggacattgcctcagctgatgtactctccacaccccaggagacttactttaagtcccaggcagagtggcgggaagaagtaaaactgcactttgaaaagattaagtcagaagggacctgtctgcaccgcctagaagaggaactggtgatgaggaggagggaggagctcagacacgccctggacatcagggagcactatgaaaggaagctggagagagccaacaacctgtatatggaacttaatgccctcatgttgcagctggaactcaaggagagggagctgctcaggcgagagcaagctttagagcggaggtgcccaggcctgctgaagccacacccttcccggggcctcctgcatggaaacacaatggagaagcttatcaagaagaggaatgtgccacagaagctgtcaccccatagcaaaaggccagatatcctcaagacggagtctttgctccctaaactagatgcagccctgagtggggtggggcttcctgggtgtcctaagggccccccctcaccaggacggagtcgccgtggcaagacccgtcaccgcaaggccagcgccaaggggagctgtggggacctgcctgggcttcgtacagctgtgccaccccatgaacctggaggaccaggaagcccagggggcctaggagggggaccctcagcctgggaggcctgccctcccgccctccgtgggcttcatcatgacctcctgctccgcaaaatgtcttcatcgtccccagacctgctgtcagcagcactagggtcccggggccggggggccacaggcggagctggggatcctggctcaccacctccggcccggggtgacaccccaccaagtgagggctcagcccctggctccaccagcccagattcacctgggggagccaaaggggaaccacctcctccagtagggcctggtgaaggtgtggggcttctgggaactggaagggaagggacctcaggccggggaggaagccgggctgggtcccagcacttgaccccagctgcactgctgtacagggctgccgtcacccgaagtcagaaacgtggcatctcatcggaagaggaggaaggagaggtagacagtgaagtagagctgacatcaagccagaggtggcctcagagcctgaacatgcgccagtcactatctaccttcagctcagagaatccatcagatggggaggaaggcacagctagtgaaccttcccccagtggcacacctgaagttggcagcaccaacactgatgagcggccagatgagcggtctgatgacatgtgctcccagggctcagaaatcccactggacccacctccttcagaggtcatccctggccctgaacccagctccctgcccattccacaccaggaacttctcagagagcggggccctcccaattctgaggactcagactgtgacagcactgaattggacaactccaacagcgttgatgccttgcggcccccagcttccctccctccatgaaagccactcgtattccttgtacatagagaaatatttatataaattatatatatatacatatatatatatatatgcgccacataatcaacagaaagatggggctgtcccagccgtaagtcaggctcgagggagactgatcccctgaccaattcacctgataaactctagggacactggcagctgtggaaatgaatgaggcacagccgtagagctgtggctaagggcaagccccttcctgccccaccccattccttatattcagcaagcaacaaggcaatagaaaagccagggttgtctttatattctttatccccaaataatagggggtggggggaggggcggtgggaggggcaggagagaaaaccacttagactgcacttttctgttccgtttactctgtttacacattttgcacttgggaggagggaggctaaggctgggtcctcccctctgaggtttctcaggtggcaatgtaactcatttttttgtcccaccatttatcttctctgcccaagccctgtcttaaggcccagggggaggttaggagactgatagcatgtgatggctcaggctgaagaaccggggtgctgtttaagtccctgcttttatcctggtgcctgattggggtggggactgtcctactgtaacccctgtgaaaaaccttgaaatataacactccatgcaggcccagctgttgagggttttcttgatgaatgaatggggtaccatacatggttaagataaagccttgggctccggactttatctgaggtgtctggagaagttctcctgcccctccacttttttgcatctactctcactaaatgagtataatgtcaagccccaactttctaaaattataggaataaatggtagcagatacatccttctaacttgttatggaggactataaatgaagttactaaaaacaatagactgaaatttttagtttaaaatatgcaagcctgaacaaggggaccaacattcccaagaaactggaacccagtcagacatatgatcaactgcttaatgtgtatgccatgtatgtcatgtgtcattcctttcccccaccccctccctagtggaagtgcttgcctactcccctaggacaggtaagtcctcggaaagtctaatcctcaatcttttgggcacaagttttataagggccaaccaagcatggagtcagggaaaaataggatcgagggccacaaaaaaagatggaagtggtaaaatagaagaaaaca

SEQ ID NO: 284036 - DNA, 3240 bp, Homo sapiens
tcttgatggcgagtgctgtcgccgactcgcttctcgctgctctcgtgcgcttgttgttggcagcgcctcctcgtgggctctggctcgccatcttgaatctcgtctgctagtttcggatgtgtttgtggttgagtcacatcctgtcgttgcgtgtgtctgcgtgtggcgcggagtggcttgagcgtttcttcgtctctcgttgttcggtttggtcatcttttcgattcggttctgcgtcttgtgctgcgtcgcctcggcttcacttcggctctgctgtttggtggtcttgtgttcgtttgctgctgttgtttgttttttgttttctgttgtagtgttgtgttcttggtgttgttttgtttcatcttttgtatgttttgtgtgtcgtttcttgtgtttcttgtttttttgtttttctgtatgtttgtgttgtttttttcaccactcgctggggcacaccccacgctgtttttcagttttcacccacaaggacaaaagaggctctccgacgcgcgccctctctcttgtagatatttttgtttggaaaatattcctcgagcactctagcacgagaactctaacttctggaaaaatgtgagtttgaataaagtgtgtccacacctctctctaacaactctttccactctgacgccccaccacggagaaaatttcactctgaggcgcctcataaaaaaaataaccccccataaaaaaataaaaaaaaaccaaggggagaagcttataaaactaaatatggatctcagcatcaacagctgaacagagaaaggaattaaaacgctttaattaaaaaatcacgagtggatgataaagtgtgtagaaactgaaaatttacaactatttaaaacctggcggacgcgtgggtcgacccacgcgtcggaatgtgccacagaagctgtcaccccatagcaaaaggccagatatcctcaagacggagtctttgctccctaaactagatgcagccctgagtggggtggggcttcctgggtgtcctaagggccccccctcaccaggacggagtcgccgtggcaagacccgtcaccgcaaggccagcgccaaggggagctgtggggacctgcctgggcttcgtacagctgtgccaccccatgaacctggaggaccaggaagcccagggggcctaggagggggaccctcagcctgggaggcctgccctcccgccctccgtgggcttcatcatgacctcctgctccgcaaaatgtcttcatcgtccccagacctgctgtcagcagcactagggtcccggggccggggggccacaggcggagctggggatcctggctcaccacctccggcccggggtgacaccccaccaagtgagggctcagcccctggctccaccagcccagattcacctgggggagccaaaggggaaccacctcctccagtagggcctggtgaaggtgtggggcttctgggaactggaagggaagggacctcaggccggggaggaagccgggctgggtcccagcacttgaccccagctgcactgctgtacagggctgccgtcacccgaagtcagaaacgtggcatctcatcggaagaggaggaaggagaggtagacagtgaagtagagctgacatcaagccagaggtggcctcagagcctgaacatgcgccagtcactatctaccttcagctcagagaatccatcagatggggaggaaggcacagctagtgaaccttcccccagtggcacacctgaagttggcagcaccaacactgatgagcggccagatgagcggtctgatgacatgtgctcccagggctcagaaatcccactggacccacctccttcagaggtcatccctggccctgaacccagctccctgcccattccacaccaggaacttctcagagagcggggccctcccaattctgaggactcagactgtgacagcactgaattggacaactccaacagcgttgatgccttgcggcccccagcttccctccctccatgaaagccactcgtattccttgtacatagagaaatatttatataaattatatatatatacatatatatatatatatgcgccacataatcaacagaaagatggggctgtcccagccgtaagtcaggctcgagggagactgatcccctgaccaattcacctgataaactctagggacactggcagctgtggaaatgaatgaggcacagccgtagagctgtggctaagggcaagccccttcctgccccaccccattccttatattcagcaagcaacaaggcaatagaaaagccagggttgtctttatattctttatccccaaataatagggggtggggggaggggcggtgggaggggcaggagagaaaaccacttagactgcacttttctgttccgtttactctgtttacacattttgcacttgggaggagggaggctaaggctgggtcctcccctctgaggtttctcaggtggcaatgtaactcatttttttgtcccaccatttatcttctctgcccaagccctgtcttaaggcccagggggaggttaggagactgatagcatgtgatggctcaggctgaagaaccggggtgctgtttaagtccctgcttttatcctggtgcctgattggggtggggactgtcctactgtaacccctgtgaaaaaccttgaaatataacactccatgcaggcccagctgttgagggttttcttgatgaatgaatggggtaccatacatggttaagataaagccttgggctccggactttatctgaggtgtctggagaagttctcctgcccctccacttttttgcatctactctcactaaatgagtataatgtcaagccccaactttctaaaattataggaataaatggtagcagatacatccttctaacttgttatggaggactataaatgaagttactaaaaacaatagactgaaatttttagtttaaaatatgcaagcctgaacaaggggaccaacattcccaagaaactggaacccagtcagacatatgatcaactgcttaatgtgtatgccatgtatgtcatgtgtcattcctttcccccaccccctccctagtggaagtgcttgcctactcccctaggacaggtaagtcctcggaaagtctaatcctcaatcttttgggcacaagttttataagggccaaccaagcatggagtcagggaaaaataggatcgagggccacaaaaaaagatggaagtggtaaaatagaagaaaaca

SEQ ID NO: 284037 - DNA, 3049 bp, Homo sapiens
tcccggggggccaggggcgggggccctggaaggagcgggagttcaagccgagcagggacggggctaggggtcggggggtgggggcagaaagctgaagctgacacccgtgcatccggacaccgcacgagcatcgcctgtgacagcgccccgggtccggtggagggcagcggggggaggagggaaggaggaggagaaggaggaggaggcgggagcagcatccggagcggagctgcagcagcgccgccttttgtgctgcggccgcggagcccccgagggcccagtgttcaccatcataccaggggccagaggcgatggcttgcctccatgagacccgaacaccctctccttcctttgggggctttgtgtctaccctaagtgaggcatccatgcgcaagctggacccagacacttctgactgcactcccgagaaggacctgacgcctacccagtgtgtacttcgagatgtggtaccccttggtgggcagggtgggggagggcccagcccctccccaggtggagagccgccccctgagccttttgccaacagtgtcctgcagctacatgagcaggatgcagggggcccagggggagcagctgggtcacctgagagtcgggcatccagagttcgagctgacgaggtgcgactgcagtgccagagtggcagtggcttccttgagggcctctttggctgcctgcgccctgtctggaccatgattggcaaagcctactccactgagcacaagcagcagcaggaagacctttgggaggtcccctttgaggaaatcctggacctgcagtgggtgggctcaggggcccagggtgctgtcttcctggggcgcttccacggggaggaggtggctgtgaagaaggtgcgagacctcaaagaaaccgacatcaagcacttgcgaaagctgaagcaccccaacatcatcactttcaagggtgtgtgcacccaggctccctgctactgcatcctcatggagttctgcgcccagggccagctgtatgaggtactgcgggctggccgccctgtcaccccctccttactggttgactggtccatgggcatcgctggtggcatgaactacctgcacctgcacaagattatccacagggatctcaagtcacccaacatgctaatcacctacgacgatgtggtgaagatctcagattttggcacttccaaggagctgagtgacaagagcaccaagatgtcctttgcagggacagtagcctggatggcccctgaggtgatccgcaatgaacctgtgtctgagaaggtcgacatctggtcctttggcgtggtgctatgggaactgctgactggtgagatcccctacaaagacgtagattcctcagccattatctggggtgtgggaagcaacagtctccatctgcccgtgccctccagttgcccagatggtttcaagatcctgcttcgccagtgctggaatagcaaaccacgaaatcgcccatcattccgacagatcctgctgcatctggacattgcctcagctgatgtactctccacaccccaggagacttactttaagtcccaggcagagtggcgggaagaagtaaaactgcactttgaaaagattaagtcagaagggacctgtctgcaccgcctagaagaggaactggtgatgaggaggagggaggagctcagacacgccctggacatcagggagcactatgaaaggaagctggagagagccaacaacctgtatatggaacttaatgccctcatgttgcagctggaactcaaggagagggagctgctcaggcgagagcaagctttagagcggaggtgcccaggcctgctgaagccacacccttcccggggcctcctgcatggaaacacaatggagaagcttatcaagaagaggaatgtgccacagaagctgtcaccccatagcaaaaggccagatatcctcaagacggagtctttgctccctaaactagatgcagccctgagtggggtggggcttcctgggtgtcctaagggccccccctcaccaggacggagtcgccgtggcaagacccgtcaccgcaaggccagcgccaaggggagctgtggggacctgcctgggcttcgtacagctgtgccaccccatgaacctggaggaccaggaagcccagggggcctaggagggggaccctcagcctgggaggcctgccctcccgccctccgtgggcttcatcatgacctcctgctccgcaaaatgtcttcatcgtccccagacctgctgtcagcagcactagggtcccggggccggggggccacaggcggagctggggatcctggctcaccacctccggcccggggtgacaccccaccaagtgagggctcagcccctggctccaccagcccagattcacctgggggagccaaaggggaaccacctcctccagtagggcctggtgaaggtgtggggcttctgggaactggaagggaagggacctcaggccggggaggaagccgggctgggtcccagcacttgaccccagctgcactgctgtacagggctgccgtcacccgaagtcagaaacgtggcatctcatcggaagaggaggaaggagaggtagacagtgaagtagagctgacatcaagccagaggtggcctcagagcctgaacatgcgccagtcactatctaccttcagctcagagaatccatcagatggggaggaaggcacagctagtgaaccttcccccagtggcacacctgaagttggcagcaccaacactgatgagcggccagatgagcggtctgatgacatgtgctcccagggctcagaaatcccactggacccacctccttcagaggtcatccctggccctgaacccagctccctgcccattccacaccaggaacttctcagagagcggggccctcccaattctgaggactcagactgtgacagcactgaattggacaactccaacagcgttgatgccttgcggcccccagcttccctccctccatgaaagccactcgtattccttgtacatagagaaatatttatataaattatatatatatacat

SEQ ID NO: 284038 - DNA, 304 bp, Homo sapiens
agactccgtctcaaacaaacaaacaaaaaaacctgaaaggcagagttgctgcagagttagatgaggtgtgtggaggggtgtggaccccagctgactacactctttaccagcatgctaatcacctacgacgatgtggtgaagatctcagattttggcacttccaaggagctgagtgacaagagcaccaagatgtcctttgcagggacagtagcctggatggcccctgaggtgatccgcaatgaacctgtgtctgagaaggtcgacatctggtgagaactaggctgaaaactgagaagagtgggtg

SEQ ID NO: 284039 - DNA, 466 bp, Homo sapiens
aaagctgaagcaccccaacatcatcactttcaagtgaggtccagggcaggggctgggtgttggggatactatgctaaggcctggtaccctcctgggcagtgggacctaccccatccttccccagaggagatccataggtggaatgggtgggaatgggggttccaggtatgaatcaggtgaatgctgagccagctgaggccttcataccattgtttggctcccaggggtgtgtgcacccaggctccctgctactgcatcctcatggagttctgcgcccagggccagctgtatgaggtactgcgggctggccgccctgtcaccccctccttactggttgactggtccatgggcatcgctggtggcatgaactacctgcacctgcacaagattatccacagggatctcaagtcacccaagtgagtaagcaagcagggagcaacagatgtgcatgcaggtgacccactca

SEQ ID NO: 284040 - DNA, 397 bp, Homo sapiens
gaggctgggaaatgggttgagtgggactgaagagattggctcttagagggctgagtcaatccactcctttttgctccagcacacacattggcagtggtgtgggcaacctgcagagcctttcactgggtgaagggatggctctcactcttcatctgctctcaacccataggcagagtggcgggaagaagtaaaactgcactttgaaaagattaagtcagaagggacctgtctgcaccgcctagaagaggaactggtgatgaggaggagggaggagctcaggtgagttcccgtgcttggggaggtgattttactaacagcaaggactatgcacccagtcagctcctacccagccccagggcgggtggaaggactacgaaaggactgtggacaggaattc

SEQ ID NO: 284041 - DNA, 526 bp, Homo sapiens
tgagccgagattgtgctactgcactccagcctgggcgagagtgagactctgtcttaaaaaacaaatcagtaagccactggctattaaaatgaccccagcaaagaaccccaaggaatctcactccatttctactctttctcacagggccctcccaattctgaggactcagactgtgacagcactgaattggacaactccaacagcgttgatgccttgcggcccccagcttccctccctccatgaaagccactcgtattccttgtacatagagaaatatttatataaattatatatatatacatatatatatatatatgcgccacataatcaacagaaagatggggctgtcccagccgtaagtcaggctcgagggagactgatcccctgaccaattcacctgataaactctagggacactggcagctgtggaaatgaatgaggcacagccgtagagctgtggctaagggcaagccccttcctgccccaccccattccttatattcagcaagcaacaaggcaatagaaa

SEQ ID NO: 284042 - DNA, 4135 bp, Homo sapiens
tcccggggggccaggggcgggggccctggaaggagcgggagttcaagccgagcagggacggggctaggggtcggggggtgggggcagaaagctgaagctgacacccgtgcatccggacaccgcacgagcatcgcctgtgacagcgccccgggtccggtggagggcagcggggggaggagggaaggaggaggagaaggaggaggaggcgggagcagcatccggagcggagctgcagcagcgccgccttttgtgctgcggccgcggagcccccgagggcccagtgttcaccatcataccaggggccagaggcgatggcttgcctccatgagacccgaacaccctctccttcctttgggggctttgtgtctaccctaagtgaggcatccatgcgcaagctggacccagacacttctgactgcactcccgagaaggacctgacgcctacccatgtcctgcagctacatgagcaggatgcagggggcccagggggagcagctgggtcacctgagagtcgggcatccagagttcgagctgacgaggtgcgactgcagtgccagagtggcagtggcttccttgagggcctctttggctgcctgcgccctgtctggaccatgattggcaaagcctactccactgagcacaagcagcagcaggaagacctttgggaggtcccctttgaggaaatcctggacctgcagtgggtgggctcaggggcccagggtgctgtcttcctggggcgcttccacggggaggaggtggctgtgaagaaggtgcgagacctcaaagaaaccgacatcaagcacttgcgaaagctgaagcaccccaacatcatcactttcaagggtgtgtgcacccaggctccctgctactgcatcctcatggagttctgcgcccagggccagctgtatgaggtactgcgggctggccgccctgtcaccccctccttactggttgactggtccatgggcatcgctggtggcatgaactacctgcacctgcacaagattatccacagggatctcaagtcacccaacatgctaatcacctacgacgatgtggtgaagatctcagattttggcacttccaaggagctgagtgacaagagcaccaagatgtcctttgcagggacagtagcctggatggcccctgaggtgatccgcaatgaacctgtgtctgagaaggtcgacatctggtcctttggcgtggtgctatgggaactgctgactggtgagatcccctacaaagacgtagattcctcagccattatctggggtgtgggaagcaacagtctccatctgcccgtgccctccagttgcccagatggtttcaagatcctgcttcgccagtgctggaatagcaaaccacgaaatcgcccatcattccgacagatcctgctgcatctggacattgcctcagctgatgtactctccacaccccaggagacttactttaagtcccaggcagagtggcgggaagaagtaaaactgcactttgaaaagattaagtcagaagggacctgtctgcaccgcctagaagaggaactggtgatgaggaggagggaggagctcagacacgccctggacatcagggagcactatgaaaggaagctggagagagccaacaacctgtatatggaacttaatgccctcatgttgcagctggaactcaaggagagggagctgctcaggcgagagcaagctttagagcggaggtgcccaggcctgctgaagccacacccttcccggggcctcctgcatggaaacacaatggagaagcttatcaagaagaggaatgtgccacagaagctgtcaccccatagcaaaaggccagatatcctcaagacggagtctttgctccctaaactagatgcagccctgagtggggtggggcttcctgggtgtcctaagggccccccctcaccaggacggagtcgccgtggcaagacccgtcaccgcaaggccagcgccaaggggagctgtggggacctgcctgggcttcgtacagctgtgccaccccatgaacctggaggaccaggaagcccagggggcctaggagggggaccctcagcctgggaggcctgccctcccgccctccgtgggcttcatcatgacctcctgctccgcaaaatgtcttcatcgtccccagacctgctgtcagcagcactagggtcccggggccggggggccacaggcggagctggggatcctggctcaccacctccggcccggggtgacaccccaccaagtgagggctcagcccctggctccaccagcccagattcacctgggggagccaaaggggaaccacctcctccagtagggcctggtgaaggtgtggggcttctgggaactggaagggaagggacctcaggccggggaggaagccgggctgggtcccagcacttgaccccagctgcactgctgtacagggctgccgtcacccgaagtcagaaacgtggcatctcatcggaagaggaggaaggagaggtagacagtgaagtagagctgacatcaagccagaggtggcctcagagcctgaacatgcgccagtcactatctaccttcagctcagagaatccatcagatggggaggaaggcacagctagtgaaccttcccccagtggcacacctgaagttggcagcaccaacactgatgagcggccagatgagcggtctgatgacatgtgctcccagggctcagaaatcccactggacccacctccttcagaggtcatccctggccctgaacccagctccctgcccattccacaccaggaacttctcagagagcggggccctcccaattctgaggactcagactgtgacagcactgaattggacaactccaacagcgttgatgccttgcggcccccagcttccctccctccatgaaagccactcgtattccttgtacatagagaaatatttatataaattatatatatatacatatatatatatatatgcgccacataatcaacagaaagatggggctgtcccagccgtaagtcaggctcgagggagactgatcccctgaccaattcacctgataaactctagggacactggcagctgtggaaatgaatgaggcacagccgtagagctgtggctaagggcaagccccttcctgccccaccccattccttatattcagcaagcaacaaggcaatagaaaagccagggttgtctttatattctttatccccaaataatagggggtggggggaggggcggtgggaggggcaggagagaaaaccacttagactgcacttttctgttccgtttactctgtttacacattttgcacttgggaggagggaggctaaggctgggtcctcccctctgaggtttctcaggtggcaatgtaactcatttttttgtcccaccatttatcttctctgcccaagccctgtcttaaggcccagggggaggttaggagactgatagcatgtgatggctcaggctgaagaaccggggtgctgtttaagtccctgcttttatcctggtgcctgattggggtggggactgtcctactgtaacccctgtgaaaaaccttgaaatataacactccatgcaggcccagctgttgagggttttcttgatgaatgaatggggtaccatacatggttaagataaagccttgggctccggactttatctgaggtgtctggagaagttctcctgcccctccacttttttgcatctactctcactaaatgagtataatgtcaagccccaactttctaaaattataggaataaatggtagcagatacatccttctaacttgttatggaggactataaatgaagttactaaaaacaatagactgaaatttttagtttaaaatatgcaagcctgaacaaggggaccaacattcccaagaaactggaacccagtcagacatatgatcaactgcttaatgtgtatgccatgtatgtcatgtgtcattcctttcccccaccccctccctagtggaagtgcttgcctactcccctaggacaggtaagtcctcggaaagtctaatcctcaatcttttgggcacaagttttataagggccaaccaagcatggagtcagggaaaaataggatcgagggccacaaaaaaagatggaagtggtaaaatagaagaaaaca

SEQ ID NO: 284043 - DNA, 4924 bp, Homo sapiens
tcccggggggccaggggcgggggccctggaaggagcgggagttcaagccgagcagggacggggctaggggtcggggggtgggggcagaaagctgaagctgacacccgtgcatccggacaccgcacgagcatcgcctgtgacagcgccccgggtccggtggagggcagcggggggaggagggaaggaggaggagaaggaggaggaggcgggagcagcatccggagcggagctgcagcagcgccgccttttgtgctgcggccgcggagcccccgagggcccagtgttcaccatcataccaggggccagaggcgatggcttgcctccatgagacccgaacaccctctccttcctttgggggctttgtgtctaccctaagtgaggcatccatgcgcaagctggacccagacacttctgactgcactcccgagaaggacctgacgcctacccagtgtgtacttcgagatgtggtaccccttggtgggcagggtgggggagggcccagcccctccccaggtggagagccgccccctgagccttttgccaacagtgtcctgcagctacatgagcaggatgcagggggcccagggggagcagctgggtcacctgagagtcgggcatccagagttcgagctgacgaggtgcgactgcagtgccagagtggcagtggcttccttgagggcctctttggctgcctgcgccctgtctggaccatgattggcaaagcctactccactgagcacaagcagcagcaggaagacctttgggaggtcccctttgaggaaatcctggacctgcagtgggtgggctcaggggcccagggtgctgtcttcctggggcgcttccacggggaggaggtggctgtgaagaaggtgcgagacctcaaagaaaccgacatcaagcacttgcgaaagctgaagcaccccaacatcatcactttcaagggtgtgtgcacccaggctccctgctactgcatcctcatggagttctgcgcccagggccagctgtatgaggtactgcgggctggccgccctgtcaccccctccttactggttgactggtccatgggcatcgctggtggcatgaactacctgcacctgcacaagattatccacagggatctcaagtcacccaacatgctaatcacctacgacgatgtggtgaagatctcagattttggcacttccaaggagctgagtgacaagagcaccaagatgtcctttgcagggacagtagcctggatggcccctgaggtgatccgcaatgaacctgtgtctgagaaggtcgacatctggtcctttggcgtggtgctatgggaactgctgactggtgagatcccctacaaagacgtagattcctcagccattatctggggtgtgggaagcaacagtctccatctgcccgtgccctccagttgcccagatggtttcaagatcctgcttcgccagtgctggtaaggatggtctgggctgggatactgggcctggagaagttgagaagcacggtagtactgggctggactgaccaataaatggcaggggtacatttaattcaaagagactgactttcatctgaatcaggctcatgctaccttctgagctgagtcaccaggggtaattggtatctactctgaacctgtttcctcatctataaaatacacttaacgatatctgcattcctgatttgtcatgaagtgccagtgagtgcatacaagtacaaggaaggagcagcataaccaccaagcatggttggttgagcctcaagtaaacaaccttagaacacagaaggaaaggaccccagaccctcatttggaacctagacccagggaagtttgacgattgctaatctgtcactgagcatttcccaaaatgtggttccttcaatgaagttattcagaaaaggcttttattttgggagacaagttggaaaatatggggttcaataggtttccttactgcaggattttgacacactaatgaatagtgtgtaatattctctagagacagttgaccataagttcttttgtcacagagtacattctaggattggattctccaggacacactttgggaaaggatgctccagttcctatctgatcctccctcaaattctcccctctccttcctaactccattcctttcaggaatagcaaaccacgaaatcgcccatcattccgacagatcctgctgcatctggacattgcctcagctgatgtactctccacaccccaggagacttactttaagtcccaggcagagtggcgggaagaagtaaaactgcactttgaaaagattaagtcagaagggacctgtctgcaccgcctagaagaggaactggtgatgaggaggagggaggagctcagacacgccctggacatcagggagcactatgaaaggaagctggagagagccaacaacctgtatatggaacttaatgccctcatgttgcagctggaactcaaggagagggagctgctcaggcgagagcaagctttagagcggaggtgcccaggcctgctgaagccacacccttcccggggcctcctgcatggaaacacaatggagaagcttatcaagaagaggaatgtgccacagaagctgtcaccccatagcaaaaggccagatatcctcaagacggagtctttgctccctaaactagatgcagccctgagtggggtggggcttcctgggtgtcctaagggccccccctcaccaggacggagtcgccgtggcaagacccgtcaccgcaaggccagcgccaaggggagctgtggggacctgcctgggcttcgtacagctgtgccaccccatgaacctggaggaccaggaagcccagggggcctaggagggggaccctcagcctgggaggcctgccctcccgccctccgtgggcttcatcatgacctcctgctccgcaaaatgtcttcatcgtccccagacctgctgtcagcagcactagggtcccggggccggggggccacaggcggagctggggatcctggctcaccacctccggcccggggtgacaccccaccaagtgagggctcagcccctggctccaccagcccagattcacctgggggagccaaaggggaaccacctcctccagtagggcctggtgaaggtgtggggcttctgggaactggaagggaagggacctcaggccggggaggaagccgggctgggtcccagcacttgaccccagctgcactgctgtacagggctgccgtcacccgaagtcagaaacgtggcatctcatcggaagaggaggaaggagaggtagacagtgaagtagagctgacatcaagccagaggtggcctcagagcctgaacatgcgccagtcactatctaccttcagctcagagaatccatcagatggggaggaaggcacagctagtgaaccttcccccagtggcacacctgaagttggcagcaccaacactgatgagcggccagatgagcggtctgatgacatgtgctcccagggctcagaaatcccactggacccacctccttcagaggtcatccctggccctgaacccagctccctgcccattccacaccaggaacttctcagagagcggggccctcccaattctgaggactcagactgtgacagcactgaattggacaactccaacagcgttgatgccttgcggcccccagcttccctccctccatgaaagccactcgtattccttgtacatagagaaatatttatataaattatatatatatacatatatatatatatatgcgccacataatcaacagaaagatggggctgtcccagccgtaagtcaggctcgagggagactgatcccctgaccaattcacctgataaactctagggacactggcagctgtggaaatgaatgaggcacagccgtagagctgtggctaagggcaagccccttcctgccccaccccattccttatattcagcaagcaacaaggcaatagaaaagccagggttgtctttatattctttatccccaaataatagggggtggggggaggggcggtgggaggggcaggagagaaaaccacttagactgcacttttctgttccgtttactctgtttacacattttgcacttgggaggagggaggctaaggctgggtcctcccctctgaggtttctcaggtggcaatgtaactcatttttttgtcccaccatttatcttctctgcccaagccctgtcttaaggcccagggggaggttaggagactgatagcatgtgatggctcaggctgaagaaccggggtgctgtttaagtccctgcttttatcctggtgcctgattggggtggggactgtcctactgtaacccctgtgaaaaaccttgaaatataacactccatgcaggcccagctgttgagggttttcttgatgaatgaatggggtaccatacatggttaagataaagccttgggctccggactttatctgaggtgtctggagaagttctcctgcccctccacttttttgcatctactctcactaaatgagtataatgtcaagccccaactttctaaaattataggaataaatggtagcagatacatccttctaacttgttatggaggactataaatgaagttactaaaaacaatagactgaaatttttagtttaaaatatgcaagcctgaacaaggggaccaacattcccaagaaactggaacccagtcagacatatgatcaactgcttaatgtgtatgccatgtatgtcatgtgtcattcctttcccccaccccctccctagtggaagtgcttgcctactcccctaggacaggtaagtcctcggaaagtctaatcctcaatcttttgggcacaagttttataagggccaaccaagcatggagtcagggaaaaataggatcgagggccacaaaaaaagatggaagtggtaaaatagaagaaaaca

SEQ ID NO: 284044 - DNA, 1758 bp, Homo sapiens
ttcccttctcctggattcttagtgacctctttccacttctaatcagaccccccccaccccatctctcctgcagaaacgtggcatctcatcggaagaggaggaaggagaggtagacagtgaagtagagctgacatcaagccagaggtggcctcagagcctgaacatgcgccagtcactatctaccttcagctcagagaatccatcagatggggaggaaggcacagctagtgaaccttcccccagtggcacacctgaagttggcagcaccaacactgatgagcggccagatgagcggtctgatgacatgtgctcccagggctcagaaatcccactggacccacctccttcagaggtcatccctggccctgaacccagctccctgcccattccacaccaggaacttctcagagagcggggccctcccaattctgaggactcagactgtgacagcactgaattggacaactccaacagcgttgatgccttgcggcccccagcttccctccctccatgaaagccactcgtattccttgtacatagagaaatatttatataaattatatatatatacatatatatatatatatgcgccacataatcaacagaaagatggggctgtcccagccgtaagtcaggctcgagggagactgatcccctgaccaattcacctgataaactctagggacactggcagctgtggaaatgaatgaggcacagccgtagagctgtggctaagggcaagccccttcctgccccaccccattccttatattcagcaagcaacaaggcaatagaaaagccagggttgtctttatattctttatccccaaataatagggggtggggggaggggcggtgggaggggcaggagagaaaaccacttagactgcacttttctgttccgtttactctgtttacacattttgcacttgggaggagggaggctaaggctgggtcctcccctctgaggtttctcaggtggcaatgtaactcatttttttgtcccaccatttatcttctctgcccaagccctgtcttaaggcccagggggaggttaggagactgatagcatgtgatggctcaggctgaagaaccggggtgctgtttaagtccctgcttttatcctggtgcctgattggggtggggactgtcctactgtaacccctgtgaaaaaccttgaaatataacactccatgcaggcccagctgttgagggttttcttgatgaatgaatggggtaccatacatggttaagataaagccttgggctccggactttatctgaggtgtctggagaagttctcctgcccctccacttttttgcatctactctcactaaatgagtataatgtcaagccccaactttctaaaattataggaataaatggtagcagatacatccttctaacttgttatggaggactataaatgaagttactaaaaacaatagactgaaatttttagtttaaaatatgcaagcctgaacaaggggaccaacattcccaagaaactggaacccagtcagacatatgatcaactgcttaatgtgtatgccatgtatgtcatgtgtcattcctttcccccaccccctccctagtggaagtgcttgcctactcccctaggacaggtaagtcctcggaaagtctaatcctcaatcttttgggcacaagttttataagggccaaccaagcatggagtcagggaaaaataggatcgagggccacaaaaaaagatggaagtggtaaaatagaagaaaaca

SEQ ID NO: 284045 - DNA, 2303 bp, Homo sapiens
tcccggggggccaggggcgggggccctggaaggagcgggagttcaagccgagcagggacggggctaggggtcggggggtgggggcagaaagctgaagctgacacccgtgcatccggacaccgcacgagcatcgcctgtgacagcgccccgggtccggtggagggcagcggggggaggagggaaggaggaggagaaggaggaggaggcgggagcagcatccggagcggagctgcagcagcgccgccttttgtgctgcggccgcggagcccccgagggcccagtgttcaccatcataccaggggccagaggcgatggcttgcctccatgagacccgaacaccctctccttcctttgggggctttgtgtctaccctaagtgaggcatccatgcgcaagctggacccagacacttctgactgcactcccgagaaggacctgacgcctacccagtgtgtacttcgagatgtggtaccccttggtgggcagggtgggggagggcccagcccctccccaggtggagagccgccccctgagccttttgccaacagtgtcctgcagctacatgagcaggatgcagggggcccagggggagcagctgggtcacctgagagtcgggcatccagagttcgagctgacgaggtgcgactgcagtgccagagtggcagtggcttccttgagggcctctttggctgcctgcgccctgtctggaccatgattggcaaagcctactccactgagcacaagcagcagcaggaagacctttgggaggtcccctttgaggaaatcctggacctgcagtgggtgggctcaggggcccagggtgctgtcttcctggggcgcttccacggggaggaggtggctgtgaagaaggtgcgagacctcaaagaaaccgacatcaagcacttgcgaaagctgaagcaccccaacatcatcactttcaagggtgtgtgcacccaggctccctgctactgcatcctcatggagttctgcgcccagggccagctgtatgaggtactgcgggctggccgccctgtcaccccctccttactggttgactggtccatgggcatcgctggtggcatgaactacctgcacctgcacaagattatccacagggatctcaagtcacccaacatgctaatcacctacgacgatgtggtgaagatctcagattttggcacttccaaggagctgagtgacaagagcaccaagatgtcctttgcagggacagtagcctggatggcccctgaggtgatccgcaatgaacctgtgtctgagaaggtcgacatctggtcctttggcgtggtgctatgggaactgctgactggtgagatcccctacaaagacgtagattcctcagccattatctggggtgtgggaagcaacagtctccatctgcccgtgccctccagttgcccagatggtttcaagatcctgcttcgccagtgctggtaaggatggtctgggctgggatactgggcctggagaagttgagaagcacggtagtactgggctggactgaccaataaatggcaggggtacatttaattcaaagagactgactttcatctgaatcaggctcatgctaccttctgagctgagtcaccaggggtaattggtatctactctgaacctgtttcctcatctataaaatacacttaacgatatctgcattcctgatttgtcatgaagtgccagtgagtgcatacaagtacaaggaaggagcagcataaccaccaagcatggttggttgagcctcaagtaaacaaccttagaacacagaaggaaaggaccccagaccctcatttggaacctagacccagggaagtttgacgattgctaatctgtcactgagcatttcccaaaatgtggttccttcaatgaagttattcagaaaaggcttttattttgggagacaagttggaaaatatggggttcaataggtttccttactgcaggattttgacacactaatgaatagtgtgtaatattctctagagacagttgaccataagttcttttgtcacagagtacattctaggattggattctccaggacacactttgggaaaggatgctccagttcctatctgatcctccctcaaattctcccctctccttcctaactccattcctttcaggaatagcaaaccacgaaatcgcccatcattccgacagatcctgctgcatctggacattgcctcagctgatgtactctccacaccccaggagacttactttaagtcccaggtgtgctgtgggtaggaaaataaatacctaactccccttctttgcagagatgat

SEQ ID NO: 284046 - DNA, 768 bp, Homo sapiens
ccagctcacctgggccggctctctgcccagcaacctcccagcagtcagggctcctagcagctgccccctgccctgcccactggggcccaggaaaagcagagagttgctgaaggtctcccggcagtagcggctgtcactgctacggggggtgatctaggagtgaacgccacgaggcaggtggggaaggctgctctgaacgtgtctgtgactacagctccgtgagaaagttgggacccagaagatgaaaaatgagctcagtaagggaagcagaagagccgcctttagagctggaactctccccacaccatcacagcgaacagtgatgctagagccagtcacctggtgagtcagcgcatcagagtggcccacccctcaggagggccccacccaggccgttcctggcccccaggagctctggcccagccccagcacaggggagtctgtgagtcaccatcatcatttctgcctccccaactcaagtgaccttacttggatcacctgtgtgtccccaccttgaggtgacagctgggccctggcgatgggacagcatcctgagtcctggatgccttcctcctgtcaggagacctgtttcctggtgcgttacatctgggagatgccaggcctgctttcctccctcatttcctccccagcgtgcaagaacaaatcaccagtgtcaccacacctctcaatggccctgagaacttcatggactgctttcacctgtgccattgtcaacttaagaaggcccttaatatggccgggcgcggt

SEQ ID NO: 284047 - DNA, 2059 bp, Homo sapiens
ttagagacaggcctcactgtgttgtctaggctggcctcaaatttctggactcaagctatcctcctgccttagcttcccaagtagctgggactgcaggtatgcactgccacgcctggcttttattattttagtagctactgccaaaatacatccaaatagtgatagcactttacactctcactgacgtaaatggctatttcctcaggtcatgaatagtattaaattaaatccatcttttcattttttgctaatctgatcagtaaaagatgtatatctaattttaatttccagttctataatcatttgtaatgttcaatatcctttcatataatcaggagatagaagtgctgtttagggccattattttggaattgcctgtccttacccaactgcttattttctattgggttgtttttttccttactgatctctaggggatctttgtttattaaaaacattaactctttaaccatcaaatatgttgcaaatactttattcaatatgatgtcttttagtatgtagaagtttttcttttaaaaatttaattaaatctgcccattttcttcctttatgacttcctgagttttatgaaactgcttaggaaggctttccccatcccaatgtaataaatatattatctcatgttttcttttaatgatttaataattttgctttctatagttatatatttaaaatccatttggaatgtattatgaatatggtgtgagctagagccctaactttgtcttcttccaaatagataattattccatcactattgaatagacttttcctcctgacttaatctgttctacttatatgtacctatactttgctattttaatgatatataatttgtagtacctacagtttgccatattgtgctcatagtaactttgtagtattttttactatctaatacggcaagtattcctttaactttgatccagtcaaatgtatacatcattcatcattttcccaaaaatatttacaatgttagatgtgtatcctactggatgagattctttaattaatgtttttttcatatttttgaatttaaaatcctgggaggcattgcactgtaatagtaagtctgcccatccaggatcatgcatgtcttttctttcattcaagtcttattttatatctttcagtaaattttcatatagatcttgtgaatcgaattatttttacatttcaaattcaactaacaattattaatagaaaatgaaaacattgatttttttcaatatttattttgtgtccaagtatatattaaatattttaagtagactttcttggatatttgaagtatattctgcaaataatagcatcctgtgatccagcaatcattttaggaatctatcctatagaaatagcaatgtagtagcctggtgcggtggctcacgcctgtaatcccagcactttaggaggccgaggtgggtggatcacgagatcaggagttcaagaccagtctggccaagatggtgaaaccccgtctctactaaaaatacaaaaattagctgggcgtggtggcaggcacctgtaacccagctactcgggaggctgaggcagcagaatcgctagaacctgggcagcagaggttgcagtgagccgagatcacaccactgcactccagcctgggcaatagagtaagactccatctcaaaaaaaaaaaaaaaagaaagaaagaaataacaacgtagacataagaatatgtgtgtgtataaaatattcatttcagcattgttccaaatataaaaaatattaaaataatatgggagccatataataaattatgacatacacatatgcagttattaaatagcgggcaatagagctacatggactggtgtaggaaagtggccatgtatatagttacatgaaaaaaagcaatttaaaaatatgtatagcaagtcccttttctataggtatatttatatatatacatacacacaaaatggcatttaatgcttatttaatttaaatattttatttgtgtgtgtttgttttaaatgtctgtataaacataagaaaaagtcatgaaataaacacaccc

SEQ ID NO: 284048 - DNA, 722 bp, Homo sapiens
ttagagacaggcctcactgtgttgtctaggctggcctcaaatttctggactcaagctatcctcctgccttagcttcccaagtagctgggactgcaggccctgaagaactgaactctccattcaccagcacaggatcaggacagtggcccactgaagaagaaaataagcaataagctgaaagggcaaagctgaagcccaacacagcaaaggccagacctcctcagtcttcagtgagaaaacagcaaattagagttaatactgcacatttttaattgagtgaagtacatggtactaccatatcaatgcagaatgaaaaaaagaggagattgacctaagtacagcccaaaagagctttgtcatgcacaagaacaacatgaattggcaactgaaagtaattaatcacgtaactgaaagttaccaatcgtatgtttattgtactgttatattaagcatggctcaaaatagtgagactatgtttgaagcaagtatttccttccctttcaaccagccaaatatacacttacttagcattttttattttgttgtgctttttcccatggcatggaaaaaaacaggagagaatgcacagggatatatgagtttggttatatgaatgaaggataataatatcggtgtgctctactctaggtatacaagagaactaatgcaactattctttaaaaaataatagtaataaataggatatggattaattattcccc

SEQ ID NO: 284049 - DNA, 629 bp, Homo sapiens
gggtagtagaacaatgggattatgctgtcacaaaaaccaaagaaaaaacaacacaggctccaaacataatttcttaaatcatggtctgccactgaatctggctataaaaccttatcttgcactaaaaggatctgtagctttcccagctgagaatggagttcagaatactgaatcaacacaagaaaagagagaaattggggatgaagaaaactcagctaaatttcctataggaaggagagattttgacatattctcagaccacttctaccaaaacataaatctgtgattgtgatctctgaaagtcagtccttttatctactcaataactgatctgataatgtcaacttttgaaaacagatagttatgactcaaggctttgagaatgtaaagagaccaccttcacttgttgagaaatggtacgatttcacgttatcagtgcagttccgttctcgggggaaagcccatccgtactaccaggagactggatccgcaaagtagacacttggtctcatgaagccactgctgggctccagagagaagggaaaactaagaggttttaaaacccctaccctccttggtttacctccatcattaaaaaacaacaatgacaacgacaacaaaaaacaaaa

SEQ ID NO: 284050 - DNA, 513 bp, Homo sapiens
ctagatccattctttttttcttaataaattttgtgtgataattatagtcctttaaacaatttaaactttcttcttccttcagtgctcagatgtatgctgggaagagtctaccgaccttgttggcaagtctgatacctgttggtccacatcatcttttcagaagaaaataaaagcatttaattgccaatgggaggagaagcccatactgctactataacttgtgtatgttaaatgtctgttttaaaagaaagtagtgttaagatgtatcagtaactgaaatgatatgctttctctgtgcattaaactttgtgaaaattctgcataattatgacttactagtatttttaaacaatgcttaacatactaaccttacatacactgtagaccaaaataataaatcatcataatttacaccttgatctcttaaaaattaagcatgtctttggtgaatggtttataaacccatttctcccatctgctttcaggacacaaatcagtactcaaaaaactcct

SEQ ID NO: 284051 - DNA, 960 bp, Homo sapiens
tcccccgggctgcaggattcggcacgagagaaatttttcattttctttcttgtttgactgtatgcaaacatcaaactaagaatggcaaaaatgaatctctcttcctatatattaatactaactttttctttgttttctcaaggtattttactttcagcatccaagtccataagaaatttagatgatgacatggtatttaatacattcaggttggggaaaggctttcagaaggaagacactgcagaaaaatcagttattgctccttccctggaacaatataaaaatgatgagagcagtttcatgaacgaagaggaaaataaagtttcaaagaacacaggctccaaacataatttcttaaatcatggtctgccactgaatctggctataaaaccttatcttgcactaaaaggatctgtagctttcccagctgagaatggagttcagaatactgaatcaacacaagaaaagagagaaattggggatgaagaaaactcagctaaatttcctataggaaggagagattttgacatgctcagatgtatgctgggaagagtctaccgaccttgttggcaagtctgatacctgttggtccacatcatcttttcagaagaaaataaaagcatttaattgccaatgggaggagaagcccatactgctactataacttgtgtatgttaaatgtctgttttaaaagaaagtagtgttaagatgtatcagtaactgaaatgatatgctttctctgtgcattaaactttgtgaaaattctgcataattatgacttactagtatttttaaacaatgcttaacatactaaccttacatacactgtagaccaaaataataaatcatcataatttacaccttgatctcttaaaaattaagcatgtctttggtgaatggtttataaacccatttctcccatctgctttcaggacacaaatcagtactcaaaaaactcct

SEQ ID NO: 284052 - DNA, 649 bp, Homo sapiens
  misc_feature (1)..(1): n is a, c, g, or t
  misc_feature (6)..(6): n is a, c, g, or t
  misc_feature (10)..(10): n is a, c, g, or t
  misc_feature (13)..(14): n is a, c, g, or t
  misc_feature (17)..(19): n is a, c, g, or t
ntcttnacanaanncannnaacacaggctccaaacataatttcttaaatcatggtctgccactgaatctggctataaaaccttatcttgcactaaaaggatctgtagctttcccagctgagaatggagttcagaatactgaatcaacacaagaaaagagagaaattggggatgaagaaaactcagctaaatttcctataggaaggagagattttgacatgctcagatgtatgctgggaagagtctaccgaccttgttggcaagtctgatacctgttggtccacatcatcttttcagaagaaaataaaagcatttaattgccaatgggaggagaagcccatactgctactataacttgtgtatgttaaatgtctgttttaaaagaaagtagtgttaagatgtatcagtaactgaaatgatatgctttctctgtgcattaaactttgtgaaaattctgcataattatgacttactagtatttttaaacaatgcttaacatactaaccttacatacactgtagaccaaaataataaatcatcataatttacaccttgatctcttaaaaattaagcatgtctttggtgaatggtttataaacccatttctcccatctgctttcaggacacaaatcagtactcaaaaaactcct

SEQ ID NO: 284053 - DNA, 879 bp, Homo sapiens
acacccagatcataaacatatattttctttatgtataccgacaagagaggaaaagtctagggtattttactttcagcatccaagtccataagaaatttagatgatgacatggtatttaatacattcaggttggggaaaggctttcagaaggaagacactgcagaaaaatcagttattgctccttccctggaacaatataaaaatgatgagagcagtttcatgaacgaagaggaaaataaagtttcaaagaacacaggctccaaacataatttcttaaatcatggtctgccactgaatctggctataaaaccttatcttgcactaaaaggatctgtagctttcccagctgagaatggagttcagaatactgaatcaacacaagaaaagagagaaattggggatgaagaaaactcagctaaatttcctataggaaggagagattttgacatgctcagatgtatgctgggaagagtctaccgaccttgttggcaagtctgatacctgttggtccacatcatcttttcagaagaaaataaaagcatttaattgccaatgggaggagaagcccatactgctactataacttgtgtatgttaaatgtctgttttaaaagaaagtagtgttaagatgtatcagtaactgaaatgatatgctttctctgtgcattaaactttgtgaaaattctgcataattatgacttactagtatttttaaacaatgcttaacatactaaccttacatacactgtagaccaaaataataaatcatcataatttacaccttgatctcttaaaaattaagcatgtctttggtgaatggtttataaacccatttctcccatctgctttcaggacacaaatcagtactcaaaaaactcct

SEQ ID NO: 284054 - DNA, 591 bp, Homo sapiens
gggtagtagaacaatgggattatgctgtcacaaaaaccaaagaaaaaacaacacaggctccaaacataatttcttaaatcatggtctgccactgaatctggctataaaaccttatcttgcactaaaaggatctgtagctttcccagctgagaatggagttcagaatactgaatcaacacaagaaaagagagaaattggggatgaagaaaactcagctaaatttcctataggaaggagagattttgacatattctcagaccacttctaccaaaacataaatctgtgattgtgatctctgaaagtcagtccttttatctactcaattatgactcaaggctttgagaatgtaaagagaccaccttcacttgttgagaaatggtacgatttcacgttatcagtgcagttccgttctcgggggaaagcccatccgtactaccaggagactggatccgcaaagtagacacttggtctcatgaagccactgctgggctccagagagaagggaaaactaagaggttttaaaacccctaccctccttggtttacctccatcattaaaaaacaacaatgacaacgacaacaaaaaacaaaa

SEQ ID NO: 284055 - DNA, 669 bp, Homo sapiens
gggtagtagaacaatgggattatgctgtcacaaaaaccaaagaaaaaacaacacaggctccaaacataatttcttaaatcatggtctgccactgaatctggctataaaaccttatcttgcactaaaaggatctgtagctttcccagctgagaatggagttcagaatactgaatcaacacaagaaaagagagaaattggggatgaagaaaactcagctaaatttcctataggaaggagagattttgacatattctcagaccacttctaccaaaacataaatctgtgattgtgatctctgaaagtcagtccttttatctactcaagtagaaatatgggtatatagaaaggaagaaagcaaggctaacggtgagcagtggctaaatgaacaagagaacattcagttatgactcaaggctttgagaatgtaaagagaccaccttcacttgttgagaaatggtacgatttcacgttatcagtgcagttccgttctcgggggaaagcccatccgtactaccaggagactggatccgcaaagtagacacttggtctcatgaagccactgctgggctccagagagaagggaaaactaagaggttttaaaacccctaccctccttggtttacctccatcattaaaaaacaacaatgacaacgacaacaaaaaacaaaa

SEQ ID NO: 284056 - DNA, 444 bp, Homo sapiens
tcaggcctggcgtccagaacttaagagttggctccgggcggcaacggggatgcagaagcgagcgagcctgcgagagcaccgaggctagcctccgaggcgaaccccagaaacgccaggacgggtaacttgcccctttgcgcttccccgctcagcgcactcagtttgcggctgggaatgaccctcgccgcccgccgttcttcttccggaagtcgttggccgttaccatagtgactgcaggcgtccggagcgctgagcagagtcccagctgctagggaggctgaggcaggattgcttgagcctgggaagcggaggttggaggaagccgtgattgtaccactgcattccagccagggcaacagagcaagactccatctcaaaaataattgtccatttcatccaagttgtataatttgttggcataaaattgttcaaaggatcctcata

SEQ ID NO: 284057 - DNA, 585 bp, Homo sapiens
tcaggcctggcgtccagaacttaagagttggctccgggcggcaacggggatgcagaagcgagcgagcctgcgagagcaccgaggctagcctccgaggcgaaccccagaaacgccaggacgggtaacttgcccctttgcgcttccccgctcagcgcactcagtttgcggctgggaatgaccctcgccgcccgccgttcttcttccggaagtcgttggccgttaccatagtgactgcaggcgtccggagcgctgagcagaggtgcagtggctcatgcctgcaatcccagcactttgggaggccgaggcaggaggatcacaaggtcaggagttccatacaagactagcctgcccaacatggtgaaaccccgtctctactgaaaatacaaaaacagcctggcgtggttgtgtgcacctgtaatcccagctactcaggaggcagaggcaggagaactgcttgaacccgggaggcaaaggttgcagtgaacagagatcgggccactgttatccagcctgggtgacagagtgagactccatctcaaaaaataaataaataaaataagtatttccttttaatgctaacatgaa

SEQ ID NO: 284058 - DNA, 889 bp, Homo sapiens
aaataaaagaggtttaattggctcacggttctgcaggttgtacaggaagcatgatgctgtcacctgctcggaggcctcaggaaacttacaattatggcagaaggcaaaggggaagcaggacatcttacatggctggggcgggagggagacagttggtggaggaaggtgccacacacttttaaataaccagagctcatgagaactcactcactattgtgaccacagcaccaaggggggatggtgttaaaccatgacaaaccacctctgtgatccagtcacctcccgccaggccccacctccaacactggggattacaattcaacatgagatttgggcggggacacacagccaacccgtatcagaacaattcctaataaatctctttcccataccccttgcatcagggtctgcacctggagactcccacctaagatgggggtttagatgagaccactctgggaggacacgcagccgagtgtggaggccccgaggaagatcagctctgaagacacaggcaggcaaagggcagacctcgaaggagatggaggaggaatgacagagggcaagaagaatcaggtttactgtctgccaggctgccaaaccccaaccctcgccacatccgcagccaccacgtaaagtgactgttagaacttcaaacgaaggatctgacccccggaaatggcctcatgctagttttttcctaaacagtcaccaggaaaatgacggaaggcaaatcgaaacgcatgccctgaaagacttagaacataaccatcacatctgggggacaagaagcccaccccaacttaatttaaaaaggaaacacagcagatgtcatcagttggcagggaggtgtcttgaaggaaagaaggaggggaatgagagggctgtg

SEQ ID NO: 284059 - DNA, 480 bp, Homo sapiens
cacagaggaaaggcccagtggaggacacaggaagaaggcagccatctgcaaaccaggaacagagacctgaccagaaacagaatctgctggcacctgatctgggacttgcagcctctaaaatgcctgtttcagaagaattccacaaaatgagtaaaattacagaatattttgaatatataaagatatacaaaatatcttacagtgaacatacagaacagaaaaatacaaccagactctaccagaaaatccactactcttttgaagtcagccacacagtattctcttttcatttccatgagtacgctgtcggaggcagactggactggtatgtgcagaaaagcgtagactctggggtgattaaggatttttgccatttccttaaaaaaatggaaggagaaaacactaatcattttaacaaattgtggaatggttttcctcacatcaacaccacaagcgcaagcaaataaacatactagctga

SEQ ID NO: 284060 - DNA, 431 bp, Homo sapiens
agttttttaaaacaataacatcatttattttgctcagaaatctgcagactggacagggctcagcagggataggttgtctgtgctcactcagcataagctgggacagcttgcaggctgaggcctgaagtcatgtgaaggctctctctcacgcatctggtggttgatgctggctgatggctgagattcaagctggcgtgcctgccagagcactcacagatgcttctccatgtcacctgggcttccttccaacatggtggctggtgttccataggtaagtggctcaaaatagaaagagccaggtggaagctgtgttgccttttaggatttgtcttggaagtcacatgatatctttcttgccatagtctaaccattgaggcagtcttaaggggaagggaaatagactccacctttaaactgagagagtgaccggc

SEQ ID NO: 284061 - DNA, 554 bp, Homo sapiens
agttttttaaaacaataacatcatttattttgctcagaaatctgcagactggacagggctcagcagggataggttgtctgtgctcactcagcataagctgggacagcttgcaggctgaggcctgaagtcatgtgaaggctctctctcacgcatctggtggttgatgctggctgatggctgagattcaagctggcgtgcctgccagagcactcacagatgcttctccatgtcacctgggcttccttccaacatggtggctggtgttccataggtgatcactgcggagtgccagagccccaccaaagcaatcagtactaaggggtctctcctttcctatggacaggaggggagggctttgagtctctagcagtcccctgacatataatagatgcatcctgatacctccacagttattccgaaagtgtggggtttggagatagcccaaattgggttcaaatccccttctgctgctgtgtgcctttgggaaagctacttgactaccctgagcctatttccttagcctataaaatgtggaagatacagaactgttgtga

SEQ ID NO: 284062 - DNA, 990 bp, Homo sapiens
agaggagacacgccggggcccagcgccggccggcctgaccccctcagtctgtctctatgggcgcgcgccgacagcctcgcgcaccggccccggggccccggctgagggtgcgcgcgcagcaccccgggaaggtgggggggaggcggtggcggaaagatgcgcgcgcagtcagccgtcatgggagggggaactgtggggcgttcgccatcttgtctccctctccttacctgcgtcctcgggggcgtgcgcaccaccccccctcccgcctaggaggggggagggccccctcttggccaccgccttcgcggcctttaaactcccctggagactgcggctactgccaccgccttgcctccactgcctcttcgcgcagcacacagatgcggacggtgggtgggaaaaagggcagacgctactcccagcgaaccgccgctgccgctcccgaggcctcaccaaaatggccgccgccgtctcggccgccaccaccaccactaccaccaccactcgctcggaatcgctatcgccggcgcggcccgtcttctcgcgagagacagtaactggagggtgggggaacggggaggctcgcgtgctagcgtagggtgcagcacggtgcgcaaggcagcctgggaggtgtagtctcccagaggctgcgcgctcgcccttcctcggagcgcctttaccgtttgcccctagatctacctggggctgcattgcggctgccagctcggaccaccgccacctccctttttatttacagatcacccagtaagctgcagcaagttagcagtggaacctgggcctcccgattcccatggcagcccacttctgtagcgctgcttcgttttacgcgaggatggtttcctgatagctttcaaacacctttgccatctcttcgcaaactttctagattaagaatccctttgagaatctgatacctttaccccagaatagaacaataaataacagctaccttctactgacactacttgg

SEQ ID NO: 284063 - DNA, 314 bp, Homo sapiens
gctcgtcatccaagcccgtcagggagcccccccatcacccgaccgcgaaaggctgagagaagggagggttcgtgccaccagatcacccagtaagctgcagcaagttagcagtggaacctgggcctcccgattcccatggcagcccacttctgtagcgctgcttcgttttacgcgaggatggtttcctgatagctttcaaacacctttgccatctcttcgcaaactttctagattaagaatccctttgagaatctgatacctttaccccagaatagaacaataaataacagctaccttctactgacactacttgg

SEQ ID NO: 284064 - DNA, 201 bp, Homo sapiens
gctcgtcatccaagcccgtcagggagcccccccatcacccgaccgcgaaaggctgagagaagggagggttcgtgccaccaggtcctggtcccccggctagatgtggtgggcgcgcgccccgactactcgtcccacgccccccttcctcttcccgcgcgcccctgaggggtgactgggttggtgggcgggcaggagcgcacc

SEQ ID NO: 284065 - DNA, 786 bp, Homo sapiens
agaggagacacgccggggcccagcgccggccggcctgaccccctcagtctgtctctatgggcgcgcgccgacagcctcgcgcaccggccccggggccccggctgagggtgcgcgcgcagcaccccgggaaggtgggggggaggcggtggcggaaagatgcgcgcgcagtcagccgtcatgggagggggaactgtggggcgttcgccatcttgtctccctctccttacctgcgtcctcgggggcgtgcgcaccaccccccctcccgcctaggaggggggagggccccctcttggccaccgccttcgcggcctttaaactcccctggagactgcggctactgccaccgccttgcctccactgcctcttcgcgcagcacacagatgcggacggtgggtgggaaaaagggcagacgctactcccagcgaaccgccgctgccgctcccgaggcctcaccaaaatggccgccgccgtctcggccgccaccaccaccactaccaccaccactcgctcggaatcgctatcgccggcgcggcccgtcttctcgcgagagacaatcacccagtaagctgcagcaagttagcagtggaacctgggcctcccgattcccatggcagcccacttctgtagcgctgcttcgttttacgcgaggatggtttcctgatagctttcaaacacctttgccatctcttcgcaaactttctagattaagaatccctttgagaatctgatacctttaccccagaatagaacaataaataacagctaccttctactgacactacttgg

SEQ ID NO: 284066 - DNA, 851 bp, Homo sapiens
ttcatttttaaatataaattaaactttattaattgatataaatttatattaaactttaaatttttataacctattcttacaacgtgctcatatcaatcaatgcctctatacatggatatggttaagaaacttacattttatattgattttttaaaggttaaagaaagagggaccaattaacttcaccttttcctaaacttgaaaagacaaaccaaattctgcccttcatctccaatgtttgaaagatcagaggttcctgtcaagtaagtcatcctttcttcataactattgaaaaagaaataatcagaaatcgctgaataggtcaattaaaaccatttttatcaaatatattcattcacaacatgtattgttgtagttaaaaactggttgagaaagtttacttgtaattattccgcactttgatatctgtcgattatttctggagcaaaggcaggcttattcattaggtgcctttagctaatttttcctgctattcttgctggatactttagaaatgagaaggggtgagctgtaagataaatgagtgtcactaagggaaatataagcctgcctttctcaagggctgagctccgggaggcgggaagagttcagagcattgggccagggctcatctggtgggttcaagcacacagcctcaactcccttgcaggaacatgggtccgtgtgtggttcactctgaagcatctgtcttcctgtgaaagagcttgcggctggtgagtggatactgagcccaacttctgcaggctgccctcccctctggataccaagcccacccatggcaatcccttcaaggcgtgactctcatgataattaaatgtgtgataatgtga

SEQ ID NO: 284067 - DNA, 340 bp, Homo sapiens
aaattgccgagaagcacttctgccaaaggctaaaggatggtaaaagaaaaaggttaaagaaagagggaccaattaacttcaccttttcctaaacttgaaaagacaaaccaaattctgcccttcatctccaatgtttgaaagatcagaggttcctgtcaagaacatgggtccgtgtgtggttcactctgaagcatctgtcttcctgtgaaagagcttgcggctggtgagtggatactgagcccaacttctgcaggctgccctcccctctggataccaagcccacccatggcaatcccttcaaggcgtgactctcatgataattaaatgtgtgataatgtga

SEQ ID NO: 284068 - DNA, 477 bp, Homo sapiens
tagtagagatggagtttctctaccccatctctgaccatgttggtcaggctggtctcgaactcctgacctcaggtgatccacctgtctcggcctcccaaagtgttgggattacaggtgtgagccaccacgtccattctattccaagaacttttataagattttgtctttgtattcttcagagtttaacaactcctttgtggatgcattgggttctgatgaggactctggaaatgaggatgtttttgatatggagtacacagaagctgaagctgaggaactgaaaagaaatgctgaggtaattgttttcattcctgagtacagttggtcaaattcagtgtcactcttcccactctttacttcaaaggccccactttcagtgtccactgcaggttcattttggccctttcagtagccattagatggtctcattttctcttgtcatttgctgttcatttttcacatacaagatttaaaaaa

SEQ ID NO: 284069 - DNA, 289 bp, Homo sapiens
cgccatcagccgctctccctgactaggggtagctagcggcctccctcctttgggttctgtatccctacttccattaccctcggctcctcccactcctcgggggctccgtgctttccgcgggtctgtccgggggctccggaccctcggcgcagctgagttgatggcttccggagaactggcatagctgcagaatatgagtagtctcccaaagtgctaggattacaggcatgagccaccacgcccagccccagctgatctttctaaccaacaccacaaaggtgccaaggga

SEQ ID NO: 284070 - DNA, 5811 bp, Homo sapiens
cgccatcagccgctctccctgactaggggtagctagcggcctccctcctttgggttctgtatccctacttccattaccctcggctcctcccactcctcgggggctccgtgctttccgcgggtctgtccgggggctccggaccctcggcgcagctgagttgatggcttccggagaactggcatagctgcagaatatgagtagtgtcccaagaagagtgctttgcctttggcacaaggatcagaataaagttatttgccatacagtaaccagagacctccaactaggggcccccaaactgtatcctgcctgtagaacctgccaggtaaaggtatatttttgctttttaatttagccagaagcaatttttaaagaaaatatgtctcctctgaagatacatggtcctatcagaattcgaagtatgcagactgggattacaaagtggaaagaaggatcctttgaaattgtagaaaaagagaataaagtcagcctagtagttcactacaatactggaggaattccaaggatatttcagctaagtcataacattaaaaatgtggtgcttcgacccagtggagcgaaacaaagccgcctaatgttaactctgcaagataacagcttcttgtctattgacaaagtaccaagtaaggatgcagaggaaatgaggttgtttctagatgcagtccatcaaaacagacttcctgcagccatgaaaccgtctcaggggtctggtagttttggagccattctgggcagcaggacctcacagaaggaaaccagcaggcagctttcttactcagacaatcaggcttctgcaaaaagaggaagtttggaaactaaagatgatattccatttcgaaaagttcttggtaatccgggtagaggatcgattaagactgtagcaggaagtggaatagctcggacgattccttctttgacatctacttcaacacctcttagatcagggttgctagaaaatcgtactgaaaagaggaaaagaatgatatcaactggctcagaattgaatgaagattaccctaaggaaaatgattcatcatcgaacaacaaggccatgacagatccctccagaaagtatttaaccagcagtagagaaaagcagctgagtttgaaacagtcagaagagaataggacatcagggcttttacctttacagtcatcatccttttatggtagcagagctggatccaaggaacactcttctggtggcactaacttagacaggactaatgtttcaagccagactccctctgccaaaagaagtttgggatttcttcctcagccagttcctctttctgttaaaaaactgaggtgtaaccaggattacactggctggaataaaccaagagtgcccctttcctctcaccaacagcagcaactgcagggcttctccaatttgggaaatacctgctatatgaatgctattctacaatctctattttcactccagtcatttgcaaatgacttgcttaaacaaggtatcccatggaagaaaattccactcaatgcacttatcagacgctttgcacacttgcttgttaaaaaagatatctgtaattcagagaccaaaaaggatttactcaagaaggttaaaaatgccatttcagctacagcagagagattctctggttatatgcagaatgatgctcatgaatttttaagtcagtgtttggaccagctgaaagaagatatggaaaaattaaataaaacttggaagactgaacctgtttctggagaagaaaattcaccagatatttcagctaccagagcatacacttgccctgttattactaatttggagtttgaggttcagcactccatcatttgtaaagcatgtggagagattatccccaaaagagaacagtttaatgacctctctattgaccttcctcgtaggaaaaaaccactccctcctcgttcaattcaagattctcttgatcttttctttagggccgaagaactggagtattcttgtgagaagtgtggtgggaagtgtgctcttgtcaggcacaaatttaacaggcttcctagggtcctcattctccatttgaaacgatatagcttcaatgtggctctctcgcttaacaataagattgggcagcaagtcatcattccaagatacctgaccctgtcatctcattgcactgaaaatacaaaaccaccttttacccttggttggagtgcacatatggcaatttctagaccattgaaagcctctcaaatggtgaattcctgcatcaccagcccttctacaccttcaaagaaattcaccttcaaatccaagagctccttggctttatgccttgattcagacagtgaggatgagctaaaacgttctgtggccctcagccagagactttgtgaaatgttaggcaacgaacagcagcaggaagacctggaaaaagattcaaaattatgcccaatagagcctgacaagtctgaattggaaaactcaggatttgacagaatgagcgaagaagagcttctagcagctgtcttggagataagtaagagagatgcttcaccatctctgagtcatgaagatgatgataagccaactagcagcccagataccggatttgcagaagatgatattcaagaaatgccagaaaatccagacactatggaaactgagaagcccaaaacaatcacagagctggatcctgccagttttactgagataactaaagactgtgatgagaataaagaaaacaaaactccagaaggatctcagggagaagttgattggctccagcagtatgatatggagcgtgaaagggaagagcaagagcttcagcaggcactggctcagagccttcaagagcaagaggcttgggaacagaaagaagatgatgacctcaaaagagctaccgagttaagtcttcaagagtttaacaactcctttgtggatgcattgggttctgatgaggactctggaaatgaggatgtttttgatatggagtacacagaagctgaagctgaggaactgaaaagaaatgctgagacaggaaatctgcctcattcgtaccggctcatcagtgttgtcagtcacattggtagcacttcttcttcaggtcattacattagtgatgtatatgacattaagaagcaagcgtggtttacttacaatgacctggaggtatcaaaaatccaagaggctgccgtgcagagtgatcgagatcggagtggctacatcttcttttatatgcacaaggagatctttgatgagctgctggaaacagaaaagaactctcagtcacttagcacggaagtggggaagactacccgtcaggcctcgtgaggaacaaactcctgggttggcagcatgcactgcatatttgttactgctgcccacctcacctttcctctgctgaaggagaatttggaattctacttgatgcgggagcaacaaacagctcagggccaaaccaaaagacaaaaattggagtaacgtagaatgctccatgctattttatggaaactttggtctcacatccgtagctgattatcctctttttctcctatgagtggcacttcttttgtcttaggaatacatgttgtaaatatatatctgtgtatgtgtgtatacacacacacagacacacacacacacacacgggatgaatggagccttaaagagttaggatgagccaccagaatatgcctgctcaaaattaatagcacagcagtttggagaagaaatgaaggtgtcaaagagtccattcacctgagaaatgtgtgaagacatacttatcagttggcttttagcttttatgttccttgagtagtttcactcaagtctgtaaccttttgtgtttccttattagtaaaattcactggaaagccagctcttcatgttacactaatgacagtttgttctctttgcaagagaggggcattactgtcacctgacttgaggagctgttttgttgttgttgttgtctgcaaatttcatgaatttgtgatgtctttgctgtttacatgcagtcccaagaaatggattgttggtgctttggaatatgttacagtcccacatttgatatttcttatatactttgttttctctaaggagatttcttcacacagtatgttcatcatatatcatcatcattattatggtggtaaagatagaatcttttttcttttttgtcattctgccatggagcagcattaccctaatggattgcaaccaaaactttaaacaagtagaaagataatatttctccaattgggactccccagcaggaatacttagggataaggaagaatgctagcatctctgtctctcaaacatagggaggataagaagagtgttcttctggtaaagctaaaattctggaccactgaagctaaaagccctattgcaagtatgaaattaagtacttgagctataggacaaaccttgggcatttaaccatttactgtctggctttgcccttaaaatagggttgcaattaaaatgtgattggcttaggtaatcccaaaaactaacaaataacaaaggtgcataatttatttatctactttttaggtgctctgagttgaggcaaagtagagcggcaacattaagtgctatgctagtcacttagctgacgtaaccagcttggttaagcagcttatgaaaccatataaagaattcttttgaggatggaattctgtccacaaaataattttgtgagcccagatatcattaggatcacacagagttaaatatagaaaaatgaaaccatcattatattctttcgtgttttttcttttattataaacaaggggattattctttagttctcagaggtagggacaaaaccacatcaggttttcagaaggaaaaaacatttaaaaacccaccatcacatgagagaatcacttgaacccaggaggcagaggttgcagtgagctgagatcgcatcattgcactgcagtctgagtgacagagtgagactccatctcattaaaaaaaacgaaaacaaaaacaaaaaaaacacaaaccatcatcacagaagatgcaacatcttttctgaaagattgccttaagagagctccagtcctactcttggaacttggatgtattctaatgtagtaaactattctaagttttcattctttgaattataaatggcctcagcagttttgctcaactactgataaatgctttgcctcctaccatctacctatataccttattgtaatgaatgttccaaaatggtagagtggtagaaaacgccagagtagtttagagcagaggaaaatatttgttttaaaactagctttaaagttttgtttcatttctaccaggagcctctttggtttggtttgattttgcttggaaataattggttttcttataaatgagtgaagcggtgataaaattctttggctagttattaattcttttacgtgtctttgcatttgagaggcactgttaaaaattattgggaaagatttaaagtgcaggctgcaattaaaacatggagaaaagtagaaataatgccataagtctagattgcctcatgaagcagcctcatttgaattgctttcatagctttcatgtgtgtatggtttagaagtacacttacctcagaaacctgatttgatcttcatgtcttgggcaggagttgttgaaaataggttattggaatatataagttatctcactgctcatgtacttgcatgtttgggactcaaattttacttgatgtctgtccattcttgtggccctatcagccttctccttcctttactcctttaatctacttctttgactaccagtggagatttcagctggactatgttgat

SEQ ID NO: 284071 - DNA, 3315 bp, Homo sapiens
cgccatcagccgctctccctgactaggggtagctagcggcctccctcctttgggttctgtatccctacttccattaccctcggctcctcccactcctcgggggctccgtgctttccgcgggtctgtccgggggctccggaccctcggcgcagctgagttgatggcttccggagaactggcatagctgcagaatatgagtagtgtcccaagaagagtgctttgcctttggcacaaggatcagaataaaggtgaattgctattacatagggtttttcggtaaaagtcactgaaaattatttgccatacagtaaccagagacctccaactaggggcccccaaactgtatcctgcctgtagccagaagcaatttttaaagaaaatatgtctcctctgaagatacatggtcctatcagaattcgaagtatgcagactgggattacaaagtggaaagaaggatcctttgaaattgtagaaaaagagaataaagtcagcctagtagttcactacaatactggaggaattccaaggatatttcagctaagtcataacattaaaaatgtggtgcttcgacccagtggagcgaaacaaagccgcctaatgttaactctgcaagataacagcttcttgtctattgacaaagtaccaagtaaggatgcagaggaaatgaggttgtttctagatgcagtccatcaaaacagacttcctgcagccatgaaaccgtctcaggggtctggtagttttggagccattctgggcagcaggacctcacagaaggaaaccagcaggcagctttcttactcagacaatcaggcttctgcaaaaagaggaagtttggaaactaaagatgatattccatttcgaaaagttcttggtaatccgggtagaggatcgattaagactgtagcaggaagtggaatagctcggacgattccttctttgacatctacttcaacacctcttagatcagggttgctagaaaatcgtactgaaaagaggaaaagaatgatatcaactggctcagaattgaatgaagattaccctaaggaaaatgattcatcatcgaacaacaaggccatgacagatccctccagaaagtatttaaccagcagtagagaaaagcagctgagtttgaaacagtcagaagagaataggacatcagggcttttacctttacagtcatcatccttttatggtagcagagctggatccaaggaacactcttctggtggcactaacttagacaggactaatgtttcaagccagactccctctgccaaaagaagtttgggatttcttcctcagccagttcctctttctgttaaaaaactgaggtgtaaccaggattacactggctggaataaaccaagagtgcccctttcctctcaccaacagcagcaactgcagggcttctccaatttgggaaatacctgctatatgaatgctattctacaatctctattttcactccagtcatttgcaaatgacttgcttaaacaaggtatcccatggaagaaaattccactcaatgcacttatcagacgctttgcacacttgcttgttaaaaaagatatctgtaattcagagaccaaaaaggatttactcaagaaggttaaaaatgccatttcagctacagcagagagattctctggttatatgcagaatgatgctcatgaatttttaagtcagtgtttggaccagctgaaagaagatatggaaaaattaaataaaacttggaagactgaacctgtttctggagaagaaaattcaccagatatttcagctaccagagcatacacttgccctgttattactaatttggagtttgaggttcagcactccatcatttgtaaagcatgtggagagattatccccaaaagagaacagtttaatgacctctctattgaccttcctcgtaggaaaaaaccactccctcctcgttcaattcaagattctcttgatcttttctttagggccgaagaactggagtattcttgtgagaagtgtggtgggaagtgtgctcttgtcaggcacaaatttaacaggcttcctagggtcctcattctccatttgaaacgatatagcttcaatgtggctctctcgcttaacaataagattgggcagcaagtcatcattccaagatacctgaccctgtcatctcattgcactgaaaatacaaaaccaccttttacccttggttggagtgcacatatggcaatttctagaccattgaaagcctctcaaatggtgaattcctgcatcaccagcccttctacaccttcaaagaaattcaccttcaaatccaagagctccttggctttatgccttgattcagacagtgaggatgagctaaaacgttctgtggccctcagccagagactttgtgaaatgttaggcaacgaacagcagcaggaagacctggaaaaagattcaaaattatgcccaatagagcctgacaagtctgaattggaaaactcaggatttgacagaatgagcgaagaagagcttctagcagctgtcttggagataagtaagagagatgcttcaccatctctgagtcatgaagatgatgataagccaactagcagcccagataccggatttgcagaagatgatattcaagaaatgccagaaaatccagacactatggaaactgagaagcccaaaacaatcacagagctggatcctgccagttttactgagataactaaagactgtgatgagaataaagaaaacaaaactccagaaggatctcagggagaagttgattggctccagcagtatgatatggagcgtgaaagggaagagcaagagcttcagcaggcactggctcagagccttcaagagcaagaggcttgggaacagaaagaagatgatgacctcaaaagagctaccgagttaagtcttcaagagtttaacaactcctttgtggatgcattgggttctgatgaggactctggaaatgaggatgtttttgatatggagtacacagaagctgaagctgaggaactgaaaagaaatgctgagacaggaaatctgcctcattcgtaccggctcatcagtgttgtcagtcacattggtagcacttcttcttcaggtcattacattagtgatgtatatgacattaagaagcaagcgtggtttacttacaatgacctggaggtatcaaaaatccaagaggctgccgtgcagagtgatcgagatcggagtggctacatcttcttttatatgcacaaggagatctttgatgggctggctggaacagtcgtgaggaccatacttctgggttggcagtatgcactgcatattttgttacaa

SEQ ID NO: 284072 - DNA, 686 bp, Homo sapiens
cgccatcagccgctctccctgactaggggtagctagcggcctccctcctttgggttctgtatccctacttccattaccctcggctcctcccactcctcgggggctccgtgctttccgcgggtctgtccgggggctccggaccctcggcgcagctgagttgatggcttccggagaactggcatagctgcagaatatgagtagtgtcccaagaagagtgctttgcctttggcacaaggatcagaataaaggtgaattgctattacatagggtttttcggtaaaagtcactgaaaagtaagtaatgtttttgttttggatatatgtttcaaagagcatgcaatctggcgggaactgacagttttgtgtttgttttgtagtaatagtttttgtgttttggccatactttatttaccactgaatgctctctgattaaggatgttttcaaagcagtacctaaaatgtgagcacttaaataaatgtacagggcatagaaacatttttgctaatattgttgctttgagcattcatggtgatgctcaaagttgaacagtaattttaataattgtgaagaaatttagagaaagaatctctggacatatttaaagaataattcattttaattatcttttgtcttcttatttttttgctttaataagacaattaccattaccgagttaaggaaaccct

SEQ ID NO: 284073 - DNA, 618 bp, Homo sapiens
tcccgccatcagccgctctccctgactaggggtagctagcggcctccctcctttgggttctgtatccctacttccattaccctcggctcctcccactcctcgggggctccgtgctttccgcgggtctgtccgggggctccggaccctcggcgcaggtaaggcgggccggggtagcttctcaattgagccgttttccctacctcctcctccttctgtgcgatccgcccactcggcgttcactcctctggagttcgccctgctgctactcagcccgcccacaacccctcgatgcacccccagcctcacaggtactacctttgggtgcactgccccggcttccacctctcctttgacttggtctccactgccactcgctccctccgaaactcaaacctggccccttttctctggggctgttgtcgttcgcctcttaccttctaacagggcctgctgtctcttcaggtgactttcgttacggcacatccaccaggccttggacatgatactcattcactctcttgaccatcttcaccttcctcttgaccagtcctcactgcaaaacatgaattgtatttttgttgtgcatttccttgcgcccatttctagccgccagatcag

SEQ ID NO: 284074 - DNA, 5816 bp, Homo sapiens
cgccatcagccgctctccctgactaggggtagctagcggcctccctcctttgggttctgtatccctacttccattaccctcggctcctcccactcctcgggggctccgtgctttccgcgggtctgtccgggggctccggaccctcggcgcagctgagttgatggcttccggagaactggcatagctgcagaatatgagtagtgtcccaagaagagtgctttgcctttggcacaaggatcagaataaaggtgaattgctattacatagggtttttcggtaaaagtcactgaaaattatttgccatacagtaaccagagacctccaactaggggcccccaaactgtatcctgcctgtagccagaagcaatttttaaagaaaatatgtctcctctgaagatacatggtcctatcagaattcgaagtatgcagactgggattacaaagtggaaagaaggatcctttgaaattgtagaaaaagagaataaagtcagcctagtagttcactacaatactggaggaattccaaggatatttcagctaagtcataacattaaaaatgtggtgcttcgacccagtggagcgaaacaaagccgcctaatgttaactctgcaagataacagcttcttgtctattgacaaagtaccaagtaaggatgcagaggaaatgaggttgtttctagatgcagtccatcaaaacagacttcctgcagccatgaaaccgtctcaggggtctggtagttttggagccattctgggcagcaggacctcacagaaggaaaccagcaggcagctttcttactcagacaatcaggcttctgcaaaaagaggaagtttggaaactaaagatgatattccatttcgaaaagttcttggtaatccgggtagaggatcgattaagactgtagcaggaagtggaatagctcggacgattccttctttgacatctacttcaacacctcttagatcagggttgctagaaaatcgtactgaaaagaggaaaagaatgatatcaactggctcagaattgaatgaagattaccctaaggaaaatgattcatcatcgaacaacaaggccatgacagatccctccagaaagtatttaaccagcagtagagaaaagcagctgagtttgaaacagtcagaagagaataggacatcagggcttttacctttacagtcatcatccttttatggtagcagagctggatccaaggaacactcttctggtggcactaacttagacaggactaatgtttcaagccagactccctctgccaaaagaagtttgggatttcttcctcagccagttcctctttctgttaaaaaactgaggtgtaaccaggattacactggctggaataaaccaagagtgcccctttcctctcaccaacagcagcaactgcagggcttctccaatttgggaaatacctgctatatgaatgctattctacaatctctattttcactccagtcatttgcaaatgacttgcttaaacaaggtatcccatggaagaaaattccactcaatgcacttatcagacgctttgcacacttgcttgttaaaaaagatatctgtaattcagagaccaaaaaggatttactcaagaaggttaaaaatgccatttcagctacagcagagagattctctggttatatgcagaatgatgctcatgaatttttaagtcagtgtttggaccagctgaaagaagatatggaaaaattaaataaaacttggaagactgaacctgtttctggagaagaaaattcaccagatatttcagctaccagagcatacacttgccctgttattactaatttggagtttgaggttcagcactccatcatttgtaaagcatgtggagagattatccccaaaagagaacagtttaatgacctctctattgaccttcctcgtaggaaaaaaccactccctcctcgttcaattcaagattctcttgatcttttctttagggccgaagaactggagtattcttgtgagaagtgtggtgggaagtgtgctcttgtcaggcacaaatttaacaggcttcctagggtcctcattctccatttgaaacgatatagcttcaatgtggctctctcgcttaacaataagattgggcagcaagtcatcattccaagatacctgaccctgtcatctcattgcactgaaaatacaaaaccaccttttacccttggttggagtgcacatatggcaatttctagaccattgaaagcctctcaaatggtgaattcctgcatcaccagcccttctacaccttcaaagaaattcaccttcaaatccaagagctccttggctttatgccttgattcagacagtgaggatgagctaaaacgttctgtggccctcagccagagactttgtgaaatgttaggcaacgaacagcagcaggaagacctggaaaaagattcaaaattatgcccaatagagcctgacaagtctgaattggaaaactcaggatttgacagaatgagcgaagaagagcttctagcagctgtcttggagataagtaagagagatgcttcaccatctctgagtcatgaagatgatgataagccaactagcagcccagataccggatttgcagaagatgatattcaagaaatgccagaaaatccagacactatggaaactgagaagcccaaaacaatcacagagctggatcctgccagttttactgagataactaaagactgtgatgagaataaagaaaacaaaactccagaaggatctcagggagaagttgattggctccagcagtatgatatggagcgtgaaagggaagagcaagagcttcagcaggcactggctcagagccttcaagagcaagaggcttgggaacagaaagaagatgatgacctcaaaagagctaccgagttaagtcttcaagagtttaacaactcctttgtggatgcattgggttctgatgaggactctggaaatgaggatgtttttgatatggagtacacagaagctgaagctgaggaactgaaaagaaatgctgagacaggaaatctgcctcattcgtaccggctcatcagtgttgtcagtcacattggtagcacttcttcttcaggtcattacattagtgatgtatatgacattaagaagcaagcgtggtttacttacaatgacctggaggtatcaaaaatccaagaggctgccgtgcagagtgatcgagatcggagtggctacatcttcttttatatgcacaaggagatctttgatgagctgctggaaacagaaaagaactctcagtcacttagcacggaagtggggaagactacccgtcaggcctcgtgaggaacaaactcctgggttggcagcatgcactgcatatttgttactgctgcccacctcacctttcctctgctgaaggagaatttggaattctacttgatgcgggagcaacaaacagctcagggccaaaccaaaagacaaaaattggagtaacgtagaatgctccatgctattttatggaaactttggtctcacatccgtagctgattatcctctttttctcctatgagtggcacttcttttgtcttaggaatacatgttgtaaatatatatctgtgtatgtgtgtatacacacacacagacacacacacacacacacgggatgaatggagccttaaagagttaggatgagccaccagaatatgcctgctcaaaattaatagcacagcagtttggagaagaaatgaaggtgtcaaagagtccattcacctgagaaatgtgtgaagacatacttatcagttggcttttagcttttatgttccttgagtagtttcactcaagtctgtaaccttttgtgtttccttattagtaaaattcactggaaagccagctcttcatgttacactaatgacagtttgttctctttgcaagagaggggcattactgtcacctgacttgaggagctgttttgttgttgttgttgtctgcaaatttcatgaatttgtgatgtctttgctgtttacatgcagtcccaagaaatggattgttggtgctttggaatatgttacagtcccacatttgatatttcttatatactttgttttctctaaggagatttcttcacacagtatgttcatcatatatcatcatcattattatggtggtaaagatagaatcttttttcttttttgtcattctgccatggagcagcattaccctaatggattgcaaccaaaactttaaacaagtagaaagataatatttctccaattgggactccccagcaggaatacttagggataaggaagaatgctagcatctctgtctctcaaacatagggaggataagaagagtgttcttctggtaaagctaaaattctggaccactgaagctaaaagccctattgcaagtatgaaattaagtacttgagctataggacaaaccttgggcatttaaccatttactgtctggctttgcccttaaaatagggttgcaattaaaatgtgattggcttaggtaatcccaaaaactaacaaataacaaaggtgcataatttatttatctactttttaggtgctctgagttgaggcaaagtagagcggcaacattaagtgctatgctagtcacttagctgacgtaaccagcttggttaagcagcttatgaaaccatataaagaattcttttgaggatggaattctgtccacaaaataattttgtgagcccagatatcattaggatcacacagagttaaatatagaaaaatgaaaccatcattatattctttcgtgttttttcttttattataaacaaggggattattctttagttctcagaggtagggacaaaaccacatcaggttttcagaaggaaaaaacatttaaaaacccaccatcacatgagagaatcacttgaacccaggaggcagaggttgcagtgagctgagatcgcatcattgcactgcagtctgagtgacagagtgagactccatctcattaaaaaaaacgaaaacaaaaacaaaaaaaacacaaaccatcatcacagaagatgcaacatcttttctgaaagattgccttaagagagctccagtcctactcttggaacttggatgtattctaatgtagtaaactattctaagttttcattctttgaattataaatggcctcagcagttttgctcaactactgataaatgctttgcctcctaccatctacctatataccttattgtaatgaatgttccaaaatggtagagtggtagaaaacgccagagtagtttagagcagaggaaaatatttgttttaaaactagctttaaagttttgtttcatttctaccaggagcctctttggtttggtttgattttgcttggaaataattggttttcttataaatgagtgaagcggtgataaaattctttggctagttattaattcttttacgtgtctttgcatttgagaggcactgttaaaaattattgggaaagatttaaagtgcaggctgcaattaaaacatggagaaaagtagaaataatgccataagtctagattgcctcatgaagcagcctcatttgaattgctttcatagctttcatgtgtgtatggtttagaagtacacttacctcagaaacctgatttgatcttcatgtcttgggcaggagttgttgaaaataggttattggaatatataagttatctcactgctcatgtacttgcatgtttgggactcaaattttacttgatgtctgtccattcttgtggccctatcagccttctccttcctttactcctttaatctacttctttgactaccagtggagatttcagctggactatgttgat

SEQ ID NO: 284075 - DNA, 5854 bp, Homo sapiens
cgccatcagccgctctccctgactaggggtagctagcggcctccctcctttgggttctgtatccctacttccattaccctcggctcctcccactcctcgggggctccgtgctttccgcgggtctgtccgggggctccggaccctcggcgcagctgagttgatggcttccggagaactggcatagctgcagaatatgagtagtgtcccaagaagagtgctttgcctttggcacaaggatcagaataaaggtgaattgctattacatagggtttttcggtaaaagtcactgaaaattatttgccatacagtaaccagagacctccaactaggggcccccaaactgtatcctgcctgtagccagaagcaatttttaaagaaaatatgtctcctctgaagatacatggtcctatcagaattcgaagtatgcagactgggattacaaagtggaaagaaggatcctttgaaattgtagaaaaagagaataaagtcagcctagtagttcactacaatactggaggaattccaaggatatttcagctaagtcataacattaaaaatgtggtgcttcgacccagtggagcgaaacaaagccgcctaatgttaactctgcaagataacagcttcttgtctattgacaaagtaccaagtaaggatgcagaggaaatgaggttgtttctagatgcagtccatcaaaacagacttcctgcagccatgaaaccgtctcaggggtctggtagttttggagccattctgggcagcaggacctcacagaaggaaaccagcaggcagctttcttactcagacaatcaggcttctgcaaaaagaggaagtttggaaactaaagatgatattccatttcgaaaagttcttggtaatccgggtagaggatcgattaagactgtagcaggaagtggaatagctcggacgattccttctttgacatctacttcaacacctcttagatcagggttgctagaaaatcgtactgaaaagaggaaaagaatgatatcaactggctcagaattgaatgaagattaccctaaggaaaatgattcatcatcgaacaacaaggccatgacagatccctccagaaagtatttaaccagcagtagagaaaagcagctgagtttgaaacagtcagaagagaataggacatcagggcttttacctttacagtcatcatccttttatggtagcagagctggatccaaggaacactcttctggtggcactaacttagacaggactaatgtttcaagccagactccctctgccaaaagaagtttgggatttcttcctcagccagttcctctttctgttaaaaaactgaggtgtaaccaggattacactggctggaataaaccaagagtgcccctttcctctcaccaacagcagcaactgcagggcttctccaatttgggaaatacctgctatatgaatgctattctacaatctctattttcactccagtcatttgcaaatgacttgcttaaacaaggtatcccatggaagaaaattccactcaatgcacttatcagacgctttgcacacttgcttgttaaaaaagatatctgtaattcagagaccaaaaaggatttactcaagaaggttaaaaatgccatttcagctacagcagagagattctctggttatatgcagaatgatgctcatgaatttttaagtcagtgtttggaccagctgaaagaagatatggaaaaattaaataaaacttggaagactgaacctgtttctggagaagaaaattcaccagatatttcagctaccagagcatacacttgccctgttattactaatttggagtttgaggttcagcactccatcatttgtaaagcatgtggagagattatccccaaaagagaacagtttaatgacctctctattgaccttcctcgtaggaaaaaaccactccctcctcgttcaattcaagattctcttgatcttttctttagggccgaagaactggagtattcttgtgagaagtgtggtgggaagtgtgctcttgtcaggcacaaatttaacaggcttcctagggtcctcattctccatttgaaacgatatagcttcaatgtggctctctcgcttaacaataagattgggcagcaagtcatcattccaagatacctgaccctgtcatctcattgcactgaaaatacaaaaccaccttttacccttggttggagtgcacatatggcaatttctagaccattgaaagcctctcaaatggtgaattcctgcatcaccagcccttctacaccttcaaagaaattcaccttcaaatccaagagctccttggctttatgccttgattcagacagtgaggatgagctaaaacgttctgtggccctcagccagagactttgtgaaatgttaggcaacgaacagcagcaggaagacctggaaaaagtattctggtttcttctaaaagtaactctcttcttcaggattcaaaattatgcccaatagagcctgacaagtctgaattggaaaactcaggatttgacagaatgagcgaagaagagcttctagcagctgtcttggagataagtaagagagatgcttcaccatctctgagtcatgaagatgatgataagccaactagcagcccagataccggatttgcagaagatgatattcaagaaatgccagaaaatccagacactatggaaactgagaagcccaaaacaatcacagagctggatcctgccagttttactgagataactaaagactgtgatgagaataaagaaaacaaaactccagaaggatctcagggagaagttgattggctccagcagtatgatatggagcgtgaaagggaagagcaagagcttcagcaggcactggctcagagccttcaagagcaagaggcttgggaacagaaagaagatgatgacctcaaaagagctaccgagttaagtcttcaagagtttaacaactcctttgtggatgcattgggttctgatgaggactctggaaatgaggatgtttttgatatggagtacacagaagctgaagctgaggaactgaaaagaaatgctgagacaggaaatctgcctcattcgtaccggctcatcagtgttgtcagtcacattggtagcacttcttcttcaggtcattacattagtgatgtatatgacattaagaagcaagcgtggtttacttacaatgacctggaggtatcaaaaatccaagaggctgccgtgcagagtgatcgagatcggagtggctacatcttcttttatatgcacaaggagatctttgatgagctgctggaaacagaaaagaactctcagtcacttagcacggaagtggggaagactacccgtcaggcctcgtgaggaacaaactcctgggttggcagcatgcactgcatatttgttactgctgcccacctcacctttcctctgctgaaggagaatttggaattctacttgatgcgggagcaacaaacagctcagggccaaaccaaaagacaaaaattggagtaacgtagaatgctccatgctattttatggaaactttggtctcacatccgtagctgattatcctctttttctcctatgagtggcacttcttttgtcttaggaatacatgttgtaaatatatatctgtgtatgtgtgtatacacacacacagacacacacacacacacacgggatgaatggagccttaaagagttaggatgagccaccagaatatgcctgctcaaaattaatagcacagcagtttggagaagaaatgaaggtgtcaaagagtccattcacctgagaaatgtgtgaagacatacttatcagttggcttttagcttttatgttccttgagtagtttcactcaagtctgtaaccttttgtgtttccttattagtaaaattcactggaaagccagctcttcatgttacactaatgacagtttgttctctttgcaagagaggggcattactgtcacctgacttgaggagctgttttgttgttgttgttgtctgcaaatttcatgaatttgtgatgtctttgctgtttacatgcagtcccaagaaatggattgttggtgctttggaatatgttacagtcccacatttgatatttcttatatactttgttttctctaaggagatttcttcacacagtatgttcatcatatatcatcatcattattatggtggtaaagatagaatcttttttcttttttgtcattctgccatggagcagcattaccctaatggattgcaaccaaaactttaaacaagtagaaagataatatttctccaattgggactccccagcaggaatacttagggataaggaagaatgctagcatctctgtctctcaaacatagggaggataagaagagtgttcttctggtaaagctaaaattctggaccactgaagctaaaagccctattgcaagtatgaaattaagtacttgagctataggacaaaccttgggcatttaaccatttactgtctggctttgcccttaaaatagggttgcaattaaaatgtgattggcttaggtaatcccaaaaactaacaaataacaaaggtgcataatttatttatctactttttaggtgctctgagttgaggcaaagtagagcggcaacattaagtgctatgctagtcacttagctgacgtaaccagcttggttaagcagcttatgaaaccatataaagaattcttttgaggatggaattctgtccacaaaataattttgtgagcccagatatcattaggatcacacagagttaaatatagaaaaatgaaaccatcattatattctttcgtgttttttcttttattataaacaaggggattattctttagttctcagaggtagggacaaaaccacatcaggttttcagaaggaaaaaacatttaaaaacccaccatcacatgagagaatcacttgaacccaggaggcagaggttgcagtgagctgagatcgcatcattgcactgcagtctgagtgacagagtgagactccatctcattaaaaaaaacgaaaacaaaaacaaaaaaaacacaaaccatcatcacagaagatgcaacatcttttctgaaagattgccttaagagagctccagtcctactcttggaacttggatgtattctaatgtagtaaactattctaagttttcattctttgaattataaatggcctcagcagttttgctcaactactgataaatgctttgcctcctaccatctacctatataccttattgtaatgaatgttccaaaatggtagagtggtagaaaacgccagagtagtttagagcagaggaaaatatttgttttaaaactagctttaaagttttgtttcatttctaccaggagcctctttggtttggtttgattttgcttggaaataattggttttcttataaatgagtgaagcggtgataaaattctttggctagttattaattcttttacgtgtctttgcatttgagaggcactgttaaaaattattgggaaagatttaaagtgcaggctgcaattaaaacatggagaaaagtagaaataatgccataagtctagattgcctcatgaagcagcctcatttgaattgctttcatagctttcatgtgtgtatggtttagaagtacacttacctcagaaacctgatttgatcttcatgtcttgggcaggagttgttgaaaataggttattggaatatataagttatctcactgctcatgtacttgcatgtttgggactcaaattttacttgatgtctgtccattcttgtggccctatcagccttctccttcctttactcctttaatctacttctttgactaccagtggagatttcagctggactatgttgat

SEQ ID NO: 284076 - DNA, 3206 bp, Homo sapiens
cgccatcagccgctctccctgactaggggtagctagcggcctccctcctttgggttctgtatccctacttccattaccctcggctcctcccactcctcgggggctccgtgctttccgcgggtctgtccgggggctccggaccctcggcgcagctgagttgatggcttccggagaactggcatagctgcagaatatgagtagtgtcccaagaagagtgctttgcctttggcacaaggatcagaataaaggtgaattgctattacatagggtttttcggtaaaagtcactgaaaattatttgccatacagtaaccagagacctccaactaggggcccccaaactgtatcctgcctgtagccagaagcaatttttaaagaaaatatgtctcctctgaagatacatggtcctatcagaattcgaagtatgcagactgggattacaaagtggaaagaaggatcctttgaaattgtagaaaaagagaataaagtcagcctagtagttcactacaatactggaggaattccaaggatatttcagctaagtcataacattaaaaatgtggtgcttcgacccagtggagcgaaacaaagccgcctaatgttaactctgcaagataacagcttcttgtctattgacaaagtaccaagtaaggatgcagaggaaatgaggttgtttctagatgcagtccatcaaaacagacttcctgcagccatgaaaccgtctcaggggtctggtagttttggagccattctgggcagcaggacctcacagaaggaaaccagcaggcagctttcttactcagacaatcaggcttctgcaaaaagaggaagtttggaaactaaagatgatattccatttcgaaaagttcttggtaatccgggtagaggatcgattaagactgtagcaggaagtggaatagctcggacgattccttctttgacatctacttcaacacctcttagatcagggttgctagaaaatcgtactgaaaagaggaaaagaatgatatcaactggctcagaattgaatgaagattaccctaaggaaaatgattcatcatcgaacaacaaggccatgacagatccctccagaaagtatttaaccagcagtagagaaaagcagctgagtttgaaacagtcagaagagaataggacatcagggcttttacctttacagtcatcatccttttatggtagcagagctggatccaaggaacactcttctggtggcactaacttagacaggactaatgtttcaagccagactccctctgccaaaagaagtttgggatttcttcctcagccagttcctctttctgttaaaaaactgaggtgtaaccaggattacactggctggaataaaccaagagtgcccctttcctctcaccaacagcagcaactgcagggcttctccaatttgggaaatacctgctatatgaatgctattctacaatctctattttcactccagtcatttgcaaatgacttgcttaaacaaggtatcccatggaagaaaattccactcaatgcacttatcagacgctttgcacacttgcttgttaaaaaagatatctgtaattcagagaccaaaaaggatttactcaagaaggttaaaaatgccatttcagctacagcagagagattctctggttatatgcagaatgatgctcatgaatttttaagtcagtgtttggaccagctgaaagaagatatggaaaaattaaataaaacttggaagactgaacctgtttctggagaagaaaattcaccagatatttcagctaccagagcatacacttgccctgttattactaatttggagtttgaggttcagcactccatcatttgtaaagcatgtggagagattatccccaaaagagaacagtttaatgacctctctattgaccttcctcgtaggaaaaaaccactccctcctcgttcaattcaagattctcttgatcttttctttagggccgaagaactggagtattcttgtgagaagtgtggtgggaagtgtgctcttgtcaggcacaaatttaacaggcttcctagggtcctcattctccatttgaaacgatatagcttcaatgtggctctctcgcttaacaataagattgggcagcaagtcatcattccaagatacctgaccctgtcatctcattgcactgaaaatacaaaaccaccttttacccttggttggagtgcacatatggcaatttctagaccattgaaagcctctcaaatggtgaattcctgcatcaccagcccttctacaccttcaaagaaattcaccttcaaatccaagagctccttggctttatgccttgattcagacagtgaggatgagctaaaacgttctgtggccctcagccagagactttgtgaaatgttaggcaacgaacagcagcaggaagacctggaaaaagattcaaaattatgcccaatagagcctgacaagtctgaattggaaaactcaggatttgacagaatgagcgaagaagagcttctagcagctgtcttggagataagtaagagagatgcttcaccatctctgagtcatgaagatgatgataagccaactagcagcccagataccggatttgcagaagatgatattcaagaaatgccagaaaatccagacactatggaaactgagaagcccaaaacaatcacagagctggatcctgccagttttactgagataactaaagactgtgatgagaataaagaaaacaaaactccagaaggatctcagggagaagttgattggctccagcagtatgatatggagcgtgaaagggaagagcaagagcttcagcaggcactggctcagagccttcaagagcaagaggcttgggaacagaaagaagatgatgacctcaaaagagctaccgagttaagtcttcaagagtttaacaactcctttgtggatgcattgggttctgatgaggactctggaaatgaggatgtttttgatatggagtacacagaagctgaagctgaggaactgaaaagaaatgctgaggtaattgttttcattcctgagtacagttggtcaaattcagtgtcactcttcccactctttacttcaaaggccccactttcagtgtccactgcaggttcattttggccctttcagtagccattagatggtctcattttctcttgtcatttgctgttcatttttcacatacaagatttaaaaaa

SEQ ID NO: 284077 - DNA, 1655 bp, Homo sapiens
agcgggggcggcgtgacagctgccagctcaccggctcagacggtcgccgccgcgtttgcgcagggggagctggtcgccgccgcggccgcctggaattgtgggagttgtgtctgccactcggctgccggaggccgaaggtccctgactatggctccccagagcctgccttcatctaggatggctcctctgggcatgctgcttgggctgctgatggccgcctgcttcaccttctgcctcagtcatcagaacctgaaggagtttgccctgaccaacccagagaagagcagcaccaaagaaacggagagaaaagaaaccaaagccgaggaggagctggatgccgaagtcctggaggtgttccacccgacgcatgagtggcaggcccttcagccagggcaggctgtccctgcaggatcccacgtacggctgaatcttcagactggggaaagagaggcaaaactccaatatgaggacaagttccgaaataatttgaaaggcaaaaggctggatatcaacaccaacacctacacatctcaggatctcaagagtgcactggcaaaattcaaggagggggcagagatggagagttcaaaggaagacaaggcaaggcaggctgaggtaaagcggctcttccgccccattgaggaactgaagaaagactttgatgagctgaatgttgtcattgagactgacatgcagatcatggtacggctgatcaacaagttcaatagttccagctccagtttggaagagaagattgctgcgctctttgatcttgaatattatgtccatcagatggacaatgcgcaggacctgctttcctttggtggtcttcaagtggtgatcaatgggctgaacagcacagagcccctcgtgaaggagtatgctgcgtttgtgctgggcgctgccttttccagcaaccccaaggtccaggtggaggccatcgaagggggagccctgcagaagctgctggtcatcctggccacggagcagccgctcactgcaaagaagaaggtcctgtttgcactgtgctccctgctgcgccacttcccctatgcccagcggcagttcctgaagctcggggggctgcaggtcctgaggaccctggtgcaggagaagggcacggaggtgctcgccgtgcgcgtggtcacactgctctacgacctggtcacggagaagatgttcgccgaggaggaggctgagctgacccaggagatgtccccagagaagctgcagcagtatcgccaggtacacctcctgccaggcctgtgggaacagggctggtgcgagatcacggcccacctcctggcgctgcccgagcatgatgcccgtgagaaggtgctgcagacactgggcgtcctcctgaccacctgccgggaccgctaccgtcaggacccccagctcggcaggacactggccagcctgcaggctgagtaccaggtgctggccagcctggagctgcaggatggtgaggacgagggctacttccaggagctgctgggctctgtcaacagcttgctgaaggagctgagatgaggccccacaccaggactggactgggatgccgctagtgaggctgaggggtgccagcgtgggtgggcttctcaggcaggaggacatcttggcagtgctggcttggccattaaatggaaacctga

SEQ ID NO: 284078 - DNA, 1738 bp, Homo sapiens
agcgggggcggcgtgacagctgccagctcaccggctcagacggtcgccgccgcgtttgcgcagggggagctggtcgccgccgcggccgcctggaattgtgggagttgtgtctgccactcggctgccggaggccgaagctattacttctctactgaggccaactgtgagccctggtgtgtttcattggcaggagaagaggctaattaagtgaaactgaaaggtccctgactatggctccccagagcctgccttcatctaggatggctcctctgggcatgctgcttgggctgctgatggccgcctgcttcaccttctgcctcagtcatcagaacctgaaggagtttgccctgaccaacccagagaagagcagcaccaaagaaacggagagaaaagaaaccaaagccgaggaggagctggatgccgaagtcctggaggtgttccacccgacgcatgagtggcaggcccttcagccagggcaggctgtccctgcaggatcccacgtacggctgaatcttcagactggggaaagagaggcaaaactccaatatgaggacaagttccgaaataatttgaaaggcaaaaggctggatatcaacaccaacacctacacatctcaggatctcaagagtgcactggcaaaattcaaggagggggcagagatggagagttcaaaggaagacaaggcaaggcaggctgaggtaaagcggctcttccgccccattgaggaactgaagaaagactttgatgagctgaatgttgtcattgagactgacatgcagatcatggtacggctgatcaacaagttcaatagttccagctccagtttggaagagaagattgctgcgctctttgatcttgaatattatgtccatcagatggacaatgcgcaggacctgctttcctttggtggtcttcaagtggtgatcaatgggctgaacagcacagagcccctcgtgaaggagtatgctgcgtttgtgctgggcgctgccttttccagcaaccccaaggtccaggtggaggccatcgaagggggagccctgcagaagctgctggtcatcctggccacggagcagccgctcactgcaaagaagaaggtcctgtttgcactgtgctccctgctgcgccacttcccctatgcccagcggcagttcctgaagctcggggggctgcaggtcctgaggaccctggtgcaggagaagggcacggaggtgctcgccgtgcgcgtggtcacactgctctacgacctggtcacggagaagatgttcgccgaggaggaggctgagctgacccaggagatgtccccagagaagctgcagcagtatcgccaggtacacctcctgccaggcctgtgggaacagggctggtgcgagatcacggcccacctcctggcgctgcccgagcatgatgcccgtgagaaggtgctgcagacactgggcgtcctcctgaccacctgccgggaccgctaccgtcaggacccccagctcggcaggacactggccagcctgcaggctgagtaccaggtgctggccagcctggagctgcaggatggtgaggacgagggctacttccaggagctgctgggctctgtcaacagcttgctgaaggagctgagatgaggccccacaccaggactggactgggatgccgctagtgaggctgaggggtgccagcgtgggtgggcttctcaggcaggaggacatcttggcagtgctggcttggccattaaatggaaacctga

SEQ ID NO: 284079 - DNA, 1392 bp, Homo sapiens
agcgggggcggcgtgacagctgccagctcaccggctcagacggtcgccgccgcgtttgcgcagggggagctggtcgccgccgcggccgcctggaattgtgggagttgtgtctgccactcggctgccggaggccgaaggtccctgactatggctccccagagcctgccttcatctaggatggctcctctgggcatgctgcttgggctgctgatggccgcctgcttcaccttctgcctcagtcatcagaacctgaaggagtttgccctgaccaacccagagaagagcagcaccaaagaaacggagagaaaagaaaccaaagccgaggaggagctggatgccgaagtcctggaggtgttccacccgacgcatgagtggcaggcccttcagccagggcaggctgtccctgcaggatcccacgtacggctgaatcttcagactggggaaagagaggcaaaactccaatatgaggacaagttccgaaataatttgaaaggcaaaaggctggatatcaacaccaacacctacacatctcaggatctcaagagtgcactggcaaaattcaaggagggggcagagatggagagttcaaaggaagacaaggcaaggcaggctgaggtaaagcggctcttccgccccattgaggaactgaagaaagactttgatgagctgaatgttgtcattgagactgacatgcagatcatggtacggctgatcaacaagttcaatagttccagctccagtttggaagagaagattgctgcgctctttgatcttgaatattatgtccatcagatggacaatgcgcaggacctgctttcctttggtggtcttcaagtggtgatcaatgggctgaacagcacagagcccctcgtgaaggagtatgctgcgtttgtgctgggcgctgccttttccagcaaccccaaggtccaggtggaggccatcgaagggggagccctgcagaagctgctggtcatcctggccacggagcagccgctcactgcaaagaagaaggtcctgtttgcactgtgctccctgctgcgccacttcccctatgcccagcggcagttcctgaagctcggggggctgcaggtcctgaggacccacctgccgggaccgctaccgtcaggacccccagctcggcaggacactggccagcctgcaggctgagtaccaggtgctggccagcctggagctgcaggatggtgaggacgagggctacttccaggagctgctgggctctgtcaacagcttgctgaaggagctgagatgaggccccacaccaggactggactgggatgccgctagtgaggctgaggggtgccagcgtgggtgggcttctcaggcaggaggacatcttggcagtgctggcttggccattaaatggaaacctga

SEQ ID NO: 284080 - DNA, 1335 bp, Homo sapiens
agacagtgggggaaagcatgggactttttgatgtggagtaaagccagagaaggaaaattcatctactcacaggcaggctgtccctgcaggatcccacgtacggctgaatcttcagactggggaaagagaggcaaaactccaatatgaggacaagttccgaaataatttgaaaggcaaaaggctggatatcaacaccaacacctacacatctcaggatctcaagagtgcactggcaaaattcaaggagggggcagagatggagagttcaaaggaagacaaggcaaggcaggctgaggtaaagcggctcttccgccccattgaggaactgaagaaagactttgatgagctgaatgttgtcattgagactgacatgcagatcatggtacggctgatcaacaagttcaatagttccagctccagtttggaagagaagattgctgcgctctttgatcttgaatattatgtccatcagatggacaatgcgcaggacctgctttcctttggtggtcttcaagtggtgatcaatgggctgaacagcacagagcccctcgtgaaggagtatgctgcgtttgtgctgggcgctgccttttccagcaaccccaaggtccaggtggaggccatcgaagggggagccctgcagaagctgctggtcatcctggccacggagcagccgctcactgcaaagaagaaggtcctgtttgcactgtgctccctgctgcgccacttcccctatgcccagcggcagttcctgaagctcggggggctgcaggtcctgaggaccctggtgcaggagaagggcacggaggtgctcgccgtgcgcgtggtcacactgctctacgacctggtcacggagaagatgttcgccgaggaggaggctgagctgacccaggagatgtccccagagaagctgcagcagtatcgccaggtacacctcctgccaggcctgtgggaacagggctggtgcgagatcacggcccacctcctggcgctgcccgagcatgatgcccgtgagaaggtgctgcagacactgggcgtcctcctgaccacctgccgggaccgctaccgtcaggacccccagctcggcaggacactggccagcctgcaggctgagtaccaggtgctggccagcctggagctgcaggatggtgaggacgagggctacttccaggagctgctgggctctgtcaacagcttgctgaaggagctgagatgaggccccacaccaggactggactgggatgccgctagtgaggctgaggggtgccagcgtgggtgggcttctcaggcaggaggacatcttggcagtgctggcttggccattaaatggaaacctga

SEQ ID NO: 284081 - DNA, 1149 bp, Homo sapiens
cgctctagagatcccctttagatcactaggtcctttagatgcactggcaaaattcaaggagggggcagagatggagagttcaaaggaagacaaggcaaggcaggctgaggtaaagcggctcttccgccccattgaggaactgaagaaagactttgatgagctgaatgttgtcattgagactgacatgcagatcatggtacggctgatcaacaagttcaatagttccagctccagtttggaagagaagattgctgcgctctttgatcttgaatattatgtccatcagatggacaatgcgcaggacctgctttcctttggtggtcttcaagtggtgatcaatgggctgaacagcacagagcccctcgtgaaggagtatgctgcgtttgtgctgggcgctgccttttccagcaaccccaaggtccaggtggaggccatcgaagggggagccctgcagaagctgctggtcatcctggccacggagcagccgctcactgcaaagaagaaggtcctgtttgcactgtgctccctgctgcgccacttcccctatgcccagcggcagttcctgaagctcggggggctgcaggtcctgaggaccctggtgcaggagaagggcacggaggtgctcgccgtgcgcgtggtcacactgctctacgacctggtcacggagaagatgttcgccgaggaggaggctgagctgacccaggagatgtccccagagaagctgcagcagtatcgccaggtacacctcctgccaggcctgtgggaacagggctggtgcgagatcacggcccacctcctggcgctgcccgagcatgatgcccgtgagaaggtgctgcagacactgggcgtcctcctgaccacctgccgggaccgctaccgtcaggacccccagctcggcaggacactggccagcctgcaggctgagtaccaggtgctggccagcctggagctgcaggatggtgaggacgagggctacttccaggagctgctgggctctgtcaacagcttgctgaaggagctgagatgaggccccacaccaggactggactgggatgccgctagtgaggctgaggggtgccagcgtgggtgggcttctcaggcaggaggacatcttggcagtgctggcttggccattaaatggaaacctga

SEQ ID NO: 284082 - DNA, 694 bp, Homo sapiens
agcgggggcggcgtgacagctgccagctcaccggctcagacggtcgccgccgcgtttgcgcagggggagctggtcgccgccgcggccgcctggaattgtgggagttgtgtctgccactcggctgccggaggccgaagctattacttctctactgaggccaactgtgagccctggtgtgtttcattggcaggagaagaggctaattaagtgaaactgaaagaacaaataaaatgatgagtccagtttctgtggctgatttcacagacccctcgagagacagcacggctatggaaagagcatggcttttggggccaaactggctttgaattctgactctactgctctgtggctgcatgaactctggcacgttacttaacctctctgaattttggtcccctcatgggtaaaatgagcagcatattggaaccacctcagagggttgtcgtgaagagtaaatgaactaatactttgcttgcaacatggaaagttctctataaatgttgactataattattatttgacagaattaattttcctctgggatgcccagatagtatatttgaatgctgggggaaggggtggcactagggtatttctctgtctccgccatggcggagttattattacatttccacaaagtggaaggactaaagcctccgggcagtctgaggcatggctgagagcccagagaagg

SEQ ID NO: 284083 - DNA, 531 bp, Homo sapiens
agcgggggcggcgtgacagctgccagctcaccggctcagacggtcgccgccgcgtttgcgcagggggagctggtcgccgccgcggccgcctggaattgtgggagttgtgtctgccactcggctgccggaggccgaagctattacttctctactgaggccaactgtgagccctggtgtgtttcattggcaggagaagaggctaattaagtgaaactgaaaggtccctgactatggctccccagagcctgccttcatctaggatggctcctctgggcatgctgcttgggctgctgatggccgcctgcttcaccttctgcctcagtcatcagaacctgaaggagtttgccctgaccaacccagagaagagcagcaccaaagaaacggagagaaaagaaaccaaagccgaggaggagctggatgccgaagtcctggaggtgttccacccgacgcatgagggtgccagcgtgggtgggcttctcaggcaggaggacatcttggcagtgctggcttggccattaaatggaaacctga

SEQ ID NO: 284084 - DNA, 269 bp, Homo sapiens
ttccttgacatgcctgtcagaaggtcactcagctggtccatgtgcacttttttcaggtggcactcaccccacaaaacagcctgttcagatttagacagttttcactgttagaaaattctacttcatattgagatagaggcatttgttctccttacagtcactccaaattgggaaggatctttcatcttccctcattcctccaggtaggcctatacttggagtggcccaggtcagacaattactcctttctaacaaccatgtaagaaata

SEQ ID NO: 284085 - DNA, 843 bp, Homo sapiens
ggaccttgaagcttgttcctggtcagaatagaagtggggagctatcttcattccattcagccagctttgggggcacgcctgctgtgtgtcgggccctctcctcaaccccaaggtccaggtggaggccatcgaagggggagccctgcagaagctgctggtcatcctggccacggagcagccgctcactgcaaagaagaaggtcctgtttgcactgtgctccctgctgcgccacttcccctatgcccagcggcagttcctgaagctcggggggctgcaggtcctgaggaccctggtgcaggagaagggcacggaggtgctcgccgtgcgcgtggtcacactgctctacgacctggtcacggagaagatgttcgccgaggaggaggctgagctgacccaggagatgtccccagagaagctgcagcagtatcgccaggtacacctcctgccaggcctgtgggaacagggctggtgcgagatcacggcccacctcctggcgctgcccgagcatgatgcccgtgagaaggtgctgcagacactgggcgtcctcctgaccacctgccgggaccgctaccgtcaggacccccagctcggcaggacactggccagcctgcaggctgagtaccaggtgctggccagcctggagctgcaggatggtgaggacgagggctacttccaggagctgctgggctctgtcaacagcttgctgaaggagctgagatgaggccccacaccaggactggactgggatgccgctagtgaggctgaggggtgccagcgtgggtgggcttctcaggcaggaggacatcttggcagtgctggcttggccattaaatggaaacctga

SEQ ID NO: 284086 - DNA, 1881 bp, Homo sapiens
agcgggggcggcgtgacagctgccagctcaccggctcagacggtcgccgccgcgtttgcgcagggggagctggtcgccgccgcggccgcctggaattgtgggagttgtgtctgccactcggctgccggaggccgaagctattacttctctactgaggccaactgtgagccctggtgtgtttcattggcaggagaagaggctaattaagtgaaactgaaagaacaaataaaatgatgagtccagtttctgtggctgatttcacagacccctcgagagacagcacggctatggaaagagcatggcttttggggccaaactggctttgaattctgactctactgctctgtggctgcatgaactctggtccctgactatggctccccagagcctgccttcatctaggatggctcctctgggcatgctgcttgggctgctgatggccgcctgcttcaccttctgcctcagtcatcagaacctgaaggagtttgccctgaccaacccagagaagagcagcaccaaagaaacggagagaaaagaaaccaaagccgaggaggagctggatgccgaagtcctggaggtgttccacccgacgcatgagtggcaggcccttcagccagggcaggctgtccctgcaggatcccacgtacggctgaatcttcagactggggaaagagaggcaaaactccaatatgaggacaagttccgaaataatttgaaaggcaaaaggctggatatcaacaccaacacctacacatctcaggatctcaagagtgcactggcaaaattcaaggagggggcagagatggagagttcaaaggaagacaaggcaaggcaggctgaggtaaagcggctcttccgccccattgaggaactgaagaaagactttgatgagctgaatgttgtcattgagactgacatgcagatcatggtacggctgatcaacaagttcaatagttccagctccagtttggaagagaagattgctgcgctctttgatcttgaatattatgtccatcagatggacaatgcgcaggacctgctttcctttggtggtcttcaagtggtgatcaatgggctgaacagcacagagcccctcgtgaaggagtatgctgcgtttgtgctgggcgctgccttttccagcaaccccaaggtccaggtggaggccatcgaagggggagccctgcagaagctgctggtcatcctggccacggagcagccgctcactgcaaagaagaaggtcctgtttgcactgtgctccctgctgcgccacttcccctatgcccagcggcagttcctgaagctcggggggctgcaggtcctgaggaccctggtgcaggagaagggcacggaggtgctcgccgtgcgcgtggtcacactgctctacgacctggtcacggagaagatgttcgccgaggaggaggctgagctgacccaggagatgtccccagagaagctgcagcagtatcgccaggtacacctcctgccaggcctgtgggaacagggctggtgcgagatcacggcccacctcctggcgctgcccgagcatgatgcccgtgagaaggtgctgcagacactgggcgtcctcctgaccacctgccgggaccgctaccgtcaggacccccagctcggcaggacactggccagcctgcaggctgagtaccaggtgctggccagcctggagctgcaggatggtgaggacgagggctacttccaggagctgctgggctctgtcaacagcttgctgaaggagctgagatgaggccccacaccaggactggactgggatgccgctagtgaggctgaggggtgccagcgtgggtgggcttctcaggcaggaggacatcttggcagtgctggcttggccattaaatggaaacctga

SEQ ID NO: 284087 - DNA, 1793 bp, Homo sapiens
agcgggggcggcgtgacagctgccagctcaccggctcagacggtcgccgccgcgtttgcgcagggggagctggtcgccgccgcggccgcctggaattgtgggagttgtgtctgccactcggctgccggaggccgaagggcccaatccccacccccagtcttgtctgaattgtgtggaagacatgaggcactgagagaggtgggggccgagtggcctcctcccacctgctccccaaacatctgctctgggctgcagtaagctggcaatacagattggtccctgactatggctccccagagcctgccttcatctaggatggctcctctgggcatgctgcttgggctgctgatggccgcctgcttcaccttctgcctcagtcatcagaacctgaaggagtttgccctgaccaacccagagaagagcagcaccaaagaaacggagagaaaagaaaccaaagccgaggaggagctggatgccgaagtcctggaggtgttccacccgacgcatgagtggcaggcccttcagccagggcaggctgtccctgcaggatcccacgtacggctgaatcttcagactggggaaagagaggcaaaactccaatatgaggacaagttccgaaataatttgaaaggcaaaaggctggatatcaacaccaacacctacacatctcaggatctcaagagtgcactggcaaaattcaaggagggggcagagatggagagttcaaaggaagacaaggcaaggcaggctgaggtaaagcggctcttccgccccattgaggaactgaagaaagactttgatgagctgaatgttgtcattgagactgacatgcagatcatggtacggctgatcaacaagttcaatagttccagctccagtttggaagagaagattgctgcgctctttgatcttgaatattatgtccatcagatggacaatgcgcaggacctgctttcctttggtggtcttcaagtggtgatcaatgggctgaacagcacagagcccctcgtgaaggagtatgctgcgtttgtgctgggcgctgccttttccagcaaccccaaggtccaggtggaggccatcgaagggggagccctgcagaagctgctggtcatcctggccacggagcagccgctcactgcaaagaagaaggtcctgtttgcactgtgctccctgctgcgccacttcccctatgcccagcggcagttcctgaagctcggggggctgcaggtcctgaggaccctggtgcaggagaagggcacggaggtgctcgccgtgcgcgtggtcacactgctctacgacctggtcacggagaagatgttcgccgaggaggaggctgagctgacccaggagatgtccccagagaagctgcagcagtatcgccaggtacacctcctgccaggcctgtgggaacagggctggtgcgagatcacggcccacctcctggcgctgcccgagcatgatgcccgtgagaaggtgctgcagacactgggcgtcctcctgaccacctgccgggaccgctaccgtcaggacccccagctcggcaggacactggccagcctgcaggctgagtaccaggtgctggccagcctggagctgcaggatggtgaggacgagggctacttccaggagctgctgggctctgtcaacagcttgctgaaggagctgagatgaggccccacaccaggactggactgggatgccgctagtgaggctgaggggtgccagcgtgggtgggcttctcaggcaggaggacatcttggcagtgctggcttggccattaaatggaaacctga

SEQ ID NO: 284088 - DNA, 1784 bp, Homo sapiens
agcgggggcggcgtgacagctgccagctcaccggctcagacggtcgccgccgcgtttgcgcagggggagctggtcgccgccgcggccgcctggaattgtgggagttgtgtctgccactcggctgccggaggccgaagctattacttctctactgaggccaactgtgagccctggtgtgtttcattggcaggagaagaggctaattaagtgaaactgaaaggtccctgactatggctccccagagcctgccttcatctaggatggctcctctgggcatgctgcttgggctgctgatggccgcctgcttcaccttctgcctcagtcatcagaacctgaaggagtttgccctgaccaacccagagaagagcagcaccaaagaaacggagagaaaagaaaccaaagccgaggaggagctggatgccgaagtcctggaggtgttccacccgacgcatgagtggcaggcccttcagccagggcaggctgtccctgcaggatcccacgtacggctgaatcttcagactggggaaagagaggcaaaactccaatatgaggacaagttccgaaataatttgaaaggcaaaagtcactccaaattgggaaggatctttcatcttccctcattcctccaggctggatatcaacaccaacacctacacatctcaggatctcaagagtgcactggcaaaattcaaggagggggcagagatggagagttcaaaggaagacaaggcaaggcaggctgaggtaaagcggctcttccgccccattgaggaactgaagaaagactttgatgagctgaatgttgtcattgagactgacatgcagatcatggtacggctgatcaacaagttcaatagttccagctccagtttggaagagaagattgctgcgctctttgatcttgaatattatgtccatcagatggacaatgcgcaggacctgctttcctttggtggtcttcaagtggtgatcaatgggctgaacagcacagagcccctcgtgaaggagtatgctgcgtttgtgctgggcgctgccttttccagcaaccccaaggtccaggtggaggccatcgaagggggagccctgcagaagctgctggtcatcctggccacggagcagccgctcactgcaaagaagaaggtcctgtttgcactgtgctccctgctgcgccacttcccctatgcccagcggcagttcctgaagctcggggggctgcaggtcctgaggaccctggtgcaggagaagggcacggaggtgctcgccgtgcgcgtggtcacactgctctacgacctggtcacggagaagatgttcgccgaggaggaggctgagctgacccaggagatgtccccagagaagctgcagcagtatcgccaggtacacctcctgccaggcctgtgggaacagggctggtgcgagatcacggcccacctcctggcgctgcccgagcatgatgcccgtgagaaggtgctgcagacactgggcgtcctcctgaccacctgccgggaccgctaccgtcaggacccccagctcggcaggacactggccagcctgcaggctgagtaccaggtgctggccagcctggagctgcaggatggtgaggacgagggctacttccaggagctgctgggctctgtcaacagcttgctgaaggagctgagatgaggccccacaccaggactggactgggatgccgctagtgaggctgaggggtgccagcgtgggtgggcttctcaggcaggaggacatcttggcagtgctggcttggccattaaatggaaacctga

SEQ ID NO: 284089 - DNA, 1463 bp, Homo sapiens
agcgggggcggcgtgacagctgccagctcaccggctcagacggtcgccgccgcgtttgcgcagggggagctggtcgccgccgcggccgcctggaattgtgggagttgtgtctgccactcggctgccggaggccgaaggtccctgactatggctccccagagcctgccttcatctaggatggctcctctgggcatgctgcttgggctgctgatggccgcctgcttcaccttctgcctcagtcatcagaacctgaaggagtttgccctgaccaacccagagaagagcagcaccaaagaaacggagagaaaagaaaccaaagccgaggaggagctggatgccgaagtcctggaggtgttccacccgacgcatgagtggcaggcccttcagccagggcaggctgtccctgcaggatcccacgtacggctgaatcttcagactggggaaagagaggcaaaactccaatatgaggacaagttccgaaataatttgaaaggcaaaaggctggatatcaacaccaacacctacacatctcaggatctcaagagtgcactggcaaaattcaaggagggggcagagatggagagttcaaaggaagacaagatggacaatgcgcaggacctgctttcctttggtggtcttcaagtggtgatcaatgggctgaacagcacagagcccctcgtgaaggagtatgctgcgtttgtgctgggcgctgccttttccagcaaccccaaggtccaggtggaggccatcgaagggggagccctgcagaagctgctggtcatcctggccacggagcagccgctcactgcaaagaagaaggtcctgtttgcactgtgctccctgctgcgccacttcccctatgcccagcggcagttcctgaagctcggggggctgcaggtcctgaggaccctggtgcaggagaagggcacggaggtgctcgccgtgcgcgtggtcacactgctctacgacctggtcacggagaagatgttcgccgaggaggaggctgagctgacccaggagatgtccccagagaagctgcagcagtatcgccaggtacacctcctgccaggcctgtgggaacagggctggtgcgagatcacggcccacctcctggcgctgcccgagcatgatgcccgtgagaaggtgctgcagacactgggcgtcctcctgaccacctgccgggaccgctaccgtcaggacccccagctcggcaggacactggccagcctgcaggctgagtaccaggtgctggccagcctggagctgcaggatggtgaggacgagggctacttccaggagctgctgggctctgtcaacagcttgctgaaggagctgagatgaggccccacaccaggactggactgggatgccgctagtgaggctgaggggtgccagcgtgggtgggcttctcaggcaggaggacatcttggcagtgctggcttggccattaaatggaaacctga

SEQ ID NO: 284090 - DNA, 450 bp, Homo sapiens
tgccactcggctgccggaggccgaagtaggggcggtgagggccgcccggccctggagctgggcggggggctcagggcgcttcctgggcctcctcctgccggcggcctcggcgccttcccagcagtgttctggggacccacacatcctcactagtgtctccaaagcgggacgtccaagtgggcccggggctccctgccgaaggcctacctttcttatctttcccactcagaatgtctccattcacctctttattggcaggagatggggccgtggaaatttgagattggctttggctccgcacctgtttttagtgcccttgcctgtttcattctcccagcctaagtttccgtatctgtccgaagaaggggtggtttggtgttgatctccgagacccgtgtgtctcttcccatgtggaattattgtcactctcttattgcttgtttttctttg

SEQ ID NO: 284091 - DNA, 2825 bp, Homo sapiens
  misc_feature (2314)..(2314): n is a, c, g, or t
  misc_feature (2448)..(2448): n is a, c, g, or t
tttctttttctccttttctttcccaaccaggttgtcctggctcgagaactggcaacctccagagaatatgcgagtgagtatgggctgcagggagctgtgcgtccgggagcagggcaagcggctccgtgcagggcggctggggtggcagggccggtgtttctgtgctgatttcagggtacaggacactgttggctttagagaccaccaggctgttgtgtacaatgtttgaaagactttaatttgtaccagttacctttgtgagtcatgtctttagtgttttttgttgtttctgatagtaactcacttctctctcacctgaagttaaaattctggagaagcgacatatcataaaagagaacaaggtcccctatgtaaccagagagcgggatgtcatgtcgcgcctggatcaccccttctttgttaagctttacttcacatttcaggacgacgagaagctgtgtatcctttgcgtggttggtgccgtctgaagccacaccagtcacccctctcacttggaatcagaccctgtgtgttcccacaagcagcccccgctccctgccgagtggggtccctcaggccgctgacattcagggaggcagccgaggcagcgccagggtgtggctgggagtctgcacaggacgttacctcccggagaagccaccgatgtggctccagcacagtcctctctgctgcggcttgcttggtcggcgtcccttgctcccctagagctccatcttttctgttattaaaccttggctcaggaatctgggaggcaaggcccggtggaagttggggtgggccccacctctgccccatccagctgacctgtgggcctgccagtggctgggctggccacgccgcaccgtcgtcacccccagcaggtgcagtctgcatctgctcttctcctcccccgccaccctccaagctggcccaagtgtcgtggcctccccatcctgcctggggaggggcctgagtcctcccacctgtcctccccgtctctccccagcacccggctcttctgtgttagagcttcgttctggcctgctcccactctcagcaccatcctgcagctccttcggctgccggcggagtgtgtgtgctctctctgtttggaggtgcttgccaagtgcaggttgatgggtgatggggatgcgctgctatgccgggtggcgtctctgcccacgagaagcttcgattttggtggaggagctggacgtgcactgacgatccgtgtcagaggcttcccggcagcaagatgtgctgccaagagtcttagggctgggtaggggctggcggcagtgtggggctctttcagctcctgggcaggagtgtgtgggggggcatgaaaggctgtggtgggctgggcccctgagccgtggcagcctggcactgactctggacttccttctctttgtggcggggaacgtggggtttgctgtggcttctcctaggccaggcgggagaacgggcaggagagcaggggcaggggccgtggtcgaggtctgatgaacagaccggtcaagagaatggagtcaggggcagctcctgggaggtggccctcaagcctagtgcacagcggtgtctgctgctgagctgggagagaccggggcgggtgctgggctggcatttcatgcatccgctggtgccaccattcaggtctgagtgggcacttaggtgctgccagcagagctccaggaggagtcagggccgtgaggactttcacagcgagctggcaggctgcccagaggttggctcctctgtgagtggagcctgggttccccccagtgcaggggtgaacacgaggaggggcccaccgaggagaggagatggtgatgggatgttgctcccgagctcgaatgatggagacccagaggccacgggatcaaacgatttctgatggagggtgctggctgcccacgcaggggttatgaagcggtcaggtgcacacagcctgacccgtggatctgccctgtgccagttgttgatggtgggtaggcagtttcttggggggactgttcaaggaagagtaagaggtgaggaaatggaaacgacgcaaggtgcttccctgggattttgcctagggaggagcggggcagtggccgagcagctgccaggcacgtggcccggagcgggctttgctgttggtttgtggaaggttgtagagaatgctggcctccaggcaggcctgctgtcctccagtgtcatccctgttcctgcctctgtctcccactctcagtggcttcttcacggtatgttctgtctctcaccttcacgttccccggggccctgcacgtctctgcccccgtttgagccncgggagtccctctgggcttcccgcagagccgtcggaacacggctgcttgttggttgtgaggctgcaacagaattgcacacgcttgacctctcccatcctctcctcccgggggctcagagtccagaggagagtgnatcttgctgactgatttccaaatgggattggccagagcggtgcaggtagtgggaactccaggtctttgtccagtggtccatgttgcccttcatcattaagtcaaattccaaagccccgggaggttgtgaaggttcactcgcccctgacgggaacgagacccagggacttctgccccaccaggcatcctcggtgtgggttgtatttagagatgggcctggacaggggccactttgggcagccttggttgcaagtcccttcgcttctgggtttctcttcgttgccctgaagcttcaggttcatccttggtgggagatgatggtgccctggcaaacagaagtgagcaggcaggccagcctggctctgagcacgagccccc

SEQ ID NO: 284092 - DNA, 690 bp, Homo sapiens
  misc_feature (655)..(655): n is a, c, g, or t
tagagatccccggatgagtaaatcttgccgatctaatgattcttttcaccatcttgactgatgctttttatctttttcagttgtagcttctgtgtgtacttctttctggtctcgtttttcatgactttctgataaagtcagctcagaagtgtgcatagctttcattttgtgcgttaaaaatgatagattttacttcgttaaaaaacgacttagaatgacatggagatgtgaggtggtgaatccctactgtgtccagccaacacttgttgcttgtgagctttaggcctgtagccctggttgtcagcctgtaaggatcatatacattcattcgttcattttgttttcagcaaaatttagagtacgtaataatgttgctgttttaagtatttcttctcaaatgtgaaaatctgcttttacagggaccttaaaccggaaaacattttgttaaatgaagatatgcacatccagatcacagattttggaacagcaaaagtcttatccccagagagcaaacaaggtgtgtgagttttatttctagcagagcctggctctgtgcttcagatggaaagcgacttctgaggagtgtttgcattgtgtcatcttcatcaacgactgaggtggggataccttgccgttctcaaacagatcttgacgnccaattactcatcggtaccgagctcgatctattcc

SEQ ID NO: 284093 - DNA, 598 bp, Homo sapiens
atcgcggggggcggggcgtcgcgggcacagcgtgagggccgccgttgctggagttcagcttagggaaggaggacgctgaggaggccccgagccgcggagcgcttcgggggaggcgcccgcgcagacgcgaggcccatagccaggaccaccacctagctgttctacagtctggggacgacggtttaaaaatttatgccttgcatgcgatgtgcagtgggtgatggaagaacgtctacatggctttaaaattggatttaaaaggcaaatattttaaatgaaggaaaacccaagaagtttacttgattccttatcttccaggatgcgacttttgtttatttatttattttattttgatggagtctcgctgccgtcgcgcaggctggagtgcagtgacgcgatcttgacccgggaacctccacctcccgggttcaagcgattctccttcctcaaccacccgagtagctgggattacaggcgtgtgccaccatgcccggctaatttttgtgtttttagtagagaccggggaaggtatgggccctcttttgagaaaaatgcagagtgacactgaattttgtaactacatcaggaggctcttgaa

SEQ ID NO: 284094 - DNA, 363 bp, Homo sapiens
ccaccctcacacccaactggtctgaaaggatagaagcgcattagaggtgaaactggggccttggagacagagtgggaaatggactgggcttgtcgcttgtattttacacatgtctttgtttgtttgtttgtttcccctaccttaaagttcagacctttgggctcttggatgcataatataccagcttgtggcaggactcccaccattccgagctggtcgtcgacgacaagtgcgactccctggcgcaatagatatagtaccgcaagggaaagatgaaaaattataaccaagcataatatagcaaggactaacccctataccttctgcatatgaattaactagaaatacttgcaaggagtcgcc

SEQ ID NO: 284095 - DNA, 338 bp, Homo sapiens
aagtctggctcctgggggtgcatggtccgccatgtgcgacacccaccgcgcagcccttgattgtcacagatcgtgagtccgagtgtgaccttctctctcctctgcagccagggccaactcattcgtgggaacagcgcagtacgtttctccagagctgctcacggagaagtccgcctgtaagaggtaaccactttcatctaagccgtacttcccttttctttaacacagaaattaatatttgagagagtgaatttggtggcctttaagtagctaagcatacttgggaagaaattagcatttcgcattttaaggcgtattttccgtggcgtacacacacg

SEQ ID NO: 284096 - DNA, 1513 bp, Homo sapiens
ctgggcccgcttccggcgggagcggagcacggggtgatctgggcactaacgctgatggggagcagcggacatcagcctcgacctcccacgagcggtgcacgagcgcctgacccagacctcgaccctagccttcacccccaccctgactccagttcatgaactggtcaaaggaagagccatgccagcaaacgtctacactgtacatgctttttattacaagactacggagcataggaggaaaattcatcatctgtatgacgccgtgcccatccagtccagcgtggtgttatgttcctgcccatccccatcaatggtgaggacccagactgagtccagcacgccccctggcattcctggtggcagcaggcagggccccgccatggacggcactgcagccgagcctcggcccggcgccggctccctgcagcatgcccagcctccgccgcagcctcggaagaagcggcctgaggacttcaagtttgggaaaattcttggggaaggctctttttccacggttgtcctggctcgagaactggcaacctccagagaatatgcgattaaaattctggagaagcgacatatcataaaagagaacaaggtcccctatgtaaccagagagcgggatgtcatgtcgcgcctggatcaccccttctttgttaagctttacttcacatttcaggacgacgagaagctgtatttcggccttagttatgccaaaaatggagaactacttaaatatattcgcaaaatcggttcattcgatgagacctgtacccgattttacacggctgagattgtgtctgctttagagtacttgcacggcaagggcatcattcacagggaccttaaaccggaaaacattttgttaaatgaagatatgcacatccagatcacagattttggaacagcaaaagtcttatccccagagagcaaacaagccagggccaactcattcgtgggaacagcgcagtacgtttctccagagctgctcacggagaagtccgcctgtaagagttcagacctttgggctcttggatgcataatataccagcttgtggcaggactcccaccattccgagctggaaacgagtatcttatatttcagaagatcattaagttggaatatgactttccagaaaaattcttccctaaggcaagagacctcgtggagaaacttttggttttagatgccacaaagcggttaggctgtgaggaaatggaaggatacggacctcttaaagcacacccgttcttcgagtccgtcacgtgggagaacctgcaccagcagacgcctccgaagctcaccgcttacctgccggctatgtcggaagacgacgaggactgctatggcaatggtgccgctagaaccggacgccgagcacccccggcactggccccggggtcccacgtacggggcctcctgcccggcctgtcgcatctgcgcttggcttggtgcttgtacaactgtgcggccaagatgctccagaacactgcctgtctttccacagaaaaa

SEQ ID NO: 284097 - DNA, 1419 bp, Homo sapiens
atcgcggggggcggggcgtcgcgggcacagcgtgagggccgccgttgctggagttcagcttagggaaggaggacgctgaggaggccccgagccgcggagcgcttcgggggaggcgcccgcgcagacgcgaggcccatagccaggaccaccacctagctgtatgacgccgtgcccatccagtccagcgtggtgttatgttcctgcccatccccatcaatggtgaggacccagactgagtccagcacgccccctggcattcctggtggcagcaggcagggccccgccatggacggcactgcagccgagcctcggcccggcgccggctccctgcagcatgcccagcctccgccgcagcctcggaagaagcggcctgaggacttcaagtttgggaaaattcttggggaaggctctttttccacggttgtcctggctcgagaactggcaacctccagagaatatgcgattaaaattctggagaagcgacatatcataaaagagaacaaggtcccctatgtaaccagagagcgggatgtcatgtcgcgcctggatcaccccttctttgttaagctttacttcacatttcaggacgacgagaagctgtatttcggccttagttatgccaaaaatggagaactacttaaatatattcgcaaaatcggttcattcgatgagacctgtacccgattttacacggctgagattgtgtctgctttagagtacttgcacggcaagggcatcattcacagggaccttaaaccggaaaacattttgttaaatgaagatatgcacatccagatcacagattttggaacagcaaaagtcttatccccagagagcaaacaagccagggccaactcattcgtgggaacagcgcagtacgtttctccagagctgctcacggagaagtccgcctgtaagagttcagacctttgggctcttggatgcataatataccagcttgtggcaggactcccaccattccgagctggaaacgagtatcttatatttcagaagatcattaagttggaatatgactttccagaaaaattcttccctaaggcaagagacctcgtggagaaacttttggttttagatgccacaaagcggttaggctgtgaggaaatggaaggatacggacctcttaaagcacacccgttcttcgagtccgtcacgtgggagaacctgcaccagcagacgcctccgaagctcaccgcttacctgccggctatgtcggaagacgacgaggactgctatggcaatggtgccgctagaaccggacgccgagcacccccggcactggccccggggtcccacgtacggggcctcctgcccggcctgtcgcatctgcgcttggcttggtgcttgtacaactgtgcggccaagatgctccagaacactgcctgtctttccacagaaaaa

SEQ ID NO: 284098 - DNA, 1461 bp, Homo sapiens
ctgggcccgcttccggcgggagcggagcacggggtgatctgggcactaacgctgatggggagcagcggacatcagcctcgacctcccacgagcggtgcacgagcgcctgacccagacctcgaccctagccttcacccccaccctgactccagttcatgaactggtcaaaggaagagccatgccagcaaacgtctacactgtacatgctttttattacaagactacggagcataggaggaaaattcatcatctgtatgacgccgtgcccatccagtccagcgtggtgttatgttcctgcccatccccatcaatggtgaggacccagactgagtccagcacgccccctggcattcctggtggcagcaggcagggccccgccatggacggcactgcagccgagcctcggcccggcgccggctccctgcagcatgcccagcctccgccgcagcctcggaagaagcggcctgaggacttcaagtttgggaaaattcttggggaaggctctttttccacggttgtcctggctcgagaactggcaacctccagagaatatgcgattaaaattctggagaagcgacatatcataaaagagaacaaggtcccctatgtaaccagagagcgggatgtcatgtcgcgcctggatcaccccttctttgttaagctttacttcacatttcaggacgacgagaagctgtatttcggccttagttatgccaaaaatggagaactacttaaatatattcgcaaaatcggttcattcgatgagacctgtacccgattttacacggctgagattgtgtctgctttagagtacttgcacggcaagggcatcattcacagggaccttaaaccggaaaacattttgttaaatgaagatatgcacatccagatcacagattttggaacagcaaaagtcttatccccagagagcaaacaagccagggccaactcattcgtgggaacagcgcagtacgtttctccagagctgctcacggagaagtccgcctgtaagagttcagacctttgggctcttggatgcataatataccagcttgtggcaggactcccaccattccgagctggaaacgagtatcttatatttcagaagatcattaagttggaatatgactttccagaaaaattcttccctaaggcaagagacctcgtggagaaacttttggttttagatgccacaaagcggttaggctgtgaggaaatggaaggatacggacctcttaaagcacacccgttcttcgagtccgtcacgtgggagaacctgcaccagcagacgcctccgaagctcaccgcttacctgccggctatgtcggaagacgacgaggactgctatggcaattatgacaatctcctgagccagtttggctgcatgcaggtgtcttcgtcctcctcctcacactccctgtcagactccgacacgggcctgacccagaggtcaggcagcaa

SEQ ID NO: 284099 - DNA, 1111 bp, Homo sapiens
  misc_feature (1076)..(1076): n is a, c, g, or t
ctgggcccgcttccggcgggagcggagcacggggtgatctgggcactaacgctgatggggagcagcggacatcagcctcgacctcccacgagcggtgcacgagcgcctgacccagacctcgaccctagccttcacccccaccctgactccagttcatgaactggtcaaaggaagagccatgccagcaaacgtctacactgtacatgctttttattacaagactacggagcataggaggaaaattcatcatctgtatgacgccgtgcccatccagtccagcgtggtgttatgttcctgcccatccccatcaatggtgaggacccagactgagtccagcacgccccctggcattcctggtggcagcaggcagggccccgccatggacggcactgcagccgagcctcggcccggcgccggctccctgcagcatgcccagcctccgccgcagcctcggaagaagcggcctgaggacttcaagtttgggaaaattcttggggaaggctctttttccacggttgtcctggctcgagaactggcaacctccagagaatatgcgattaaaattctggagaagcgacatatcataaaagagaacaaggtcccctatgtaaccagagagcgggatgtcatgtcgcgcctggatcaccccttctttgttaagctttacttcacatttcaggacgacgagaagctgtatttcggccttagttatgccaaaaatggagaactacttaaatatattcgcaaaatcggttcattcgatgagacctgtacccgattttacacggctgagattgtgtctgctttagagtacttgcacggcaagggcatcattcacagggaccttaaaccggaaaacattttgttaaatgaagatatgcacatccagatcacagattttggaacagcaaaagtcttatccccagagagcaaacaaggtgtgtgagttttatttctagcagagcctggctctgtgcttcagatggaaagcgacttctgaggagtgtttgcattgtgtcatcttcatcaacgactgaggtggggataccttgccgttctcaaacagatcttgacgnccaattactcatcggtaccgagctcgatctattcc

SEQ ID NO: 284100 - DNA, 1416 bp, Homo sapiens
atcgcggggggcggggcgtcgcgggcacagcgtgagggccgccgttgctggagttcagcttagggaaggaggacgctgaggaggccccgagccgcggagcgcttcgggggaggcgcccgcgcagacgcgaggcccatagccaggaccaccacctagctggaaaagaactacagcctgtgtgggtcccctcccgacaattaaaattgcaccataactccaaagatgaaacgctcccagaaagaaaaggcaaagacccatcggaaacaaaagagcaactttcaccgcctgatacatacacttcatgacatccacattgagacaaaatctcgccgtgtgacctacaacacctctcgttcaaccccacctacttggggtcgaatacagattttatctcatcaaacagaaaaattcttaacagaaaaaggaatcccaaaaatgactggtaatataattctggctgcctttatggtagtcagtgcagcgtctgcagatgcctctaaggagtccgaaaccaagtccgaagtcaacaacaagcaatgatggcgatggcgattctagttaataaaaaggggggagatgtgggcggcaagccacccaggcaccgaggcaagagacagaggacacgagctgttccagtataataaaatataaaacaagaatagttataccagatatagatcttagatatgattatatacgaatatcattaatcatgagtttgtagcaattactttttattccaatattatgataatcctcgctctataatcatagcctaggaaaaaccaggccatacagagataggagctgaggggacatagtgaagtgtgaccagaagacaagagtgcgagccttctgttatgcccggacagggccaccagagggctccttggtctagcggtgacgccagcgtctgggaagacacccgttaccaggcggatcgtggcccagccgtagcaaaaggtgtcaaggaacaccttttgcaaaaggtgtcaacacccgctacttagcagactgggaaaggggggcggtctccctttccccgggggagtttagagaagactctgttcctccacctcttgtggagggcctgacatcagtcaggcttgcccgtagttatccggaggcctaactgtctccctgtgatgctgtgcttcagtggtcacgctcctagtctgccttcattttccatcctgtacacctggctctgccttctagatagcagtagtaaattagtgctgtctcctctccctctctgcctcggctgccaggcagggaagggccccctgtccagtggacacatgacccatgtgaccttacctatcattggaggtgactcacattctttaccctgccccttctggcttgtatccaataacagcgcagtcagacattcagggccactaccggtctccg

SEQ ID NO: 284101 - DNA, 730 bp, Homo sapiens
  misc_feature (693)..(693): n is a, c, g, or t
tagagatccccggatgagtaaatcttgccgatctaatgattcttttcaccatcttgactgatgctttttatctttttcagttgtagcttctgtgtgtacttctttctggtctcgtttttcatgactttctgataaagtcagctcagaagtgtgcatagctttcattttgtgcgttaaaaatgatagattttacttcgttaaaaaacgacttagaatgacatggagatgtgaggtggtgaatccctactgtgtccagccaacacttgttgcttgtgagctttaggcctgtagccctggttgtcagcctgtaaggatcatatacattcattcgttcattttgttttcagcaaaatttagagtacgtaataatgttgctgttttaagtatttcttctcaaatgtgaaaatctgcttttacagccacccggggtgcagattgtggattgtggggtaacggcaggtgggaagagggatgaggaaaacgtcacataccgggtatgtggtacacgtggtgcagtccaggcaacacagggaatcaaggctctgctgagagtcaagagccaaggcttgaacccaggctccccatactctctgcagaccagaccgcctcaaatgggttccagaaaacatcagacccagcaagactgcttaatggaaaaacatgtctcgtggtcaaataagacgaatgctgcgntattaaatcctgcttctgcagaacccacgcggatcta

SEQ ID NO: 284102 - DNA, 722 bp, Homo sapiens
atacagagataggagctgaggggacatagtgaagtgtgaccagaagacaagagtgcgagccttctgttatgcccggacagggccaccagagggctccttggtctagcggtgacgccagcgtctgggaagacacccgttaccaggcggatcgtggcccagccgtagcaaaaggtgtcaaggaacaccttttgcaaaaggtgtcaacacccgctacttagcagactgggaaaggggggcggtctccctttccccgggggagtttagagaagactctgttcctccacctcttgtggagggcctgacatcagtcaggcttgcccgtagttatccggaggcctaactgtctccctgtgatgctgtgcttcagtggtcacgctcctagtctgccttcattttccatcctgtacacctggctctgccttctagatagcagtagtaaattagtgaaaatactaatagtccctgatatgcagaaataatggcataagctgtctttctctctgtctcctctccctctctgcctcggctgccaggcagggaagggccccctgtccagtggacacatgacccatgtgaccttacctatcattggaggtgactcacattctttaccctgccccttctggcttgtatccaataacagcgcagtcagacattcagggccactaccggtctccgcacattggtggtagtggtcccccgggcccagctgccttttctct

SEQ ID NO: 284103 - DNA, 1201 bp, Homo sapiens
cacaggtattgctcctcctagaccaaaaattattcatcccttttttaccccagaacatcctgaactatggaaattagctgcagctttgtcgggaataaagatatggaacactacctatcagctccttcgtactaaaaccaaaacacccacattcaacatcacccttatttctgaatgggtgatacccattaggagctgtgtcaaacccccttacatgctgttggttggaaatataattatgatgcctgatgcacaaactatagaatgtcataactgtaagctgttcacttgcattgatgcaacttttaatcccactacaagtattctcttggtaagggctagggagggggtatggataccagtttctctacatcgtccatgggagtcttccccctctattcacatagtcaatgaagttcttaaagacatcctcaaaagaacaaagagatttatttttactcttattgcagtccttgcaggactacttgcggttactgcaacagcagcaactgctggagttgccatccgcagttctgttcaaactgctcactatgttgaagcatgccagaaaaattcctccagactttggaattctcaggcgcaaattgatcaaaaattagctaatcagattaatgatctccgccaaagtgtaacctggctgggagatagagttatgaacttgcaacaccgtatgcaattacagtgtgattggaatacttctgattattgcataacgccttatgcttataatcaagatcaacatagctgggaaaatgtctcaagacatttaaaagcctgggatgataacttaaccttggatatttcacaacttaaagagcaaatctttgaggcttcacaagcccatttatccacagttcctggctcacacatttttgaaggcataactaaacaattacctgattttaatcccttcaaatggctcaaacccgtcagaggatcattgttgttactggcattattaatattggtatgcttatgttgtctccttttagtctgcagatgcctctaaggagtccgaaaccaagtccgaagtcaacaacaagcaatgatggcgatggcgattctagttaataaaaaggggggagatgtgggcggcaagccacccaggcaccgaggcaagagacagaggacacgagctgttccagtataataaaatataaaacaagaatagttataccag

SEQ ID NO: 284104 - DNA, 1206 bp, Homo sapiens
ctgggcccgcttccggcgggagcggagcacggggtgatctgggcactaacgctgatggggagcagcggacatcagcctcgacctcccacgagcggtgcacgagcgcctgacccagacctcgaccctagccttcacccccaccctgactccagttcatgaactggtcaaaggaagagccatgccagcaaacgtctacactgtacatgctttttattacaagactacggagcataggaggaaaattcatcatctgtatgacgccgtgcccatccagtccagcgtggtgttatgttcctgcccatccccatcaatggtgaggacccagactgagtccagcacgccccctggcattcctggtggcagcaggcagggccccgccatggacggcactgcagccgagcctcggcccggcgccggctccctgcagcatgcccagcctccgccgcagcctcggaagaagcggcctgaggacttcaagtttgggaaaattcttggggaaggctctttttccacggttgtcctggctcgagaactggcaacctccagagaatatgcgattaaaattctggagaagcgacatatcataaaagagaacaaggtcccctatgtaaccagagagcgggatgtcatgtcgcgcctggatcaccccttctttgttaagctttacttcacatttcaggacgacgagaagctgtatttcggccttagttatgccaaaaatggagaactacttaaatatattcgcaaaatcggttcattcgatgagacctgtacccgattttacacggctgagattgtgtctgctttagagtacttgcacggcaagggcatcattcacagggaccttaaaccggaaaacattttgttaaatgaagatatgcacatccagatcacagattttggaacagcaaaagtcttatccccagagagcaaacaagtttgttgaagaaacaagtcatttgcatctgtgtggcgttgttgaacatggtcctctctcctggccactacatcacattcagagttgattctcccctccctgttcagagactggtggtgggtgttctttatccggcatctctctgtgacagcagcagcatttgtggccataattggcctaaattcatgaactcattagagagtgcagaaaggtcacagcctgatacattcatgagatgcaattcattaaagagcaacttctccccagca

SEQ ID NO: 284105 - DNA, 1946 bp, Homo sapiens
cacaggtattgctcctcctagaccaaaaattattcatcccttttttaccccagaacatcctgaactatggaaattagctgcagctttgtcgggaataaagatatggaacactacctatcagctccttcgtactaaaaccaaaacacccacattcaacatcacccttatttctgaatgggtgatacccattaggagctgtgtcaaacccccttacatgctgttggttggaaatataattatgatgcctgatgcacaaactatagaatgtcataactgtaagctgttcacttgcattgatgcaacttttaatcccactacaagtattctcttggtaagggctagggagggggtatggataccagtttctctacatcgtccatgggagtcttccccctctattcacatagtcaatgaagttcttaaagacatcctcaaaagaacaaagagatttatttttactcttattgcagtccttgcaggactacttgcggttactgcaacagcagcaactgctggagttgccatccgcagttctgttcaaactgctcactatgttgaagcatgccagaaaaattcctccagactttggaattctcaggcgcaaattgatcaaaaattagctaatcagattaatgatctccgccaaagtgtaacctggctgggagatagagttatgaacttgcaacaccgtatgcaattacagtgtgattggaatacttctgattattgcataacgccttatgcttataatcaagatcaacatagctgggaaaatgtctcaagacatttaaaagcctgggatgataacttaaccttggatatttcacaacttaaagagcaaatctttgaggcttcacaagcccatttatccacagttcctggctcacacatttttgaaggcataactaaacaattacctgattttaatcccttcaaatggctcaaacccgtcagaggatcattgttgttactggcattattaatattggtatgcttatgttgtctccttttagtctgcagatgcctctaaggagtccgaaaccaagtccgaagtcaacaacaagcaatgatggcgatggcgattctagttaataaaaaggggggagatgtgggcggcaagccacccaggcaccgaggcaagagacagaggacacgagctgttccagtataataaaatataaaacaagaatagttataccagatatagatcttagatatgattatatacgaatatcattaatcatgagtttgtagcaattactttttattccaatattatgataatcctcgctctataatcatagcctaggaaaaaccaggccatacagagataggagctgaggggacatagtgaagtgtgaccagaagacaagagtgcgagccttctgttatgcccggacagggccaccagagggctccttggtctagcggtgacgccagcgtctgggaagacacccgttaccaggcggatcgtggcccagccgtagcaaaaggtgtcaaggaacaccttttgcaaaaggtgtcaacacccgctacttagcagactgggaaaggggggcggtctccctttccccgggggagtttagagaagactctgttcctccacctcttgtggagggcctgacatcagtcaggcttgcccgtagttatccggaggcctaactgtctccctgtgatgctgtgcttcagtggtcacgctcctagtctgccttcattttccatcctgtacacctggctctgccttctagatagcagtagtaaattagtgctgtctcctctccctctctgcctcggctgccaggcagggaagggccccctgtccagtggacacatgacccatgtgaccttacctatcattggaggtgactcacattctttaccctgccccttctggcttgtatccaataacagcgcagtcagacattcagggccactaccggtctccg

SEQ ID NO: 284106 - DNA, 420 bp, Homo sapiens
cgctcaccccggggcgcgccgaggccaccgcagggcacttacttggcacttgcttttgagtgtgcagatcgtcgcggttttcacttgggttttcaaacaagtttcagggagaaagaaggaggcaaaaaaaaaaaatccaattatgcaaatggactccggactgggaggcgcgggatggatctgacgccgctactgtacgagttctcggagcagccccgggccgggcagatttatgggggcgcgtcacggctacgccaggtcccgccgccggagcatctcgaagttaattaaagcggtgctagtggagaggttaaactgctggagaactgtagtttccatcccagcaccaaaagaacagagtccagagttttcaggggccaccaagaggagccagagaagggtgccaacacagtccgtggc

SEQ ID NO: 284107 - DNA, 636 bp, Homo sapiens
gagaacaacggaggcagaggagctgaagactccagtatgcaactgactacaaggagacagaaggctgaggccggggtgctagagaaccttgccgtgctggaattcacgttgacgcccccacggagctctgctgcagagccctcgagtcccgcacttccggccgccaggtggcgctggttctgttgccaactcggagagactgagctgggccacgcaagatggcgccgtccgccttgctgcgtcccctttcccggctgctggcccccgccaggctcccgagcggcccttcagtgcgatcaaagttctacgtgcgagagccgccgaatgccaaacctgactggctgaaagttgggttcaccttgggcaccactgtcttcttgtggatctatctcatcaaacaacacaatgaagatattttagagtacaaaagaagaaatgggctggaataaacttttgaaacactaatgtagtatgctccgtatagtgattgtagctgttcctctggattcaccatctgttgagttgtaaatgtgagagaaaaagttatatgtgaatatatatcaagccagcatttgtattttgcatcattaaataaaaagaaataaaaatacttctgtattcttcagataaagcata

SEQ ID NO: 284108 - DNA, 2163 bp, Homo sapiens
gagaacaacggaggcagaggagctgaagactccagtatgcaactgactacaaggaggtagtcgtttgaaaagctttctttccttctctgaactccttctttccctcctctcaggtcattgggtgaccccgggccgggcggagacaggtgaatcccaagagaggaggaagagggagggacagatgatggagggagaaccgcgtttaggcaatgaatgagcctgctgcatccgcaccacctgttccttccaagggtgccaccccgacctgccagcagggttcccacaccaaccgggccgcgactcctgccggtgtcgcccacttgcccgccaaaggccgggcctcttctcccccagatcggggagaatgagaaccggcagtctagaagccgggaggtcggggcctagtccggaaccagggcctcaagcgtggggatggaatgaagaagcctgtggtccctggcgcgcgggccatagtaggaaccacagagagggagcaaagcaatgcattcggcctgacgagagctatgaaggcggggtcccgggcgggagtggctcagtgcccgccgggccgaggttaggggtgacaggcccggttaccggctaaatcctccccaccgcttgcccggagcctcacacttaccaagatccgcttgaagagcgcattctccttgggcgggaggctcacggccggcatcgttccggctgctcccgctgctcccgccaccacccggctcggtcagtcagtttgtccgaccgccgccgctgccgttccgtagctgcttcagccttgaatatctcgatccgccgccaccaccaggcctcgggtgtcgccgcgttgccctacccggacacctcctttttcctcgttgtcttttttcctttctcacttaacgctgccgccgcctcccccactacgggtctccgtcggcggttcacgtggtaactgaacagaccgacagaggcagccaaaatggcggacgcggagggttttcccacccgggtcacgcttcctaacacgcaggcgcggtgacctcctttccccacctcctctgggtttcggagcttgccgggaaacctggaggctggcctgcctgtggaggccgggagggtcggggcaggccccgcccatcatttcagtgcgtggtgccctcgaagcgcccgcggagctacgggaggctaggcaagtacggttcagaccgcctcctcatcaaaaacagcctctctggcgccttcctgctagatcgacctttcattccttggaaagagtctcgcacactgtgtgatcatcgtttgagcccaaagtgctaaaatacaggtgtaggtgtttgagaagcgctgtagttgattatggacgaaatgcctaatttaaggagcagaggcggagtggaaaatgaaaaaagcttcaccgcagtggagacttgttaacagccctggggagaaaggggcttaacagagtctggaaatcgtgaaagagcttgaccgatgaaatgggcctggctgtcgtatcggtaatttggtgaatgttgcttaagatcagcctggaaaggtagttagtcagatccgaagtgacatatttgcactgccaaaggaggctctggaggttaaagtatgtgttttaatttcgttgttgaggccatataatgcagagttgacggaccgaccttatgagtcaccttggagcggagtagtggagacttaaagacagactaccctggagctggcttcaaactagttcttaatattgtgactcgaactccccatccccagaaattctcagatcttagaagccaaagactggcaaggatactagagggaactactcgagtaggcgaggtcagactacataccgaataggagtccttccaaaaatgtaagtcatttcattaacagctgaccgtaaaactttttcaaagtggcattccattgatctaaaaattttcaagttatatgagccacttttaacctttggtttttgattacctctttccaaatcctgatttcactctgtagcattctttgcatcatgaattattaaacaatatgtgcgtgttttttactgttttaaatttatttgcaaagatattttaattttcaaacttctcttaactgtccctgaaaggtgtgagttgagatacatgtttcccaatataaacttgggttttg

SEQ ID NO: 284109 - DNA, 2509 bp, Homo sapiens
gagaacaacggaggcagaggagctgaagactccagtatgcaactgactacaaggaggtagtcgtttgaaaagctttctttccttctctgaactccttctttccctcctctcaggtcattgggtgaccccgggccgggcggagacaggtgaatcccaagagaggaggaagagggagggacagatgatggagggagaaccgcgtttaggcaatgaatgagcctgctgcatccgcaccacctgttccttccaagggtgccaccccgacctgccagcagggttcccacaccaaccgggccgcgactcctgccggtgtcgcccacttgcccgccaaaggccgggcctcttctcccccagatcggggagaatgagaaccggcagtctagaagccgggaggtcggggcctagtccggaaccagggcctcaagcgtggggatggaatgaagaagcctgtggtccctggcgcgcgggccatagtaggaaccacagagagggagcaaagcaatgcattcggcctgacgagagctatgaaggcggggtcccgggcgggagtggctcagtgcccgccgggccgaggttaggggtgacaggcccggttaccggctaaatcctccccaccgcttgcccggagcctcacacttaccaagatccgcttgaagagcgcattctccttgggcgggaggctcacggccggcatcgttccggctgctcccgctgctcccgccaccacccggctcggtcagtcagtttgtccgaccgccgccgctgccgttccgtagctgcttcagccttgaatatctcgatccgccgccaccaccaggcctcgggtgtcgccgcgttgccctacccggacacctcctttttcctcgttgtcttttttcctttctcacttaacgctgccgccgcctcccccactacgggtctccgtcggcggttcacgtggtaactgaacagaccgacagaggcagccaaaatggcggacgcggagggttttcccacccgggtcacgcttcctaacacgcaggcgcggtgacctcctttccccacctcctctgggtttcggagcttgccgggaaacctggaggctggcctgcctgtggaggccgggagggtcggggcaggccccgcccatcatttcagtgcgtggtgccctcgaagcgcccgcggagctacgggaggctaggcaagtacggttcagaccgcctcctcatcaaaaacagcctctctggcgccttcctgctagatcgacctttcattccttggaaagagtctcgcacactgtgtgatcatcgtttgagcccaaagtgctaaaatacaggtgtaggtgtttgagaagcgctgtagttgattatggacgaaatgcctaatttaaggagcagaggcggagtggaaaatgaaaaaagcttcaccgcagtggagacttgttaacagccctggggagaaaggggcttaacagagtctggaaatcgtgaaagagcttgaccgatgaaatgggcctggctgtcgtatcggtaatttggtgaatgttgcttaagatcagcctggaaaggtagttagtcagatccgaagtgacatatttgcactgccaaaggaggctctggaggttaaagtatgtgttttaatttcgttgttgaggccatataatgcagagttgacggaccgaccttatgagtcaccttggagcggagtagtggagacttaaagacagactaccctggagctggcttcaaactagttcttaatattgtgactcgaactccccatccccagaaattctcagatcttagaagccaaagactggcaaggatactagagggaactactcgagtaggcgaggtcagactacataccgaataggagtccttccaaaaatatgcagtttcacatacagctgggtactccaagtgtacagttcccatcagctctaatatgacagaaggctgaggccggggtgctagagaaccttgccgtgctggaattcacgttgacgcccccacggagctctgctgcagagccctcgagtcccgcacttccggccgccaggtggcgctggttctgttgccaactcggagagactgagctgggccacgcaagatggcgccgtccgccttgctgcgtcccctttcccggctgctggcccccgccaggctcccgagcggcccttcagtgcgatcaaagttctacgtgcgagagccgccgaatgccaaacctgactggctgaaagttgggttcaccttgggcaccactgtcttcttgtggatctatctcatcaaacaacacaatgaagatattttagagtacaaaagaagaaatgggctggaataaacttttgaaacactaatgtagtatgctccgtatagtgattgtagctgttcctctggattcaccatctgttgagttgtaaatgtgagagaaaaagttatatgtgaatatatatcaagccagcatttgtattttgcatcattaaataaaaagaaataaaaatacttctgtattcttcagataaagcata

SEQ ID NO: 284110 - DNA, 1093 bp, Homo sapiens
gtggatcccggggtgctgtgacggaattggaaaatgaaaaaagcttcaccgcagtggagacttgttaacagccctggggagaaaggggcttaacagagtctggaaatcgtgaaagagcttgaccgatgaaatgggcctggctgtcgtatcggtaatttggtgaatgttgcttaagatcagcctggaaaggtagttagtcagatccgaagtgacatatttgcactgccaaaggaggctctggaggttaaagtatgtgttttaatttcgttgttgaggccatataatgcagagttgacggaccgaccttatgagtcaccttggagcggagtagtggagacttaaagacagactaccctggagctggcttcaaactagttcttaatattgtgactcgaactccccatccccagaaattctcagatcttagaagccaaagactggcaaggatactagagggaactactcgagtaggcgaggtcagactacataccgaataggagtccttccaaaaatacagaaggctgaggccggggtgctagagaaccttgccgtgctggaattcacgttgacgcccccacggagctctgctgcagagccctcgagtcccgcacttccggccgccaggtggcgctggttctgttgccaactcggagagactgagctgggccacgcaagatggcgccgtccgccttgctgcgtcccctttcccggctgctggcccccgccaggctcccgagcggcccttcagtgcgatcaaagttctacgtgcgagagccgccgaatgccaaacctgactggctgaaagttgggttcaccttgggcaccactgtcttcttgtggatctatctcatcaaacaacacaatgaagatattttagagtacaaaagaagaaatgggctggaataaacttttgaaacactaatgtagtatgctccgtatagtgattgtagctgttcctctggattcaccatctgttgagttgtaaatgtgagagaaaaagttatatgtgaatatatatcaagccagcatttgtattttgcatcattaaataaaaagaaataaaaatacttctgtattcttcagataaagcata

SEQ ID NO: 284111 - DNA, 1760 bp, Homo sapiens
gagaacaacggaggcagaggagctgaagactccagtatgcaactgactacaaggaggtagtcgtttgaaaagctttctttccttctctgaactccttctttccctcctctcaggtcattgggtgaccccgggccgggcggagacaggtgaatcccaagagaggaggaagagggagggacagatgatggagggagaaccgcgtttaggcaatgaatgagcctgctgcatccgcaccacctgttccttccaagggtgccaccccgacctgccagcagggttcccacaccaaccgggccgcgactcctgccggtgtcgcccacttgcccgccaaaggccgggcctcttctcccccagatcggggagaatgagaaccggcagtctagaagccgggaggtcggggcctagtccggaaccagggcctcaagcgtggggatggaatgaagaagcctgtggtccctggcgcgcgggccatagtaggaaccacagagagggagcaaagcaatgcattcggcctgacgagagctatgaaggcggggtcccgggcgggagtggctcagtgcccgccgggccgaggttaggggtgacaggcccggttaccggctaaatcctccccaccgcttgcccggagcctcacacttaccaagatccgcttgaagagcgcattctccttgggcgggaggctcacggccggcatcgttccggctgctcccgctgctcccgccaccacccggctcggtcagtcagtttgtccgaccgccgccgctgccgttccgtagctgcttcagccttgaatatctcgatccgccgccaccaccaggcctcgggtgtcgccgcgttgccctacccggacacctcctttttcctcgttgtcttttttcctttctcacttaacgctgccgccgcctcccccactacgggtctccgtcggcggttcacgtggtaactgaacagaccgacagaggcagccaaaatggcggacgcggagggttttcccacccgggtcacgcttcctaacacgcaggcgcggtgacctcctttccccacctcctctgggtttcggagcttgccgggaaacctggaggctggcctgcctgtggaggccgggagggtcggggcaggccccgcccatcatttcagtgcgtggtgccctcgaagcgcccgcggagctacgggaggctagacagaaggctgaggccggggtgctagagaaccttgccgtgctggaattcacgttgacgcccccacggagctctgctgcagagccctcgagtcccgcacttccggccgccaggtggcgctggttctgttgccaactcggagagactgagctgggccacgcaagatggcgccgtccgccttgctgcgtcccctttcccggctgctggcccccgccaggctcccgagcggcccttcagtgcgatcaaagttctacgtgcgagagccgccgaatgccaaacctgactggctgaaagttgggttcaccttgggcaccactgtcttcttgtggatctatctcatcaaacaacacaatgaagatattttagagtacaaaagaagaaatgggctggaataaacttttgaaacactaatgtagtatgctccgtatagtgattgtagctgttcctctggattcaccatctgttgagttgtaaatgtgagagaaaaagttatatgtgaatatatatcaagccagcatttgtattttgcatcattaaataaaaagaaataaaaatacttctgtattcttcagataaagcata

SEQ ID NO: 284112 - DNA, 413 bp, Homo sapiens
  misc_feature (11)..(12): n is a, c, g, or t
gcccacgcccnnttttttgtgccccctttccgggtgtggtgcccccgcggtttccagagcgccttcagtgcgatcaaagttctacgtgcgagagccgccgaatgccaaacctgactggctgaaagttgggttcaccttgggcaccactgtcttcttgtggatctatctcatcaaacaacacaatgaagatattttagagtacaaaagaagaaatgggctggaataaacttttgaaacactaatgtagtatgctccgtatagtgattgtagctgttcctctggattcaccatctgttgagttgtaaatgtgagagaaaaagttatatgtgaatatatatcaagccagcatttgtattttgcatcattaaataaaaagaaataaaaatacttctgtattcttcagataaagcata

SEQ ID NO: 284113 - DNA, 2348 bp, Homo sapiens
gagaacaacggaggcagaggagctgaagactccagtatgcaactgactacaaggaggtagtcgtttgaaaagctttctttccttctctgaactccttctttccctcctctcaggtcattgggtgaccccgggccgggcggagacaggtgaatcccaagagaggaggaagagggagggacagatgatggagggagaaccgcgtttaggcaatgaatgagcctgctgcatccgcaccacctgttccttccaagggtgccaccccgacctgccagcagggttcccacaccaaccgggccgcgactcctgccggtgtcgcccacttgcccgccaaaggccgggcctcttctcccccagatcggggagaatgagaaccggcagtctagaagccgggaggtcggggcctagtccggaaccagggcctcaagcgtggggatggaatgaagaagcctgtggtccctggcgcgcgggccatagtaggaaccacagagagggagcaaagcaatgcattcggcctgacgagagctatgaaggcggggtcccgggcgggagtggctcagtgcccgccgggccgaggttaggggtgacaggcccggttaccggctaaatcctccccaccgcttgcccggagcctcacacttaccaagatccgcttgaagagcgcattctccttgggcgggaggctcacggccggcatcgttccggctgctcccgctgctcccgccaccacccggctcggtcagtcagtttgtccgaccgccgccgctgccgttccgtagctgcttcagccttgaatatctcgatccgccgccaccaccaggcctcgggtgtcgccgcgttgccctacccggacacctcctttttcctcgttgtcttttttcctttctcacttaacgctgccgccgcctcccccactacgggtctccgtcggcggttcacgtggtaactgaacagaccgacagaggcagccaaaatggcggacgcggagggttttcccacccgggtcacgcttcctaacacgcaggcgcggtgacctcctttccccacctcctctgggtttcggagcttgccgggaaacctggaggctggcctgcctgtggaggccgggagggtcggggcaggccccgcccatcatttcagtgcgtggtgccctcgaagcgcccgcggagctacgggaggctaggcaagtacggttcagaccgcctcctcatcaaaaacagcctctctggcgccttcctgctagatcgacctttcattccttggaaagagtctcgcacactgtgtgatcatcgtttgagcccaaagtgctaaaatacaggtgtaggtgtttgagaagcgctgtagttgattatggacgaaatgcctaatttaaggagcagaggcggagtggaaaatgaaaaaagcttcaccgcagtggagacttgttaacagccctggggagaaaggggcttaacagagtctggaaatcgtgaaagagcttgaccgatgaaatgggcctggctgtcgtatcggtaatttggtgaatgttgcttaagatcagcctggaaaggtagttagtcagatccgaagtgacatatttgcactgccaaaggaggctctggaggttaaagtatgtgttttaatttcgttgttgaggccatataatgcagagttgacggaccgaccttatgagtcaccttggagcggagtagtggagacttaaagacagactaccctggagctggcttcaaactagttcttaatattgtgactcgaactccccatccccagaaattctcagatcttagaagccaaagactggcaaggatactagagggaactactcgagtaggcgaggtcagactacataccgaataggagtccttccaaaaatacagaaggctgaggccggggtgctagagaaccttgccgtgctggaattcacgttgacgcccccacggagctctgctgcagagccctcgagtcccgcacttccggccgccaggtggcgctggttctgttgccaactcggagagactgagctgggccacgcaagatggcgccgtccgccttgctgcgtcccctttcccggctgctggcccccgccaggctcccgagcggcccttcagtgcgatcaaagttctacgtgcgagagccgccgaatgccaaacctgactggctgaaagttgggttcaccttgggcaccactgtcttcttgtggatctatctcatcaaacaacacaatgaagatattttagagtacaaaagaagaaatgggctggaataaacttttgaaacactaatgtagtatgctccgtatagtgattgtagctgttgtaagctggagctgtaacacgggccgagctcgatga

SEQ ID NO: 284114 - DNA, 446 bp, Homo sapiens
ggccctcggggcccaaggaattcgcaagatggcgccgtccgccttgctgcgtcccctttcccggctgctggcccccgccaggctcccgagcggcccttcagtgcgatcaaagttctacgtgcgagagccgccgaatgccaaacctgactggctgaaagttgggttcaccttgggcaccactgtcttcttgtggatctatctcatcaaacaacacaatgaagatattttagagtacaaaagaagaaatgggctggaataaacttttgaaacactaatgtagtatgctccgtatagtgattgtagctgttcctctggattcaccatctgttgagttgtaaatgtgagagaaaaagttatatgtgaatatatatcaagccagcatttgtattttgcatcattaaataaaaagaaataaaaatacttctgtattcttcagataaagcata

SEQ ID NO: 284115 - DNA, 2450 bp, Homo sapiens
gagaacaacggaggcagaggagctgaagactccagtatgcaactgactacaaggaggtagtcgtttgaaaagctttctttccttctctgaactccttctttccctcctctcaggtcattgggtgaccccgggccgggcggagacaggtgaatcccaagagaggaggaagagggagggacagatgatggagggagaaccgcgtttaggcaatgaatgagcctgctgcatccgcaccacctgttccttccaagggtgccaccccgacctgccagcagggttcccacaccaaccgggccgcgactcctgccggtgtcgcccacttgcccgccaaaggccgggcctcttctcccccagatcggggagaatgagaaccggcagtctagaagccgggaggtcggggcctagtccggaaccagggcctcaagcgtggggatggaatgaagaagcctgtggtccctggcgcgcgggccatagtaggaaccacagagagggagcaaagcaatgcattcggcctgacgagagctatgaaggcggggtcccgggcgggagtggctcagtgcccgccgggccgaggttaggggtgacaggcccggttaccggctaaatcctccccaccgcttgcccggagcctcacacttaccaagatccgcttgaagagcgcattctccttgggcgggaggctcacggccggcatcgttccggctgctcccgctgctcccgccaccacccggctcggtcagtcagtttgtccgaccgccgccgctgccgttccgtagctgcttcagccttgaatatctcgatccgccgccaccaccaggcctcgggtgtcgccgcgttgccctacccggacacctcctttttcctcgttgtcttttttcctttctcacttaacgctgccgccgcctcccccactacgggtctccgtcggcggttcacgtggtaactgaacagaccgacagaggcagccaaaatggcggacgcggagggttttcccacccgggtcacgcttcctaacacgcaggcgcggtgacctcctttccccacctcctctgggtttcggagcttgccgggaaacctggaggctggcctgcctgtggaggccgggagggtcggggcaggccccgcccatcatttcagtgcgtggtgccctcgaagcgcccgcggagctacgggaggctaggcaagtacggttcagaccgcctcctcatcaaaaacagcctctctggcgccttcctgctagatcgacctttcattccttggaaagagtctcgcacactgtgtgatcatcgtttgagcccaaagtgctaaaatacaggtgtaggtgtttgagaagcgctgtagttgattatggacgaaatgcctaatttaaggagcagaggcggagtggaaaatgaaaaaagcttcaccgcagtggagacttgttaacagccctggggagaaaggggcttaacagagtctggaaatcgtgaaagagcttgaccgatgaaatgggcctggctgtcgtatcggtaatttggtgaatgttgcttaagatcagcctggaaaggtagttagtcagatccgaagtgacatatttgcactgccaaaggaggctctggaggttaaagtatgtgttttaatttcgttgttgaggccatataatgcagagttgacggaccgaccttatgagtcaccttggagcggagtagtggagacttaaagacagactaccctggagctggcttcaaactagttcttaatattgtgactcgaactccccatccccagaaattctcagatcttagaagccaaagactggcaaggatactagagggaactactcgagtaggcgaggtcagactacataccgaataggagtccttccaaaaatacagaaggctgaggccggggtgctagagaaccttgccgtgctggaattcacgttgacgcccccacggagctctgctgcagagccctcgagtcccgcacttccggccgccaggtggcgctggttctgttgccaactcggagagactgagctgggccacgcaagatggcgccgtccgccttgctgcgtcccctttcccggctgctggcccccgccaggctcccgagcggcccttcagtgcgatcaaagttctacgtgcgagagccgccgaatgccaaacctgactggctgaaagttgggttcaccttgggcaccactgtcttcttgtggatctatctcatcaaacaacacaatgaagatattttagagtacaaaagaagaaatgggctggaataaacttttgaaacactaatgtagtatgctccgtatagtgattgtagctgttcctctggattcaccatctgttgagttgtaaatgtgagagaaaaagttatatgtgaatatatatcaagccagcatttgtattttgcatcattaaataaaaagaaataaaaatacttctgtattcttcagataaagcata

SEQ ID NO: 284116 - DNA, 2088 bp, Homo sapiens
gagaacaacggaggcagaggagctgaagactccagtatgcaactgactacaaggaggtagtcgtttgaaaagctttctttccttctctgaactccttctttccctcctctcaggtcattgggtgaccccgggccgggcggagacaggtgaatcccaagagaggaggaagagggagggacagatgatggagggagaaccgcgtttaggcaatgaatgagcctgctgcatccgcaccacctgttccttccaagggtgccaccccgacctgccagcagggttcccacaccaaccgggccgcgactcctgccggtgtcgcccacttgcccgccaaaggccgggcctcttctcccccagatcggggagaatgagaaccggcagtctagaagccgggaggtcggggcctagtccggaaccagggcctcaagcgtggggatggaatgaagaagcctgtggtccctggcgcgcgggccatagtaggaaccacagagagggagcaaagcaatgcattcggcctgacgagagctatgaaggcggggtcccgggcgggagtggctcagtgcccgccgggccgaggttaggggtgacaggcccggttaccggctaaatcctccccaccgcttgcccggagcctcacacttaccaagatccgcttgaagagcgcattctccttgggcgggaggctcacggccggcatcgttccggctgctcccgctgctcccgccaccacccggctcggtcagtcagtttgtccgaccgccgccgctgccgttccgtagctgcttcagccttgaatatctcgatccgccgccaccaccaggcctcgggtgtcgccgcgttgccctacccggacacctcctttttcctcgttgtcttttttcctttctcacttaacgctgccgccgcctcccccactacgggtctccgtcggcggttcacgtggtaactgaacagaccgacagaggcagccaaaatggcggacgcggagggttttcccacccgggtcacgcttcctaacacgcaggcgcggtgacctcctttccccacctcctctgggtttcggagcttgccgggaaacctggaggctggcctgcctgtggaggccgggagggtcggggcaggccccgcccatcatttcagtgcgtggtgccctcgaagcgcccgcggagctacgggaggctaggcaagtacggttcagaccgcctcctcatcaaaaacagcctctctggcgccttcctgctagatcgacctttcattccttggaaagagtctcgcacactgtgtgatcatcgtttgagcccaaagtgctaaaatacaggtgtaggtgtttgagaagcgctgtagttgattatggacgaaatgcctaatttaaggagcagaggcggagtggaaaatgaaaaaagcttcaccgcagtggagacttgttaacagccctggggagaaaggggcttaacagagtctggaaatcgtgaaagagcttgaccgatgaaatgggcctggctgtcgtatcgacagaaggctgaggccggggtgctagagaaccttgccgtgctggaattcacgttgacgcccccacggagctctgctgcagagccctcgagtcccgcacttccggccgccaggtggcgctggttctgttgccaactcggagagactgagctgggccacgcaagatggcgccgtccgccttgctgcgtcccctttcccggctgctggcccccgccaggctcccgagcggcccttcagtgcgatcaaagttctacgtgcgagagccgccgaatgccaaacctgactggctgaaagttgggttcaccttgggcaccactgtcttcttgtggatctatctcatcaaacaacacaatgaagatattttagagtacaaaagaagaaatgggctggaataaacttttgaaacactaatgtagtatgctccgtatagtgattgtagctgttcctctggattcaccatctgttgagttgtaaatgtgagagaaaaagttatatgtgaatatatatcaagccagcatttgtattttgcatcattaaataaaaagaaataaaaatacttctgtattcttcagataaagcata

SEQ ID NO: 284117 - DNA, 3051 bp, Homo sapiens
gagaacaacggaggcagaggagctgaagactccagtatgcaactgactacaaggaggtagtcgtttgaaaagctttctttccttctctgaactccttctttccctcctctcaggtcattgggtgaccccgggccgggcggagacaggtgaatcccaagagaggaggaagagggagggacagatgatggagggagaaccgcgtttaggcaatgaatgagcctgctgcatccgcaccacctgttccttccaagggtgccaccccgacctgccagcagggttcccacaccaaccgggccgcgactcctgccggtgtcgcccacttgcccgccaaaggccgggcctcttctcccccagatcggggagaatgagaaccggcagtctagaagccgggaggtcggggcctagtccggaaccagggcctcaagcgtggggatggaatgaagaagcctgtggtccctggcgcgcgggccatagtaggaaccacagagagggagcaaagcaatgcattcggcctgacgagagctatgaaggcggggtcccgggcgggagtggctcagtgcccgccgggccgaggttaggggtgacaggcccggttaccggctaaatcctccccaccgcttgcccggagcctcacacttaccaagatccgcttgaagagcgcattctccttgggcgggaggctcacggccggcatcgttccggctgctcccgctgctcccgccaccacccggctcggtcagtcagtttgtccgaccgccgccgctgccgttccgtagctgcttcagccttgaatatctcgatccgccgccaccaccaggcctcgggtgtcgccgcgttgccctacccggacacctcctttttcctcgttgtcttttttcctttctcacttaacgctgccgccgcctcccccactacgggtctccgtcggcggttcacgtggtaactgaacagaccgacagaggcagccaaaatggcggacgcggagggttttcccacccgggtcacgcttcctaacacgcaggcgcggtgacctcctttccccacctcctctgggtttcggagcttgccgggaaacctggaggctggcctgcctgtggaggccgggagggtcggggcaggccccgcccatcatttcagtgcgtggtgccctcgaagcgcccgcggagctacgggaggctaggcaagtacggttcagaccgcctcctcatcaaaaacagcctctctggcgccttcctgctagatcgacctttcattccttggaaagagtctcgcacactgtgtgatcatcgtttgagcccaaagtgctaaaatacaggtgtaggtgtttgagaagcgctgtagttgattatggacgaaatgcctaatttaaggagcagaggcggagtggaaaatgaaaaaagcttcaccgcagtggagacttgttaacagccctggggagaaaggggcttaacagagtctggaaatcgtgaaagagcttgaccgatgaaatgggcctggctgtcgtatcggtaatttggtgaatgttgcttaagatcagcctggaaaggtagttagtcagatccgaagtgacatatttgcactgccaaaggaggctctggaggttaaagtatgtgttttaatttcgttgttgaggccatataatgcagagttgacggaccgaccttatgagtcaccttggagcggagtagtggagacttaaagacagactaccctggagctggcttcaaactagttcttaatattgtgactcgaactccccatccccagaaattctcagatcttagaagccaaagactggcaaggatactagagggaactactcgagtaggcgaggtcagactacataccgaataggagtccttccaaaaatacagaaggctgaggccggggtgctagagaaccttgccgtgctggaattcacgttgacgcccccacggagctctgctgcagagccctcgagtcccgcacttccggccgccaggtggcgctggttctgttgccaactcggagagactgagctgggccacgcaagatggcgccgtccgccttgctgcgtcccctttcccggctgctggcccccgccaggctcccgagcggcccttcagtgcgatcaaagttctacgtgcgagagccgccgaatgccaaacctgactggctgaaagttgggttcaccttgggcaccactgtcttcttgtggatctatctcatcaaacaacacaatgaagatattttagagtacaaaagaagaaatgggctggaataaacttttgaaacactaatgtagtatgctccgtatagtgattgtagctgttcctctggattcaccatctgttgagttgtaaatgtgagagaaaaagttatatgtgaatatatatcaagccagcatttgtattttgcatcattaaataaaaagaaataaaaatacttctgtattcttcagataaagcataaaaaaagaacaaaaaaaacaaaaaaaaacacaaacacacacaaccaccacaacacccaaaaccaaacagaaaaaaaaacacaaaaacaaacaaaaaaaacaacaacaaaagaacgaaaaagagcaaacaaaacgggaggggggggcggcggacgacgacacgacgtacacgcgccgcccgagggagcggaccgaccgcaccgagaggcgcggcacgcacggactacaggacgaggagcgacgagacaagcggaaggggcgggccacaagggcagagcgaagagagcgggagcagacagacggcgcagcggggcgggacagaaggaaagcacgcgaggcggcgcagcacacataacgcggcgcaccggccagaaacgcccgacgctagcgtgtgggaggcgcaccagcagggggagcgcaccacgcagaccgggactggtgacgagcacagaggccggcgcggggaggagcgcgcaagacacgccgcgcggcctgggactggtgcgatgcgcactcagagcacaacaggaacgaagcgctggccggggctgcgcgggtacacgacgacgtccgcaaggaggaacacactcacgagcgaggac

SEQ ID NO: 284118 - DNA, 1563 bp, Homo sapiens
tttgtgatgcagctcgccaggcctacggggaggtaaaggacttgccaggctgaagtaacttcagaagcagaaaaacggaggattaaaaccacaagtcgttgtgatgtgaaatttcgtggggcaagaaagggccggaagtaggtagtctgcacggctctgctagagagaggatcacaagatcacacaaatgtgatctacttatgactggaaaaaatgtgtactttcagagccagcttgaggcattccattgcctccaatatgagctcttcccttcaagattgactataaatctcttagttacaactcacatcccctttccccagacaaaaccccacatagcccggtgtgtatttactgaaagcagtaagatactgctggggctttgggtgcaagatggagagtgctcagagataatgacaggggcctggtcctgcagggccttacgtagaaagtcaaggaatttattctctgagcaattgaaaatcatcccgaaagatctgcattttagaaataccatgttgagtagttgcataagaaaccagttaggaggcccctttttattggaggtagagaataatgagagactgaactacagaagtggggaaggaagacagctgtagatccaagaaatagtatccggaagagaggcttgagaagtgatcaaggagaattccacagttatcagagaccctgtcttccttgttcaccactatattaccagaacataatacaaataatgctattgttattgggtggcattatttggttagtaggtactttttaaaatttttaaatttaattttagtattaaaatacatgtaaagatcaggaaaatgaacttttaaaaataaagggctttcactgggcatgataacacatccctgtagtcccagctactcccagctattcaggaggctgaggcggcaggatcacttgaaccaaggagttcaagtttagcctgggcagtatagtgaaaccctttctcaaaaacaaataaagggctactgaaataatgataatttatattcaggtcgtaggtacctaattactagttacacatacatggctttgatgggaaatcaaagaaacattctgacaatacagagattcatcaagcaatttgtctttgaaagttgattattcaaaaacagagcttgtagcaaaagaagcagaagttagatcccacagtcatcaagtttcagatcctaaggcttgcattcttacaccaatttcttctttgcttaaatcttaattttcatcagcattaattaagtgtctgggtactctgccagtcaggagagatgttaccaaaggtacaggatttgagaagtattgtcagaagagccaagttcataatcaggcccataggatcaataatttgggggagtgtttagagcagtttcaaagatgagagcagtagatcaaagtagaatttcaggactgagcacatgccaaggcacccttttatggatattcaacctgtaccagaagggaggagtcatttacttaaaagagttacacaagatgaaagagctagatccaaataaagacgctataaaaatt

SEQ ID NO: 284119 - DNA, 787 bp, Homo sapiens
  misc_feature (555)..(555): n is a, c, g, or t
acaggtgattattgtgccaatatccgtaataaccctgtatccagaagagaattgtacctgtgaatgaaatgcatccgttccaagtagacacagccttttgaaatatctacacacaggtctacaaggtcaaccaagcgaaggagacgaagccctggaagctgtttttggcaaccaccaggaaaggctgcggaacagctgaagtgaatgtgagaaccaatctttataagcattaggatcctgggtgactcaaaacgatctggaaaaagtagatccactttttttttcagtccatcctttttcatcctctcttcacttttcatacccccagccccaccacaaaacaagacaaatctacaaataaaatttattgtttaagatgaaaaaaacaaacattgagtatctattgcatatcttgccttaacatttttatatttctgtcgttgatttgtagaaacaattctcggttatagtctatcttactgccgctggttatgggttgtaatttgtatcgtgtcattttcgaatacgtagtgtaagtgccgtcagacagtattncctctttccgtcctaatttaattttactactcttattttgtttcggcaattttctcaaggtgcactgctattcttttcatctgctacggtgcgctcatgaatatgtagggtatatatcgaaatagtcttaataatatgcctagcgtctatttgatgatgtcatcatatacatctctcattatatactaaacccacttgtattagttcgagtctatcaatttttaacgctgtg

SEQ ID NO: 284120 - DNA, 2162 bp, Homo sapiens
ggccccgggaagctaggaggcggggccgcgggccgggggcggactggggcgggcggaaggagagccaggccggaaggaggctgccggagggcgggaggcaggagcgggccaggagctgctgggctggagcggcggcgccgccatgtccgacagcgagaagctcaacctggactcgatcatcgggcgcctgctggaagtgcagggctcgcggcctggcaagaatgtacagctgacagagaacgagatccgcggtctgtgcctgaaatcccgggagatttttctgagccagcccattcttctggagctggaggcacccctcaagatctgcggtgacatacacggccagtactacgaccttctgcgactatttgagtatggcggtttccctcccgagagcaactacctctttctgggggactatgtggacaggggcaagcagtccttggagaccatctgcctgctgctggcctataagatcaagtaccccgagaacttcttcctgctccgtgggaaccacgagtgtgccagcatcaaccgcatctatggtttctacgatgagtgcaagagacgctacaacatcaaactgtggaaaaccttcactgactgcttcaactgcctgcccatcgcggccatagtggacgaaaagatcttctgctgccacggaggcctgtccccggacctgcagtctatggagcagattcggcggatcatgcggcccacagatgtgcctgaccagggcctgctgtgtgacctgctgtggtctgaccctgacaaggacgtgcagggctggggcgagaacgaccgtggcgtctcttttacctttggagccgaggtggtggccaagttcctccacaagcacgacttggacctcatctgccgagcacaccaggtggtagaagacggctacgagttctttgccaagcggcagctggtgacacttttctcagctcccaactactgtggcgagtttgacaatgctggcgccatgatgagtgtggacgagaccctcatgtgctctttccagatcctcaagcccgccgacaagaacaaggggaagtacgggcagttcagtggcctgaaccctggaggccgacccatcaccccaccccgcaattccgccaaagccaagaaatagcccccgcacaccaccctgtgccccagatgatggattgattgtacagaaatcatgctgccatgctgggggggggtcaccccgacccctcaggcccacctgtcacggggaacatggagccttggtgtatttttcttttctttttttaatgaatcaatagcagcgtccagtcccccagggctgcttcctgcctgcacctgcggtgactgtgagcaggatcctggggccgaggctgcagctcagggcaacggcaggccaggtcgtgggtctccagccgtgcttggcctcagggctggcagccggatcctggggcaacccatctggtctcttgaataaaggtcaaagctggattctcgccatggcctccgtctcacatctaagacactgcctggcagctcttctgcacagagccgcttgggagtctcggcaccgggccccagccagggcaaccctagccacacactcgggtccaaggctcttagaattccaagtcagcgccaaagagtatcaggaaagcaaggaaaacttgtcagctccacgggggtcccagatgcatgcccaggacttcaggaaggaacaggtcatgattggcagagaagctggatcaccaggggccagcagcacctactatgacattttccttaggaaggtgagcctgagggagacaggtttccagccttggccagctggagtatagcctgaggctcaatgagaaataagaggtaggaacgtcagtagttcagggccaagtctggaaagtcctgattggctgggggttgtggggagataacggcccaggcccgaccgctgtgggacagctttacagtgacagccagctggggcctgcgagaggcagtgaaacagctcagctccagcaagcccacctttctgatccccagggctgagagacccagttctgccactggctggggcttcgtctagtccaaggcctctgggtacaggcttcaggttcttggttcagccttcaccctcactgtcttccgccagcacagggctggggccctggggg

SEQ ID NO: 284121 - DNA, 905 bp, Homo sapiens
ccctctttttagaaaggaaaccaaaaagcagggggttcaggtcccccaagggttggttttcgggcttggaacctgcggtgactgtgagcaggatcctggggccgaggctgcagctcagggcaacggcaggccaggtcgtgggtctccagccgtgcttggcctcagggctggcagccggatcctggggcaacccatctggtctcttgaataaaggtcaaagctggattctcgccatggcctccgtctcacatctaagacactgcctggcagctcttctgcacagagccgcttgggagtctcggcaccgggccccagccagggcaaccctagccacacactcgggtccaaggctcttagaattccaagtcagcgccaaagagtatcaggaaagcaaggaaaacttgtcagctccacgggggtcccagatgcatgcccaggacttcaggaaggaacaggtcatgattggcagagaagctggatcaccaggggccagcagcacctactatgacattttccttaggaaggtgagcctgagggagacaggtttccagccttggccagctggagtatagcctgaggctcaatgagaaataagaggtaggaacgtcagtagttcagggccaagtctggaaagtcctgattggctgggggttgtggggagataacggcccaggcccgaccgctgtgggacagctttacagtgacagccagctggggcctgcgagaggcagtgaaacagctcagctccagcaagcccacctttctgatccccagggctgagagacccagttctgccactggctggggcttcgtctagtccaaggcctctgggtacaggcttcaggttcttggttcagccttcaccctcactgtcttccgccagcacagggctggggccctggggg

SEQ ID NO: 284122 - DNA, 2109 bp, Homo sapiens
cttgtgggacatcgtcgacccacgccgctgccggagggcgggaggcaggagcgggccaggagctgctgggctggagcggcggcgccgccatgtccgacagcgagaagctcaacctggactcgatcatcgggcgcctgctggaagtgcagggctcgcggcctggcaagaatgtacagctgacagagaacgagatccgcggtctgtgcctgaaatcccgggagatttttctgagccagcccattcttctggagctggaggcacccctcaagatctgcggtgacatacacggccagtactacgaccttctgcgactatttgagtatggcggtttccctcccgagagcaactacctctttctgggggactatgtggacaggggcaagcagtccttggagaccatctgcctgctgctggcctataagatcaagtaccccgagaacttcttcctgctccgtgggaaccacgagtgtgccagcatcaaccgcatctatggtttctacgatgagtgcaagagacgctacaacatcaaactgtggaaaaccttcactgactgcttcaactgcctgcccatcgcggccatagtggacgaaaagatcttctgctgccacggaggcctgtccccggacctgcagtctatggagcagattcggcggatcatgcggcccacagatgtgcctgaccagggcctgctgtgtgacctgctgtggtctgaccctgacaaggacgtgcagggctggggcgagaacgaccgtggcgtctcttttacctttggagccgaggtggtggccaagttcctccacaagcacgacttggacctcatctgccgagcacaccaggtggtagaagacggctacgagttctttgccaagcggcagctggtgacacttttctcagctcccaactactgtggcgagtttgacaatgctggcgccatgatgagtgtggacgagaccctcatgtgctctttccagatcctcaagcccgccgacaagaacaaggggaagtacgggcagttcagtggcctgaaccctggaggccgacccatcaccccaccccgcaattccgccaaagccaagaaatagcccccgcacaccaccctgtgccccagatgatggattgattgtacagaaatcatgctgccatgctgggggggggtcaccccgacccctcaggcccacctgtcacggggaacatggagccttggtgtatttttcttttctttttttaatgaatcaatagcagcgtccagtcccccagggctgcttcctgcctgcacctgcggtgactgtgagcaggatcctggggccgaggctgcagctcagggcaacggcaggccaggtcgtgggtctccagccgtgcttggcctcagggctggcagccggatcctggggcaacccatctggtctcttgaataaaggtcaaagctggattctcgccatggcctccgtctcacatctaagacactgcctggcagctcttctgcacagagccgcttgggagtctcggcaccgggccccagccagggcaaccctagccacacactcgggtccaaggctcttagaattccaagtcagcgccaaagagtatcaggaaagcaaggaaaacttgtcagctccacgggggtcccagatgcatgcccaggacttcaggaaggaacaggtcatgattggcagagaagctggatcaccaggggccagcagcacctactatgacattttccttaggaaggtgagcctgagggagacaggtttccagccttggccagctggagtatagcctgaggctcaatgagaaataagaggtaggaacgtcagtagttcagggccaagtctggaaagtcctgattggctgggggttgtggggagataacggcccaggcccgaccgctgtgggacagctttacagtgacagccagctggggcctgcgagaggcagtgaaacagctcagctccagcaagcccacctttctgatccccagggctgagagacccagttctgccactggctggggcttcgtctagtccaaggcctctgggtacaggcttcaggttcttggttcagccttcaccctcactgtcttccgccagcacagggctggggccctggggg

SEQ ID NO: 284123 - DNA, 2843 bp, Homo sapiens
ggccccgggaagctaggaggcggggccgcgggccgggggcggactggggcgggcggaaggagagccaggccggaaggaggctgccggagggcgggaggcaggagcgggccaggagctgctgggctggagcggcggcgccgccatgtccgacagcgagaagctcaacctggactcgatcatcgggcgcctgctggaagtgcagggctcgcggcctggcaagaatgtacagctgacagagaacgagatccgcggtctgtgcctgaaatcccgggagatttttctgagccagcccattcttctggagctggaggcacccctcaagatctgcggtgacatacacggccagtactacgaccttctgcgactatttgagtatggcggtttccctcccgagagcaactacctctttctgggggactatgtggacaggggcaagcagtccttggagaccatctgcctgctgctggcctataagatcaagtaccccgagaacttcttcctgctccgtgggaaccacgagtgtgccagcatcaaccgcatctatggtttctacgatgagtgcaagagacgctacaacatcaaactgtggaaaaccttcactgactgcttcaactgcctgcccatcgcggccatagtggacgaaaagatcttctgctgccacggaggcctgtccccggacctgcagtctatggagcagattcggcggatcatgcggcccacagatgtgcctgaccagggcctgctgtgtgacctgctgtggtctgaccctgacaaggacgtgcagggctggggcgagaacgaccgtggcgtctcttttacctttggagccgaggtggtggccaagttcctccacaagcacgacttggacctcatctgccgagcacaccaggtggtagaagacggctacgagttctttgccaagcggcagctggtgacacttttctcagctcccaactactgtggcgagtttgacaatgctggcgccatgatgagtgtggacgagaccctcatgtgctctttccagatcctcaagcccgccgacaagaacaaggggaagtacgggcagttcagtggcctgaaccctggaggccgacccatcaccccaccccgcaattccgccaaagccaagaaatagcccccgcacaccaccctgtgccccagatgatggattgattgtacagaaatcatgctgccatgctgggggggggtcaccccgacccctcaggcccacctgtcacggggaacatggagccttggtgtatttttcttttctttttttaatgaatcaatagcagcgtccagtcccccagggctgcttcctgcctgcacctgcggtgactgtgagcaggatcctggggccgaggctgcagctcagggcaacggcaggccaggtcgtgggtctccagccgtgcttggcctcagggctggcagccggatcctggggcaacccatctggtctcttgaataaaggtcaaagctaaaaaaacacaaaaaaaaaaaaaaaaaaaaaaaaaaaaaaaaaaaaaaaaaaaaaaaaaaaaaaaaaaaaaaaaaaaaaaaaaaaagaggggggggcgcgcgcagcacaaagctcatcctctccgcggggggcgcccgcagaacgcgagcggaccccagacgtatggggaacacagggagcgccccaattggggcgcgctctttattattcaccacgtggacgaggtggtcgagtgcgagaacaataaaccaaaccgaatgtcagggaggagaaatccgtctgcgtcactaccgcggcgcgcatctctggcgagatcaagacagccccacctcctcatgcgcgggggctagtgaccaaccatcattgtggtggggccacccacctacaactacctcctacacatgcccttatctcatccgcgacaccactcatctacgcgtgcggagaccacataacacaacaacacatacaagaggagcgatgttaagcgagtgtgacctctcaaccacccacccgacgaaatgactattactgcgcccagcccgtcctgctacgaagacattcctccgccaccacgagccaaccacaacaccatccctaaaacaaaacatttatattccaaacccccgcaaacttacaccattcactcacacacccccatccaacaaacccacccacaccccacctaccacacaaccaccacctcacaaaccaccaaacacacacaaccaccccccaaccaatcacccacccccccctccacatcccatccacactgggcggcggacggcgacgtagggtgggggtcgggacgaagagaggacgcacggggtgcggcgagcagtaggcggcacgcgcggatgcgaacggaggaagagagacctcaggagtagctagagggggcgaggatgcgcagcaagggcagccgacgaaacgacgggaagcgaacgcgggcgctgctaaggcgaggcctgtcgcgacagggagccaataccaaatgtacttcactccaacacacatcctcatcttaccacgcaccatactcagtcagcacgaataacgccgccactccgacctccgtcggcctcactaccagccaacactacaaaaaatacccaagcgcccaaaaagtcgcacacatccaacacaatatccaaaaatattcacataaacatcttcaccatacaacaacaacgccacgtaacaacaacataacacaaacgcattatacactaacattactatcctacatcccatacgcacatcaacacaccatgaacaccacgacattacaccaatctcagacatacccaccatactatcagcatgacacatcacacaccacataactacattcaacacc

SEQ ID NO: 284124 - DNA, 1139 bp, Homo sapiens
ggccccgggaagctaggaggcggggccgcgggccgggggcggactggggcgggcggaaggagagccaggccggaaggaggctgccggagggcgggaggcaggagcgggccaggagctgctgggctggagcggcggcgccgccatgtccgacagcgagaagctcaacctggactcgatcatcgggcgcctgctggaagtgcagggctcgcggcctggcaagaatgtacagctgacagagaacgagatccgcggtctgtgcctgaaatcccgggagatttttctgagccagcccattcttctggagctggaggcacccctcaagatctgcggtgacatacacggccagtactacgaccttctgcgactatttgagtatggcggtttccctcccgagagcaactacctctttctgggggactatgtggacaggggcaagcagtccttggagaccatctgcctgctgctggcctataagatcaagtaccccgagaacttcttcctgctccgtgggaaccacgagtgtgccagcatcaaccgcatctatggtttctacgatgagtgcaagagacgctacaacatcaaactgtggaaaaccttcactgactgcttcaactgcctgcccatcgcggccatagtggacgaaaagatcttctgctgccacggaggcctgtccccggacctgcagtctatggagcagattcggcggatcatgcggcccacagatgtgcctgaccagggcctgctgtgtgacctgctgtggtctgaccctgacaaggacgtgcagggctggggcgagaacgaccgtggcgtctcttttacctttggagccgaggtggtggccaagttcctccacaagcacgacttggacctcatctgccgagcacaccaggtggtagaagacggctacgagttctttgccaagcggcagctggtgacacttttctcagctcccaactactgtggcgagtttgacaatgctggcgccatgatgagtgtggacgagaccctcatgtgctctttccagatcctcaagcccgccgacaagaacaaggggaagtacgggcagttcagtggcctgaaccctggaggccgacccatcaccccaccccgcatgtacgcttggggtagcgagctcgaat

SEQ ID NO: 284125 - DNA, 2142 bp, Homo sapiens
cttgtgggacatcgtcgacccacgccgctgccggagggcgggaggcaggagcgggccaggagctgctgggctggagcggcggcgccgccatgtccgacagcgagaagctcaacctggactcgatcatcgggcgcctgctggaagggtccagggtcctgacaccccattgcgccccagtgcagggctcgcggcctggcaagaatgtacagctgacagagaacgagatccgcggtctgtgcctgaaatcccgggagatttttctgagccagcccattcttctggagctggaggcacccctcaagatctgcggtgacatacacggccagtactacgaccttctgcgactatttgagtatggcggtttccctcccgagagcaactacctctttctgggggactatgtggacaggggcaagcagtccttggagaccatctgcctgctgctggcctataagatcaagtaccccgagaacttcttcctgctccgtgggaaccacgagtgtgccagcatcaaccgcatctatggtttctacgatgagtgcaagagacgctacaacatcaaactgtggaaaaccttcactgactgcttcaactgcctgcccatcgcggccatagtggacgaaaagatcttctgctgccacggaggcctgtccccggacctgcagtctatggagcagattcggcggatcatgcggcccacagatgtgcctgaccagggcctgctgtgtgacctgctgtggtctgaccctgacaaggacgtgcagggctggggcgagaacgaccgtggcgtctcttttacctttggagccgaggtggtggccaagttcctccacaagcacgacttggacctcatctgccgagcacaccaggtggtagaagacggctacgagttctttgccaagcggcagctggtgacacttttctcagctcccaactactgtggcgagtttgacaatgctggcgccatgatgagtgtggacgagaccctcatgtgctctttccagatcctcaagcccgccgacaagaacaaggggaagtacgggcagttcagtggcctgaaccctggaggccgacccatcaccccaccccgcaattccgccaaagccaagaaatagcccccgcacaccaccctgtgccccagatgatggattgattgtacagaaatcatgctgccatgctgggggggggtcaccccgacccctcaggcccacctgtcacggggaacatggagccttggtgtatttttcttttctttttttaatgaatcaatagcagcgtccagtcccccagggctgcttcctgcctgcacctgcggtgactgtgagcaggatcctggggccgaggctgcagctcagggcaacggcaggccaggtcgtgggtctccagccgtgcttggcctcagggctggcagccggatcctggggcaacccatctggtctcttgaataaaggtcaaagctggattctcgccatggcctccgtctcacatctaagacactgcctggcagctcttctgcacagagccgcttgggagtctcggcaccgggccccagccagggcaaccctagccacacactcgggtccaaggctcttagaattccaagtcagcgccaaagagtatcaggaaagcaaggaaaacttgtcagctccacgggggtcccagatgcatgcccaggacttcaggaaggaacaggtcatgattggcagagaagctggatcaccaggggccagcagcacctactatgacattttccttaggaaggtgagcctgagggagacaggtttccagccttggccagctggagtatagcctgaggctcaatgagaaataagaggtaggaacgtcagtagttcagggccaagtctggaaagtcctgattggctgggggttgtggggagataacggcccaggcccgaccgctgtgggacagctttacagtgacagccagctggggcctgcgagaggcagtgaaacagctcagctccagcaagcccacctttctgatccccagggctgagagacccagttctgccactggctggggcttcgtctagtccaaggcctctgggtacaggcttcaggttcttggttcagccttcaccctcactgtcttccgccagcacagggctggggccctggggg

SEQ ID NO: 284126 - DNA, 2361 bp, Homo sapiens
ctgcccccccgcggacgcgcctgagaggtccggggccagctccgacgcgcggagcagctccccccctctcccgggctgggggcgcacgggttgcctgggctcttggggcgagggagaaacccgggaagcccggtccaggaaggggtcctgcgctgtgaggtttttggtggcagccccctgcgcacgacagtcgcctcccgaggcgctgagggtagctgggggcttcccctgggaggcttgaggccgcggtcccgggaggctcagcagcaacagctgcctgtgggcaaggaggggccgaggaggcctaggcgcccccggaggtatccatggggccacccgtgtcgcccaccctcctcctgtcagggtccagggtcctgacaccccattgcgccccagtgcagggctcgcggcctggcaagaatgtacagctgacagagaacgagatccgcggtctgtgcctgaaatcccgggagatttttctgagccagcccattcttctggagctggaggcacccctcaagatctgcggtgacatacacggccagtactacgaccttctgcgactatttgagtatggcggtttccctcccgagagcaactacctctttctgggggactatgtggacaggggcaagcagtccttggagaccatctgcctgctgctggcctataagatcaagtaccccgagaacttcttcctgctccgtgggaaccacgagtgtgccagcatcaaccgcatctatggtttctacgatgagtgcaagagacgctacaacatcaaactgtggaaaaccttcactgactgcttcaactgcctgcccatcgcggccatagtggacgaaaagatcttctgctgccacggaggcctgtccccggacctgcagtctatggagcagattcggcggatcatgcggcccacagatgtgcctgaccagggcctgctgtgtgacctgctgtggtctgaccctgacaaggacgtgcagggctggggcgagaacgaccgtggcgtctcttttacctttggagccgaggtggtggccaagttcctccacaagcacgacttggacctcatctgccgagcacaccaggtggtagaagacggctacgagttctttgccaagcggcagctggtgacacttttctcagctcccaactactgtggcgagtttgacaatgctggcgccatgatgagtgtggacgagaccctcatgtgctctttccagatcctcaagcccgccgacaagaacaaggggaagtacgggcagttcagtggcctgaaccctggaggccgacccatcaccccaccccgcaattccgccaaagccaagaaatagcccccgcacaccaccctgtgccccagatgatggattgattgtacagaaatcatgctgccatgctgggggggggtcaccccgacccctcaggcccacctgtcacggggaacatggagccttggtgtatttttcttttctttttttaatgaatcaatagcagcgtccagtcccccagggctgcttcctgcctgcacctgcggtgactgtgagcaggatcctggggccgaggctgcagctcagggcaacggcaggccaggtcgtgggtctccagccgtgcttggcctcagggctggcagccggatcctggggcaacccatctggtctcttgaataaaggtcaaagctggattctcgccatggcctccgtctcacatctaagacactgcctggcagctcttctgcacagagccgcttgggagtctcggcaccgggccccagccagggcaaccctagccacacactcgggtccaaggctcttagaattccaagtcagcgccaaagagtatcaggaaagcaaggaaaacttgtcagctccacgggggtcccagatgcatgcccaggacttcaggaaggaacaggtcatgattggcagagaagctggatcaccaggggccagcagcacctactatgacattttccttaggaaggtgagcctgagggagacaggtttccagccttggccagctggagtatagcctgaggctcaatgagaaataagaggtaggaacgtcagtagttcagggccaagtctggaaagtcctgattggctgggggttgtggggagataacggcccaggcccgaccgctgtgggacagctttacagtgacagccagctggggcctgcgagaggcagtgaaacagctcagctccagcaagcccacctttctgatccccagggctgagagacccagttctgccactggctggggcttcgtctagtccaaggcctctgggtacaggcttcaggttcttggttcagccttcaccctcactgtcttccgccagcacagggctggggccctggggg

SEQ ID NO: 284127 - DNA, 2030 bp, Homo sapiens
ggccccgggaagctaggaggcggggccgcgggccgggggcggactggggcgggcggaaggagagccaggccggaaggaggctgccggagggcgggaggcaggagcgggccaggagctgctgggctggagcggcggcgccgccatgtccgacagcgagaagctcaacctggactcgatcatcgggcgcctgctggaaggtgacatacacggccagtactacgaccttctgcgactatttgagtatggcggtttccctcccgagagcaactacctctttctgggggactatgtggacaggggcaagcagtccttggagaccatctgcctgctgctggcctataagatcaagtaccccgagaacttcttcctgctccgtgggaaccacgagtgtgccagcatcaaccgcatctatggtttctacgatgagtgcaagagacgctacaacatcaaactgtggaaaaccttcactgactgcttcaactgcctgcccatcgcggccatagtggacgaaaagatcttctgctgccacggaggcctgtccccggacctgcagtctatggagcagattcggcggatcatgcggcccacagatgtgcctgaccagggcctgctgtgtgacctgctgtggtctgaccctgacaaggacgtgcagggctggggcgagaacgaccgtggcgtctcttttacctttggagccgaggtggtggccaagttcctccacaagcacgacttggacctcatctgccgagcacaccaggtggtagaagacggctacgagttctttgccaagcggcagctggtgacacttttctcagctcccaactactgtggcgagtttgacaatgctggcgccatgatgagtgtggacgagaccctcatgtgctctttccagatcctcaagcccgccgacaagaacaaggggaagtacgggcagttcagtggcctgaaccctggaggccgacccatcaccccaccccgcaattccgccaaagccaagaaatagcccccgcacaccaccctgtgccccagatgatggattgattgtacagaaatcatgctgccatgctgggggggggtcaccccgacccctcaggcccacctgtcacggggaacatggagccttggtgtatttttcttttctttttttaatgaatcaatagcagcgtccagtcccccagggctgcttcctgcctgcacctgcggtgactgtgagcaggatcctggggccgaggctgcagctcagggcaacggcaggccaggtcgtgggtctccagccgtgcttggcctcagggctggcagccggatcctggggcaacccatctggtctcttgaataaaggtcaaagctggattctcgccatggcctccgtctcacatctaagacactgcctggcagctcttctgcacagagccgcttgggagtctcggcaccgggccccagccagggcaaccctagccacacactcgggtccaaggctcttagaattccaagtcagcgccaaagagtatcaggaaagcaaggaaaacttgtcagctccacgggggtcccagatgcatgcccaggacttcaggaaggaacaggtcatgattggcagagaagctggatcaccaggggccagcagcacctactatgacattttccttaggaaggtgagcctgagggagacaggtttccagccttggccagctggagtatagcctgaggctcaatgagaaataagaggtaggaacgtcagtagttcagggccaagtctggaaagtcctgattggctgggggttgtggggagataacggcccaggcccgaccgctgtgggacagctttacagtgacagccagctggggcctgcgagaggcagtgaaacagctcagctccagcaagcccacctttctgatccccagggctgagagacccagttctgccactggctggggcttcgtctagtccaaggcctctgggtacaggcttcaggttcttggttcagccttcaccctcactgtcttccgccagcacagggctggggccctggggg

SEQ ID NO: 284128 - DNA, 2245 bp, Homo sapiens
ggccccgggaagctaggaggcggggccgcgggccgggggcggactggggcgggcggaaggagagccaggccggaaggaggctgccggagggcgggaggcaggagcgggccaggagctgctgggctggagcggcggcgccgccatgtccgacagcgagaagctcaacctggactcgatcatcgggcgcctgctggaagtgcagggctcgcggcctggcaagaatgtacagctgacagagaacgagatccgcggtctgtgcctgaaatcccgggagatttttctgagccagcccattcttctggagctggaggcacccctcaagatctgcggtgacatacacggccagtactacgaccttctgcgactatttgagtatggcggtttccctcccgagagcaactacctctttctgggggactatgtggacaggggcaagcagtccttggagaccatctgcctgctgctggcctataagatcaagtaccccgagaacttcttcctgctccgtgggaaccacgagtgtgccagcatcaaccgcatctatggtttctacgatgagtgcaagagacgctacaacatcaaactgtggaaaaccttcactgactgcttcaactgcctgcccatcgcggccatagtggacgaaaagatcttctgctgccacggaggcctgtccccggacctgcagtctatggagcagattcggcggatcatgcggcccacagatgtgcctgaccagggcctgctgtgtgacctgctgtggtctgaccctgacaaggacgtgcagggctggggcgagaacgaccgtggcgtctcttttacctttggagccgaggtggtggccaagttcctccacaagcacgacttggacctcatctgccgagcacaccaggtgggctggtggctccggcctgcggcaggggaaggggagggccgtgcctgcgctcgggactgactgctcccatcctcgcccaggtggtagaagacggctacgagttctttgccaagcggcagctggtgacacttttctcagctcccaactactgtggcgagtttgacaatgctggcgccatgatgagtgtggacgagaccctcatgtgctctttccagatcctcaagcccgccgacaagaacaaggggaagtacgggcagttcagtggcctgaaccctggaggccgacccatcaccccaccccgcaattccgccaaagccaagaaatagcccccgcacaccaccctgtgccccagatgatggattgattgtacagaaatcatgctgccatgctgggggggggtcaccccgacccctcaggcccacctgtcacggggaacatggagccttggtgtatttttcttttctttttttaatgaatcaatagcagcgtccagtcccccagggctgcttcctgcctgcacctgcggtgactgtgagcaggatcctggggccgaggctgcagctcagggcaacggcaggccaggtcgtgggtctccagccgtgcttggcctcagggctggcagccggatcctggggcaacccatctggtctcttgaataaaggtcaaagctggattctcgccatggcctccgtctcacatctaagacactgcctggcagctcttctgcacagagccgcttgggagtctcggcaccgggccccagccagggcaaccctagccacacactcgggtccaaggctcttagaattccaagtcagcgccaaagagtatcaggaaagcaaggaaaacttgtcagctccacgggggtcccagatgcatgcccaggacttcaggaaggaacaggtcatgattggcagagaagctggatcaccaggggccagcagcacctactatgacattttccttaggaaggtgagcctgagggagacaggtttccagccttggccagctggagtatagcctgaggctcaatgagaaataagaggtaggaacgtcagtagttcagggccaagtctggaaagtcctgattggctgggggttgtggggagataacggcccaggcccgaccgctgtgggacagctttacagtgacagccagctggggcctgcgagaggcagtgaaacagctcagctccagcaagcccacctttctgatccccagggctgagagacccagttctgccactggctggggcttcgtctagtccaaggcctctgggtacaggcttcaggttcttggttcagccttcaccctcactgtcttccgccagcacagggctggggccctggggg

SEQ ID NO: 284129 - DNA, 2058 bp, Homo sapiens
cttgtgggacatcgtcgacccacgccgctgccggagggcgggaggcaggagcgggccaggagctgctgggctggagcggcggcgccgccatgtccgacagcgagaagctcaacctggactcgatcatcgggcgcctgctggaagtgcagggctcgcggcctggcaagaatgtacagctgacagagaacgagatccgcggtctgtgcctgaaatcccgggagatttttctgagccagcccattcttctggagctggaggcacccctcaagatctgcggtgacatacacggccagtactacgaccttctgcgactatttgagtatggcggtttccctcccgagagcaactacctctttctgggggactataagatcaagtaccccgagaacttcttcctgctccgtgggaaccacgagtgtgccagcatcaaccgcatctatggtttctacgatgagtgcaagagacgctacaacatcaaactgtggaaaaccttcactgactgcttcaactgcctgcccatcgcggccatagtggacgaaaagatcttctgctgccacggaggcctgtccccggacctgcagtctatggagcagattcggcggatcatgcggcccacagatgtgcctgaccagggcctgctgtgtgacctgctgtggtctgaccctgacaaggacgtgcagggctggggcgagaacgaccgtggcgtctcttttacctttggagccgaggtggtggccaagttcctccacaagcacgacttggacctcatctgccgagcacaccaggtggtagaagacggctacgagttctttgccaagcggcagctggtgacacttttctcagctcccaactactgtggcgagtttgacaatgctggcgccatgatgagtgtggacgagaccctcatgtgctctttccagatcctcaagcccgccgacaagaacaaggggaagtacgggcagttcagtggcctgaaccctggaggccgacccatcaccccaccccgcaattccgccaaagccaagaaatagcccccgcacaccaccctgtgccccagatgatggattgattgtacagaaatcatgctgccatgctgggggggggtcaccccgacccctcaggcccacctgtcacggggaacatggagccttggtgtatttttcttttctttttttaatgaatcaatagcagcgtccagtcccccagggctgcttcctgcctgcacctgcggtgactgtgagcaggatcctggggccgaggctgcagctcagggcaacggcaggccaggtcgtgggtctccagccgtgcttggcctcagggctggcagccggatcctggggcaacccatctggtctcttgaataaaggtcaaagctggattctcgccatggcctccgtctcacatctaagacactgcctggcagctcttctgcacagagccgcttgggagtctcggcaccgggccccagccagggcaaccctagccacacactcgggtccaaggctcttagaattccaagtcagcgccaaagagtatcaggaaagcaaggaaaacttgtcagctccacgggggtcccagatgcatgcccaggacttcaggaaggaacaggtcatgattggcagagaagctggatcaccaggggccagcagcacctactatgacattttccttaggaaggtgagcctgagggagacaggtttccagccttggccagctggagtatagcctgaggctcaatgagaaataagaggtaggaacgtcagtagttcagggccaagtctggaaagtcctgattggctgggggttgtggggagataacggcccaggcccgaccgctgtgggacagctttacagtgacagccagctggggcctgcgagaggcagtgaaacagctcagctccagcaagcccacctttctgatccccagggctgagagacccagttctgccactggctggggcttcgtctagtccaaggcctctgggtacaggcttcaggttcttggttcagccttcaccctcactgtcttccgccagcacagggctggggccctggggg

SEQ ID NO: 284130 - DNA, 1796 bp, Homo sapiens
cgactacaagtagtgagccgggttaatcggcacaggctactcttctgtctttctctctctctctctctctctctctctctctctcatctgcctttgtctgtctattacgactcagtatctctataacttcttcctgctccgtgggaaccacgagtgtgccagcatcaaccgcatctatggtttctacgatgagtgcaagagacgctacaacatcaaactgtggaaaaccttcactgactgcttcaactgcctgcccatcgcggccatagtggacgaaaagatcttctgctgccacggaggcctgtccccggacctgcagtctatggagcagattcggcggatcatgcggcccacagatgtgcctgaccagggcctgctgtgtgacctgctgtggtctgaccctgacaaggacgtgcagggctggggcgagaacgaccgtggcgtctcttttacctttggagccgaggtggtggccaagttcctccacaagcacgacttggacctcatctgccgagcacaccaggtggtagaagacggctacgagttctttgccaagcggcagctggtgacacttttctcagctcccaactactgtggcgagtttgacaatgctggcgccatgatgagtgtggacgagaccctcatgtgctctttccagatcctcaagcccgccgacaagaacaaggggaagtacgggcagttcagtggcctgaaccctggaggccgacccatcaccccaccccgcaattccgccaaagccaagaaatagcccccgcacaccaccctgtgccccagatgatggattgattgtacagaaatcatgctgccatgctgggggggggtcaccccgacccctcaggcccacctgtcacggggaacatggagccttggtgtatttttcttttctttttttaatgaatcaatagcagcgtccagtcccccagggctgcttcctgcctgcacctgcggtgactgtgagcaggatcctggggccgaggctgcagctcagggcaacggcaggccaggtcgtgggtctccagccgtgcttggcctcagggctggcagccggatcctggggcaacccatctggtctcttgaataaaggtcaaagctggattctcgccatggcctccgtctcacatctaagacactgcctggcagctcttctgcacagagccgcttgggagtctcggcaccgggccccagccagggcaaccctagccacacactcgggtccaaggctcttagaattccaagtcagcgccaaagagtatcaggaaagcaaggaaaacttgtcagctccacgggggtcccagatgcatgcccaggacttcaggaaggaacaggtcatgattggcagagaagctggatcaccaggggccagcagcacctactatgacattttccttaggaaggtgagcctgagggagacaggtttccagccttggccagctggagtatagcctgaggctcaatgagaaataagaggtaggaacgtcagtagttcagggccaagtctggaaagtcctgattggctgggggttgtggggagataacggcccaggcccgaccgctgtgggacagctttacagtgacagccagctggggcctgcgagaggcagtgaaacagctcagctccagcaagcccacctttctgatccccagggctgagagacccagttctgccactggctggggcttcgtctagtccaaggcctctgggtacaggcttcaggttcttggttcagccttcaccctcactgtcttccgccagcacagggctggggccctggggg

SEQ ID NO: 284131 - DNA, 1641 bp, Homo sapiens
ccgggtgttaatcggacgaggatggtttctacgatgagtgcaagagacgctacaacatcaaactgtggaaaaccttcactgactgcttcaactgcctgcccatcgcggccatagtggacgaaaagatcttctgctgccacggaggcctgtccccggacctgcagtctatggagcagattcggcggatcatgcggcccacagatgtgcctgaccagggcctgctgtgtgacctgctgtggtctgaccctgacaaggacgtgcagggctggggcgagaacgaccgtggcgtctcttttacctttggagccgaggtggtggccaagttcctccacaagcacgacttggacctcatctgccgagcacaccaggtggtagaagacggctacgagttctttgccaagcggcagctggtgacacttttctcagctcccaactactgtggcgagtttgacaatgctggcgccatgatgagtgtggacgagaccctcatgtgctctttccagatcctcaagcccgccgacaagaacaaggggaagtacgggcagttcagtggcctgaaccctggaggccgacccatcaccccaccccgcaattccgccaaagccaagaaatagcccccgcacaccaccctgtgccccagatgatggattgattgtacagaaatcatgctgccatgctgggggggggtcaccccgacccctcaggcccacctgtcacggggaacatggagccttggtgtatttttcttttctttttttaatgaatcaatagcagcgtccagtcccccagggctgcttcctgcctgcacctgcggtgactgtgagcaggatcctggggccgaggctgcagctcagggcaacggcaggccaggtcgtgggtctccagccgtgcttggcctcagggctggcagccggatcctggggcaacccatctggtctcttgaataaaggtcaaagctggattctcgccatggcctccgtctcacatctaagacactgcctggcagctcttctgcacagagccgcttgggagtctcggcaccgggccccagccagggcaaccctagccacacactcgggtccaaggctcttagaattccaagtcagcgccaaagagtatcaggaaagcaaggaaaacttgtcagctccacgggggtcccagatgcatgcccaggacttcaggaaggaacaggtcatgattggcagagaagctggatcaccaggggccagcagcacctactatgacattttccttaggaaggtgagcctgagggagacaggtttccagccttggccagctggagtatagcctgaggctcaatgagaaataagaggtaggaacgtcagtagttcagggccaagtctggaaagtcctgattggctgggggttgtggggagataacggcccaggcccgaccgctgtgggacagctttacagtgacagccagctggggcctgcgagaggcagtgaaacagctcagctccagcaagcccacctttctgatccccagggctgagagacccagttctgccactggctggggcttcgtctagtccaaggcctctgggtacaggcttcaggttcttggttcagccttcaccctcactgtcttccgccagcacagggctggggccctggggg

SEQ ID NO: 284132 - DNA, 2057 bp, Homo sapiens
ggccccgggaagctaggaggcggggccgcgggccgggggcggactggggcgggcggaaggagagccaggccggaaggaggctgccggagggcgggaggcaggagcgggccaggagctgctgggctggagcggcggcgccgccatgtccgacagcgagaagctcaacctggactcgatcatcgggcgcctgctggaagtgcagggctcgcggcctggcaagaatgtacagctgacagagaacgagatccgcggtctgtgcctgaaatcccgggagatttttctgagccagcccattcttctggagctggaggcacccctcaagatctgcggtgacatacacggccagtactacgaccttctgcgactatttgagtatggcggtttccctcccgagagcaactacctctttctgggggactatgtggacaggggcaagcagtccttggagaccatctgcctgctgctggcctataagatcaagtaccccgagaacttcttcctgctccgtgggaaccacgagtgtgccagcatcaaccgcatctatggtttctacgatgagtgcctgtccccggacctgcagtctatggagcagattcggcggatcatgcggcccacagatgtgcctgaccagggcctgctgtgtgacctgctgtggtctgaccctgacaaggacgtgcagggctggggcgagaacgaccgtggcgtctcttttacctttggagccgaggtggtggccaagttcctccacaagcacgacttggacctcatctgccgagcacaccaggtggtagaagacggctacgagttctttgccaagcggcagctggtgacacttttctcagctcccaactactgtggcgagtttgacaatgctggcgccatgatgagtgtggacgagaccctcatgtgctctttccagatcctcaagcccgccgacaagaacaaggggaagtacgggcagttcagtggcctgaaccctggaggccgacccatcaccccaccccgcaattccgccaaagccaagaaatagcccccgcacaccaccctgtgccccagatgatggattgattgtacagaaatcatgctgccatgctgggggggggtcaccccgacccctcaggcccacctgtcacggggaacatggagccttggtgtatttttcttttctttttttaatgaatcaatagcagcgtccagtcccccagggctgcttcctgcctgcacctgcggtgactgtgagcaggatcctggggccgaggctgcagctcagggcaacggcaggccaggtcgtgggtctccagccgtgcttggcctcagggctggcagccggatcctggggcaacccatctggtctcttgaataaaggtcaaagctggattctcgccatggcctccgtctcacatctaagacactgcctggcagctcttctgcacagagccgcttgggagtctcggcaccgggccccagccagggcaaccctagccacacactcgggtccaaggctcttagaattccaagtcagcgccaaagagtatcaggaaagcaaggaaaacttgtcagctccacgggggtcccagatgcatgcccaggacttcaggaaggaacaggtcatgattggcagagaagctggatcaccaggggccagcagcacctactatgacattttccttaggaaggtgagcctgagggagacaggtttccagccttggccagctggagtatagcctgaggctcaatgagaaataagaggtaggaacgtcagtagttcagggccaagtctggaaagtcctgattggctgggggttgtggggagataacggcccaggcccgaccgctgtgggacagctttacagtgacagccagctggggcctgcgagaggcagtgaaacagctcagctccagcaagcccacctttctgatccccagggctgagagacccagttctgccactggctggggcttcgtctagtccaaggcctctgggtacaggcttcaggttcttggttcagccttcaccctcactgtcttccgccagcacagggctggggccctggggg

SEQ ID NO: 284133 - DNA, 934 bp, Homo sapiens
  misc_feature (895)..(895): n is a, c, g, or t
ggccccgggaagctaggaggcggggccgcgggccgggggcggactggggcgggcggaaggagagccaggccggaaggaggctgccggagggcgggaggcaggagcgggccaggagctgctgggctggagcggcggcgccgccatgtccgacagcgagaagctcaacctggactcgatcatcgggcgcctgctggaagtgcagggctcgcggcctggcaagaatgtacagctgacagagaacgagatccgcggtctgtgcctgaaatcccgggagatttttctgagccagcccattcttctggagctggaggcacccctcaagatctgcggtgacatacacggccagtactacgaccttctgcgactatttgagtatggcggtttccctcccgagagcaactacctctttctgggggactatgtggacaggggcaagcagtccttggagaccatctgcctgctgctggcctataagatcaagtaccccgagaacttcttcctgctccgtgggaaccacgagtgtgccagcatcaaccgcatctatggtttctacgatgagtgcaagagacgctacaacatcaaactgtggaaaaccttcactgactgcttcaactgcctgcccatcgcggccatagtggacgaaaagatcttctgctgccacggaggcctgtccccggacctgcagtctatggagcagattcggcggatcatgcggcccacagatgtgcctgaccagggcctgctgtgtgacctgctgtggtctgaccctgacaaggacgtgcagggctggggcgagaacgaccgtggcgtctcttttacctttggagccgaggtggtggccaagttcctccacaagcacgacttggacctcatctgccgagcacaccaggggtgnagcggtccgttcttgcccccgcgccctgtgccctttcca

SEQ ID NO: 284134 - DNA, 655 bp, Homo sapiens
ggccccgggaagctaggaggcggggccgcgggccgggggcggactggggcgggcggaaggagagccaggccggaaggaggctgccggagggcgggaggcaggagcgggccaggagctgctgggctggagcggcggcgccgccatgtccgacagcgagaagctcaacctggactcgatcatcgggcgcctgctggaagtgcagggctcgcggcctggcaagaatgtacagctgacagagaacgagatccgcggtctgtgcctgaaatcccgggagatttttctgagccagcccattcttctggagctggaggcacccctcaagatctgcggtgacatacacggccagtactacgaccttctgcgactatttgagtatggcggtttccctcccgagagcaactacctctttctgggggactatgtggacaggggcaagcagtccttggagaccatctgcctgctgctggcctataagatcaagtaccccgagaacttcttcctgctccgtgggaaccacgagtgtgccagcatcaaccgcatctatggtttctacgatgagtgtgagtggtctgagcgtctggggctgcccgggtcctgaaccgcactctttgccattcagtgggaccttcacattggcctgatatctgacagacac

SEQ ID NO: 284135 - DNA, 417 bp, Homo sapiens
aagacggctacgagttctttgccaagcggcagctggtgacacttttctcagctcccaactactgtggcgagtttgacaatgctggcgccatgatgagtgtggacgagaccctcatgtgctctttccaggtgagtgtggggaagaaaggagccgctaggccctgtggctcagccccatgagcctgaccaacactgtctcttttagatcctcaagcccgccgacaagaacaaggggaagtacgggcagttcagtggcctgaaccctggaggccgacccatcaccccaccccgcaattccgccaaagccaagaaatagcccccgcacaccaccctgtgccccagatgatggattgattgtacagaaatcatgctgccatgctgggggggggtcaccccgacccctcaggcccacctgtca

SEQ ID NO: 284136 - DNA, 450 bp, Homo sapiens
catcggtgcctgactctctcctcccagccacggctgaatagcccagggaccctggctgagggtggggtaggcaggcacctcacagccacctccccctgggcaggcaagagacgctacaacatcaaactgtggaaaaccttcactgactgcttcaactgcctgcccatcgcggccatagtggacgaaaagatcttctgctgccacggaggtgagggaggggatggctggggaggaggagcactggccgcatccctcagcacccggcagctctccttaggtctcatctgggaagtcactccttccaggaagtgtcccccataccccactgtgctgggctgcactcacttccttgatgtgtgtcctacatggagtgggcttgtctcctttctcccgggagctctgtgctcctgagggcagggatgcctttgtgcctgtttgggaacttgaaaa

SEQ ID NO: 284137 - DNA, 1479 bp, Homo sapiens
ggccccgggaagctaggaggcggggccgcgggccgggggcggactggggcgggcggaaggagagccaggccggaaggaggctgccggagggcgggaggcaggagcgggccaggagctgctgggctggagcggcggcgccgccatgtccgacagcgagaagctcaacctggactcgatcatcgggcgcctgctggaagtgcagggctcgcggcctggcaagaatgtacagctgacagagaacgagatccgcggtctgtgcctgaaatcccgggagatttttctgagccagcccattcttctggagctggaggcacccctcaagatctgcggtgacatacacggccagtactacgaccttctgcgactatttgagtatggcggtttccctcccgagagcaactacctctttctgggggactatgtggacaggggcaagcagtccttggagaccatctgcctgctgctggcctataagatcaagtaccccgagaacttcttcctgctccgtgggaaccacgagtgtgccagcatcaaccgcatctatggtttctacgatgagtgcaagagacgctacaacatcaaactgtggaaaaccttcactgactgcttcaactgcctgcccatcgcggccatagtggacgaaaagatcttctgctgccacggaggcctgtccccggacctgcagtctatggagcagattcggcggatcatgcggcccacagatgtgcctgaccagggcctgctgtgtgacctgctgtggtctgaccctgacaaggacgtgcagggctggggcgagaacgaccgtggcgtctcttttacctttggagccgaggtggtggccaagttcctccacaagcacgacttggacctcatctgccgagcacaccaggtggtagaagacggctacgagttctttgccaagcggcagctggtgacacttttctcagctcccaactactgtggcgagtttgacaatgctggcgccatgatgagtgtggacgagaccctcatgtgctctttccagatcctcaagcccgccgacaagaacaaggggaagtacgggcagttcagtggcctgaaccctggaggccgacccatcaccccaccccgcaattccgccaaagccaagaaatagcccccgcacaccaccctgtgccccagatgatggattgattgtacagaaatcatgctgccatgctgggggggggtcaccccgacccctcaggcccacctgtcacggggaacatggagccttggtgtatttttcttttctttttttaatgaatcaatagcagcgtccagtcccccagggctgcttcctgcctgcacctgcggtgactgtgagcaggatcctggggccgaggctgcagctcagggcaacggcaggccaggtcgtgggtctccagccgtgcttggcctcagggctggcagccggatcctggggcaacccatctggtctcttgaataaaggtcaaagct

SEQ ID NO: 284138 - DNA, 1393 bp, Homo sapiens
ggccccgggaagctaggaggcggggccgcgggccgggggcggactggggcgggcggaaggagagccaggccggaaggaggctgccggagggcgggaggcaggagcgggccaggagctgctgggctggagcggcggcgccgccatgtccgacagcgagaagctcaacctggactcgatcatcgggcgcctgctggaagtgcagggctcgcggcctggcaagaatgtacagctgacagagaacgagatccgcggtctgtgcctgaaatcccgggagatttttctgagccagcccattcttctggagctggaggcacccctcaagatctgcggtgacatacacggccagtactacgaccttctgcgactatttgagtatggcggtttccctcccgagagcaactacctctttctgggggactatgtggacaggggcaagcagtccttggagaccatctgcctgctgctggcctataagatcaagtaccccgagaacttcttcctgctccgtgggaaccacgagtgtgccagcatcaaccgcatctatggtttctacgatgagtgcaagagacgctacaacatcaaactgtggaaaaccttcactgactgcttcaactgcctgcccatcgcggccatagtggacgaaaagatcttctgctgccacggaggcctgtccccggacctgcagtctatggagcagattcggcggatcatgcggcccacagatgtgcctgaccagggcctgctgtgtgacctgctgtggtctgaccctgacaaggacgtgcagggctggggcgagaacgaccgtggcgtctcttttacctttggagccgaggtggtggccaagttcctccacaagcacgacttggacctcatctgccgagcacaccaggtggtagaagacggctacgagttctttgccaagcggcagctggtgacacttttctcagctcccaactactgtggcgagtttgacaatgctggcgccatgatgagtgtggacgagaccctcatgtgctctttccagatcctcaagcccgccgacaagaacaaggggaagtacgggcagttcagtggcctgaaccctggaggccgacccatcaccccaccccgcaattccgccaaagccaagaaatagcccccgcacaccaccctgtgccccagatgatggattgattgtacagaaatcatgctgccatgctgggggggggtcaccccgacccctcaggcccacctgtcacggggaacatggagccttggtgtatttttcttttctttttttaatgaatcaatagcagcgtccagtcccccagggctgcttcctgcctgcacctgcggtgactgtgagcaggatcctggggcaacccatctggtctcttgaataaaggtcaaagct

SEQ ID NO: 284139 - DNA, 2122 bp, Homo sapiens
  misc_feature (112)..(112): n is a, c, g, or t
cccatagcttaggcttcgaggccctccgattttatgctgggcgtgaggcagtgcagcccggcctggtatgctgctgggcgtggagcggcggcgcccgtccatgtccgacagncgagaatgctcaatctggactcgatcatcgggcgcctgctggaagtgcagggctcgcggcctggcaagaatgtacagctgacagagaacgagatccgcggtctgtgcctgaaatcccgggagatttttctgagccagcccattcttctggagctggaggcacccctcaagatctgcggtgacatacacggccagtactacgaccttctgcgactatttgagtatggcggtttccctcccgagagcaactacctctttctgggggactatgtggacaggggcaagcagtccttggagaccatctgcctgctgctggcctataagatcaagtaccccgagaacttcttcctgctccgtgggaaccacgagtgtgccagcatcaaccgcatctatggtttctacgatgagtgcaagagacgctacaacatcaaactgtggaaaaccttcactgactgcttcaactgcctgcccatcgcggccatagtggacgaaaagatcttctgctgccacggaggcctgtccccggacctgcagtctatggagcagattcggcggatcatgcggcccacagatgtgcctgaccagggcctgctgtgtgacctgctgtggtctgaccctgacaaggacgtgcagggctggggcgagaacgaccgtggcgtctcttttacctttggagccgaggtggtggccaagttcctccacaagcacgacttggacctcatctgccgagcacaccaggtggtagaagacggctacgagttctttgccaagcggcagctggtgacacttttctcagctcccaactactgtggcgagtttgacaatgctggcgccatgatgagtgtggacgagaccctcatgtgctctttccagatcctcaagcccgccgacaagaacaaggggaagtacgggcagttcagtggcctgaaccctggaggccgacccatcaccccaccccgcaattccgccaaagccaagaaatagcccccgcacaccaccctgtgccccagatgatggattgattgtacagaaatcatgctgccatgctgggggggggtcaccccgacccctcaggcccacctgtcacggggaacatggagccttggtgtatttttcttttctttttttaatgaatcaatagcagcgtccagtcccccagggctgcttcctgcctgcacctgcggtgactgtgagcaggatcctggggccgaggctgcagctcagggcaacggcaggccaggtcgtgggtctccagccgtgcttggcctcagggctggcagccggatcctggggcaacccatctggtctcttgaataaaggtcaaagctggattctcgccatggcctccgtctcacatctaagacactgcctggcagctcttctgcacagagccgcttgggagtctcggcaccgggccccagccagggcaaccctagccacacactcgggtccaaggctcttagaattccaagtcagcgccaaagagtatcaggaaagcaaggaaaacttgtcagctccacgggggtcccagatgcatgcccaggacttcaggaaggaacaggtcatgattggcagagaagctggatcaccaggggccagcagcacctactatgacattttccttaggaaggtgagcctgagggagacaggtttccagccttggccagctggagtatagcctgaggctcaatgagaaataagaggtaggaacgtcagtagttcagggccaagtctggaaagtcctgattggctgggggttgtggggagataacggcccaggcccgaccgctgtgggacagctttacagtgacagccagctggggcctgcgagaggcagtgaaacagctcagctccagcaagcccacctttctgatccccagggctgagagacccagttctgccactggctggggcttcgtctagtccaaggcctctgggtacaggcttcaggttcttggttcagccttcaccctcactgtcttccgccagcacagggctggggccctggggg

SEQ ID NO: 284140 - DNA, 2303 bp, Homo sapiens
caccctactttcgggacctgtgcgtgaggagctatgcctgttgaggctgctggcattcaggcagaaatttggcctggagcagctgccatgaggcaagagctgggcctggaaaaagcccctgggaggcaagagcagggcctgcagaggctgttctcaagtcaaagctgggcctgttcatgccactgggaagcagaaggtgggcctggagagtttgacttgaggaagttttgggcctacattggccgccatgagctggacaggaactgggccaaaaaaggctgttgtgaggcagcagttgtgcctgtagacccagccaagaggaagaggtgggcctggagaagcccccatgaggtagaggttgggcctgtagacgctgacaggaggcaggagctgcgcctggaaaggtcaacttgaggagattttgcgccagcccattcttctggagctggaggcacccctcaagatctgcggtgacatacacggccagtactacgaccttctgcgactatttgagtatggcggtttccctcccgagagcaactacctctttctgggggactatgtggacaggggcaagcagtccttggagaccatctgcctgctgctggcctataagatcaagtaccccgagaacttcttcctgctccgtgggaaccacgagtgtgccagcatcaaccgcatctatggtttctacgatgagtgcaagagacgctacaacatcaaactgtggaaaaccttcactgactgcttcaactgcctgcccatcgcggccatagtggacgaaaagatcttctgctgccacggaggcctgtccccggacctgcagtctatggagcagattcggcggatcatgcggcccacagatgtgcctgaccagggcctgctgtgtgacctgctgtggtctgaccctgacaaggacgtgcagggctggggcgagaacgaccgtggcgtctcttttacctttggagccgaggtggtggccaagttcctccacaagcacgacttggacctcatctgccgagcacaccaggtggtagaagacggctacgagttctttgccaagcggcagctggtgacacttttctcagctcccaactactgtggcgagtttgacaatgctggcgccatgatgagtgtggacgagaccctcatgtgctctttccagatcctcaagcccgccgacaagaacaaggggaagtacgggcagttcagtggcctgaaccctggaggccgacccatcaccccaccccgcaattccgccaaagccaagaaatagcccccgcacaccaccctgtgccccagatgatggattgattgtacagaaatcatgctgccatgctgggggggggtcaccccgacccctcaggcccacctgtcacggggaacatggagccttggtgtatttttcttttctttttttaatgaatcaatagcagcgtccagtcccccagggctgcttcctgcctgcacctgcggtgactgtgagcaggatcctggggccgaggctgcagctcagggcaacggcaggccaggtcgtgggtctccagccgtgcttggcctcagggctggcagccggatcctggggcaacccatctggtctcttgaataaaggtcaaagctggattctcgccatggcctccgtctcacatctaagacactgcctggcagctcttctgcacagagccgcttgggagtctcggcaccgggccccagccagggcaaccctagccacacactcgggtccaaggctcttagaattccaagtcagcgccaaagagtatcaggaaagcaaggaaaacttgtcagctccacgggggtcccagatgcatgcccaggacttcaggaaggaacaggtcatgattggcagagaagctggatcaccaggggccagcagcacctactatgacattttccttaggaaggtgagcctgagggagacaggtttccagccttggccagctggagtatagcctgaggctcaatgagaaataagaggtaggaacgtcagtagttcagggccaagtctggaaagtcctgattggctgggggttgtggggagataacggcccaggcccgaccgctgtgggacagctttacagtgacagccagctggggcctgcgagaggcagtgaaacagctcagctccagcaagcccacctttctgatccccagggctgagagacccagttctgccactggctggggcttcgtctagtccaaggcctctgggtacaggcttcaggttcttggttcagccttcaccctcactgtcttccgccagcacagggctggggccctggggg

SEQ ID NO: 284141 - DNA, 1295 bp, Homo sapiens
ggccccgggaagctaggaggcggggccgcgggccgggggcggactggggcgggcggaaggagagccaggccggaaggaggctgccggagggcgggaggcaggagcgggccaggagctgctgggctggagcggcggcgccgccatgtccgacagcgagaagctcaacctggactcgatcatcgggcgcctgctggaagtgcagggctcgcggcctggcaagaatgtacagctgacagagaacgagatccgcggtctgtgcctgaaatcccgggagatttttctgagccagcccattcttctggagctggaggcacccctcaagatctgcggtgacatacacggccagtactacgaccttctgcgactatttgagtatggcggtttccctcccgagagcaactacctctttctgggggactatgtggacaggggcaagcagtccttggagaccatctgcctgctgctggcctataagatcaagtaccccgagaacttcttcctgctccgtgggaaccacgagtgtgccagcatcaaccgcatctatggtttctacgatgagtgcaagagacgctacaacatcaaactgtggaaaaccttcactgactgcttcaactgcctgcccatcgcggccatagtggacgaaaagatcttctgctgccacggaggcctgtccccggacctgcagtctatggagcagattcggcggatcatgcggcccacagatgtgcctgaccagggcctgctgtgtgacctgctgtggtctgaccctgacaaggacgtgcagggctggggcgagaacgaccgtggcgtctcttttacctttggagccgaggtggtggccaagttcctccacaagcacgacttggacctcatctgccgagcacaccaggtggtagaagacggctacgagttctttgccaagcggcagctggtgacacttttctcagctcccaactactgtggcgagtttgacaatgctggcgccatgatgagtgtggacgagaccctcatgtgctctttccagtcaccccgacccctcaggcccacctgtcacggggaacatggagccttggtgtatttttcttttctttttttaatgaatcaatagcagcgtccagtcccccagggctgcttcctgcctgcacctgcggtgactgtgagcaggatcctggggccgaggctgcagctcagggcaacggcaggccaggtcgtgggtctccagccgtgcttggcctcagggctggcagccggatcctggggcaacccatctggtctcttgaataaaggtcaaagct

SEQ ID NO: 284142 - DNA, 1644 bp, Homo sapiens
ggtcgggctgatctagaggatcccttcgattgtgggactcaggcaagagacgctacaacatcaaactgtggaaaaccttcactgactgcttcaactgcctgcccatcgcggccatagtggacgaaaagatcttctgctgccacggaggcctgtccccggacctgcagtctatggagcagattcggcggatcatgcggcccacagatgtgcctgaccagggcctgctgtgtgacctgctgtggtctgaccctgacaaggacgtgcagggctggggcgagaacgaccgtggcgtctcttttacctttggagccgaggtggtggccaagttcctccacaagcacgacttggacctcatctgccgagcacaccaggtggtagaagacggctacgagttctttgccaagcggcagctggtgacacttttctcagctcccaactactgtggcgagtttgacaatgctggcgccatgatgagtgtggacgagaccctcatgtgctctttccagatcctcaagcccgccgacaagaacaaggggaagtacgggcagttcagtggcctgaaccctggaggccgacccatcaccccaccccgcaattccgccaaagccaagaaatagcccccgcacaccaccctgtgccccagatgatggattgattgtacagaaatcatgctgccatgctgggggggggtcaccccgacccctcaggcccacctgtcacggggaacatggagccttggtgtatttttcttttctttttttaatgaatcaatagcagcgtccagtcccccagggctgcttcctgcctgcacctgcggtgactgtgagcaggatcctggggccgaggctgcagctcagggcaacggcaggccaggtcgtgggtctccagccgtgcttggcctcagggctggcagccggatcctggggcaacccatctggtctcttgaataaaggtcaaagctggattctcgccatggcctccgtctcacatctaagacactgcctggcagctcttctgcacagagccgcttgggagtctcggcaccgggccccagccagggcaaccctagccacacactcgggtccaaggctcttagaattccaagtcagcgccaaagagtatcaggaaagcaaggaaaacttgtcagctccacgggggtcccagatgcatgcccaggacttcaggaaggaacaggtcatgattggcagagaagctggatcaccaggggccagcagcacctactatgacattttccttaggaaggtgagcctgagggagacaggtttccagccttggccagctggagtatagcctgaggctcaatgagaaataagaggtaggaacgtcagtagttcagggccaagtctggaaagtcctgattggctgggggttgtggggagataacggcccaggcccgaccgctgtgggacagctttacagtgacagccagctggggcctgcgagaggcagtgaaacagctcagctccagcaagcccacctttctgatccccagggctgagagacccagttctgccactggctggggcttcgtctagtccaaggcctctgggtacaggcttcaggttcttggttcagccttcaccctcactgtcttccgccagcacagggctggggccctggggg

SEQ ID NO: 284143 - DNA, 1591 bp, Homo sapiens
ccacgcgtacgccacgcgtcgaccttcactgactgcttcaactgcctgcccatcgcggccatagtggacgaaaagatcttctgctgccacggaggcctgtccccggacctgcagtctatggagcagattcggcggatcatgcggcccacagatgtgcctgaccagggcctgctgtgtgacctgctgtggtctgaccctgacaaggacgtgcagggctggggcgagaacgaccgtggcgtctcttttacctttggagccgaggtggtggccaagttcctccacaagcacgacttggacctcatctgccgagcacaccaggtggtagaagacggctacgagttctttgccaagcggcagctggtgacacttttctcagctcccaactactgtggcgagtttgacaatgctggcgccatgatgagtgtggacgagaccctcatgtgctctttccagatcctcaagcccgccgacaagaacaaggggaagtacgggcagttcagtggcctgaaccctggaggccgacccatcaccccaccccgcaattccgccaaagccaagaaatagcccccgcacaccaccctgtgccccagatgatggattgattgtacagaaatcatgctgccatgctgggggggggtcaccccgacccctcaggcccacctgtcacggggaacatggagccttggtgtatttttcttttctttttttaatgaatcaatagcagcgtccagtcccccagggctgcttcctgcctgcacctgcggtgactgtgagcaggatcctggggccgaggctgcagctcagggcaacggcaggccaggtcgtgggtctccagccgtgcttggcctcagggctggcagccggatcctggggcaacccatctggtctcttgaataaaggtcaaagctggattctcgccatggcctccgtctcacatctaagacactgcctggcagctcttctgcacagagccgcttgggagtctcggcaccgggccccagccagggcaaccctagccacacactcgggtccaaggctcttagaattccaagtcagcgccaaagagtatcaggaaagcaaggaaaacttgtcagctccacgggggtcccagatgcatgcccaggacttcaggaaggaacaggtcatgattggcagagaagctggatcaccaggggccagcagcacctactatgacattttccttaggaaggtgagcctgagggagacaggtttccagccttggccagctggagtatagcctgaggctcaatgagaaataagaggtaggaacgtcagtagttcagggccaagtctggaaagtcctgattggctgggggttgtggggagataacggcccaggcccgaccgctgtgggacagctttacagtgacagccagctggggcctgcgagaggcagtgaaacagctcagctccagcaagcccacctttctgatccccagggctgagagacccagttctgccactggctggggcttcgtctagtccaaggcctctgggtacaggcttcaggttcttggttcagccttcaccctcactgtcttccgccagcacagggctggggccctggggg

SEQ ID NO: 284144 - DNA, 1407 bp, Homo sapiens
gctgtgggtgatcgtggcagtgggtagaccgtggctagtgggtagagcgtggcgtctcttttacctttggagccgaggtggtggccaagttcctccacaagcacgacttggacctcatctgccgagcacaccaggtggtagaagacggctacgagttctttgccaagcggcagctggtgacacttttctcagctcccaactactgtggcgagtttgacaatgctggcgccatgatgagtgtggacgagaccctcatgtgctctttccagatcctcaagcccgccgacaagaacaaggggaagtacgggcagttcagtggcctgaaccctggaggccgacccatcaccccaccccgcaattccgccaaagccaagaaatagcccccgcacaccaccctgtgccccagatgatggattgattgtacagaaatcatgctgccatgctgggggggggtcaccccgacccctcaggcccacctgtcacggggaacatggagccttggtgtatttttcttttctttttttaatgaatcaatagcagcgtccagtcccccagggctgcttcctgcctgcacctgcggtgactgtgagcaggatcctggggccgaggctgcagctcagggcaacggcaggccaggtcgtgggtctccagccgtgcttggcctcagggctggcagccggatcctggggcaacccatctggtctcttgaataaaggtcaaagctggattctcgccatggcctccgtctcacatctaagacactgcctggcagctcttctgcacagagccgcttgggagtctcggcaccgggccccagccagggcaaccctagccacacactcgggtccaaggctcttagaattccaagtcagcgccaaagagtatcaggaaagcaaggaaaacttgtcagctccacgggggtcccagatgcatgcccaggacttcaggaaggaacaggtcatgattggcagagaagctggatcaccaggggccagcagcacctactatgacattttccttaggaaggtgagcctgagggagacaggtttccagccttggccagctggagtatagcctgaggctcaatgagaaataagaggtaggaacgtcagtagttcagggccaagtctggaaagtcctgattggctgggggttgtggggagataacggcccaggcccgaccgctgtgggacagctttacagtgacagccagctggggcctgcgagaggcagtgaaacagctcagctccagcaagcccacctttctgatccccagggctgagagacccagttctgccactggctggggcttcgtctagtccaaggcctctgggtacaggcttcaggttcttggttcagccttcaccctcactgtcttccgccagcacagggctggggccctggggg

SEQ ID NO: 284145 - DNA, 483 bp, Homo sapiens
cacggaaatagccaacccttttcttccgcacggttggaggaggtcggctggttatcgggagttggagggctgaggtcgggagggtggtgtgtacagagctctaggactcacgcaccaggccagtcgcgggttttgggccgaggcctgggttacaagcagcaagtgcgcggttggggccactgcgaggccgttttagaaaactgtttaaaacaaagagcaattgatggataaatcaggaatagattctcttgaccatgtgacatctgatgctgtggaacttgcaaatcgaagtgataactcttctgatagcagcttatttaaaactcagtgtatcccttactcacctaaaggggagaaaagaaaccccattcgaaaatttgttcgtacacctgaaagtgttcacgcaagtgattcatcaagtgactcatcttttgaaccaataccattgactataaaagctatttttgaaagattcaagaacag

SEQ ID NO: 284146 - DNA, 992 bp, Homo sapiens
ttattagttcaagaaaaggcatacacatttattcaacatgtatacctggggagaaccagtcattaccccgatgttcattattttgatcaccacgatagagctgactactctgctatgtagtgcattttgggactgcacttatgtatgtttttgtttaacgtggacaaagacttacagataggtgcaaaaaataaatcctcttttgcaacccagaactcattgttcagtatgagttttgatacatataagaagggatattatgatacctgagacagttgattgatgggagtattgatagccataaaggttggttccaggccaggtgcaatgggtcaagcctgcaatccccacaccaaggtgggagtattgcttgaaaccaggagttcaagaccagcctaggcaagaaagcttttatcttgagaacatggtgtctggagttaaagataatctacttttttaccttaggtattggcatactccacacatctgtaccattcttgagtgatcgcttaggaatgaatgtgatttgaactcattcatgttgagagggtgtcaaattgagaaccaggtagatccccaccacctacagtaaaaaggaccctaaagtaaattggttgaagaaattagatcccaaagattcttggtgaattttgaagtcttcatcagtatatccatattaaaacgagatgacagaagccaaagtaattatgggctgacaggacaactggatcagtttcattaaaaagggcaaacttgaagataaatcttttgactccagctctttagaggatctaaagtgaccttgatggacagtggaagaaatcacaacatggaattcctcgaataacaatttattgactttaaataattttgtctaatgctacatatacacaattaaaaaacctttacactatttctagaaagtcagcatgtatttttggctcgaagtttctctagtgttttctgtggaaggaataaaaatttgagtttca

SEQ ID NO: 284147 - DNA, 429 bp, Homo sapiens
tagaataagtggagaaatgttggtagatataagatgtgagatgatagtataggatggtggaaggggtgacgattgaatgagatgggagatcccagccacgtacagtaaaaaggaccctaaagtaaattggttgaagaaattagatcccaaagattcttggtgaattttgaagtcttcatcagtatatccatattaaaacgagatgacagaagccaaagtaattatgggctgacaggacaactggatcagtttcattaaaaagggcaaacttgaagataaatcttttgactccagctctttagaggatctaaagtgaccttgatggacagtggaagaaatcacaacatggaattcctcgaataacaatttattgactttaaataattttgtctaatgctacatatacacaattaaaaaacctttacacta

SEQ ID NO: 284148 - DNA, 420 bp, Homo sapiens
cttcctttcaccagcaccaaggggccctgtcccacaatccccaacctccctcggcagaggggtcttcaaccaatcagaggagagaagaggaccgagaaaggggaaagggagaaaaaaaaaaaaaaaagcaaagctttgtatggtataaaaggtttgtgtccccaggctccctcccccaatcccttaaaacaagatgacagaagccaaagtaattatgggctgacaggacaactggatcagtttcattaaaaagggcaaacttgaagataaatcttttgactccagctctttagaggatctaaagtgaccttgatggacagtggaagaaatcacaacatggaattcctcgaataacaatttattgactttaaataattttgtctaatgctacatatacacaattaaaaaacctttacacta

SEQ ID NO: 284149 - DNA, 358 bp, Homo sapiens
attcacgatggcccctgggactccccgggctattaagcccctggccacaatctgtaccattcttgagtgatcgcttaggaatgaatgtgatttgaactcattcatgttgagagggtgtcaaattgagaaccaggtagatccccaccacctacagtaaaaaggaccctaaagtaaattggttgaagaaattagatcccaaagattcttggtgaattttgaagtcttcatcagtatatccatattaaaacgagatgacagaagccaaagtaattatgggctgacaggacaactggatcagtttcattaaaaaggcaaacttgaagataatcttttactctctggatcatcacggatcctc

SEQ ID NO: 284150 - DNA, 2312 bp, Homo sapiens
cacggaaatagccaacccttttcttccgcacggttggaggaggtcggctggttatcgggagttggagggctgaggtcgggagggtggtgtgtacagagctctaggactcacgcaccaggccagtcgcgggttttgggccgaggcctgggttacaagcagcaagtgcgcggttggggccactgcgaggccgttttagaaaactgtttaaaacaaagagcaattgatggataaatcaggaatagattctcttgaccatgtgacatctgatgctgtggaacttgcaaatcgaagtgataactcttctgatagcagcttatttaaaactcagtgtatcccttactcacctaaaggggagaaaagaaaccccattcgaaaatttgttcgtacacctgaaagtgttcacgcaagtgattcatcaagtgactcatcttttgaaccaataccattgactataaaagctatttttgaaagattcaagaacaggaaaaagagatataaaaaaaagaaaaagaggaggtaccagccaacaggaagaccacggggaagaccagaaggaaggagaaatcctatatactcactaatagataagaagaaacaatttagaagcagaggatctggcttcccatttttagaatcagagaatgaaaaaaacgcaccttggagaaaaattttaacgtttgagcaagctgttgcaagaggattttttaactatattgaaaaactgaagtatgaacaccacctgaaagaatcattgaagcaaatgaatgttggtgaagatttagaaaatgaagattttgacagtcgtagatacaaatttttggatgatgatggatccatttctcctattgaggagtcaacagcagaggatgaggatgcaacacatcttgaagataacgaatgtgatatcaaattggcaggggatagtttcatagtaagttctgaattccctgtaagactgagtgtatacttagaagaagaggatattactgaagaagctgctttgtctaaaaagagagctacaaaagccaaaaatactggacagagaggcctgaaaatgtgacaggatcatgaatgtcaaaggcttttatcttgagaacatggtgtctggagttaaaggtattggcatactccacacatctgtaccattcttgagtgatcgcttaggaatgaatgtgatttgaactcattcatgttgagagggtgtcaaattgagaaccaggtagatccccaccacctacagtaaaaaggaccctaaagtaaattggttgaagaaattagatcccaaagattcttggtgaattttgaagtcttcatcagtatatccatattaaaacgagatgacagaagccaaagtaattatgggcaagtaatggtttttatcttaactataagttatttgctcaagggtgtaatggtcattaccaaggcttttagaatgcagtttctcatttgctgtggacatgaccataaaaaaatttcccagtaggttttctatctgctacgttgctagcaatcagcttattgggaacagttgattaactgtaatagaaatgcaatacaaataaaatgtgaaccacatgtgatttttctttaaaatcagtgagatttgaaaattctcctagatctcttgaatcatgcaaatttgctttgcctttatattgtaacccttgtgggttgctaataaccaagcagtttgtagtagagttaactcaggctcgttctagggactcattcatgttcactcactgtacactcatctctggaaatgtaaaatttacttttatactattgttatgtagggctgacaggacaactggatcagtttcattaaaaaggtatgtatgcattagaaaagacatttgtatgggtcatttcaaagagggcttatgaggctgtgaaacccagagctcttaacgctgtgaccaaagatggaagttctctataggaagccctatagcactcctaatgtttggtgctatgttttcctgaggagatataaaacgtaataatccatgattgttgccatgtgagagttttaaaggttaatcaaaatttctcttcttcagggcaaacttgaagataaatcttttgactccagctctttagaggatctaaagtgaccttgatggacagtggaagaaatcacaacatggaattcctcgaataacaatttattgactttaaataattttgtctaatgctacatatacacaattaaaaaacctttacactatttctagaaagtcagcatgtatttttggctcgaagtttctctagtgttttctgtggaaggaataaaaatttgagtttca

SEQ ID NO: 284151 - DNA, 913 bp, Homo sapiens
ttattagttcaagaaaaggcatacacatttattcaacatgtatacctggggagaaccagtcattaccccgatgttcattattttgatcaccacgatagagctgactactctgctatgtagtgcattttgggactgcacttatgtatgtttttgtttaacgtggacaaagacttacagataggtgcaaaaaataaatcctcttttgcaacccagaactcattgttcagtatgagttttgatacatataagaagggatattatgatacctgagacagttgattgatgggagtattgatagccataaaggttggttccaggccaggtgcaatgggtcaagcctgcaatccccacaccaaggtgggagtattgcttgaaaccaggagttcaagaccagcctaggcaagaaagcttttatcttgagaacatggtgtctggagttaaagataatctacttttttaccttaggtattggcatactccacacatctgtaccattcttgagtgatcgcttaggaatgaatgtgatttgaactcattcatgttgagagggtgtcaaattgagaaccaggtagatccccaccacctacagtaaaaaggaccctaaagtaaattggttgaagaaattagatcccaaagattcttggtgaattttgaagtcttcatcagtatatccatattaaaacgagatgacagaagccaaagtaattatgggctgacaggacaactggatcagtttcattaaaaagggcaaacttgaagataaatcttttgactccagctctttagaggatctaaagtgaccttgatggacagtggaagaaatcacaacatggaattcctcgaataacaatttattgactttaaataattttgtctaatgctacatatacacaattaaaaaacctttacacta

SEQ ID NO: 284152 - DNA, 383 bp, Homo sapiens
tacttggggtgccgggtttcaggatactttggaacctaagcaacctcattcttgaaagatagatttatgtacttaatagtaaatataaatttgaaatacacatttttccacaggtgaattttgaagtcttcatcagtatatccatattaaaacgagatgacagaagccaaagtaattatgggctgacaggacaactggatcagtttcattaaaaagggcaaacttgaagataaatcttttgactccagctctttagaggatctaaagtgaccttgatggacagtggaagaaatcacaacatggaattcctcgaataacaatttattgactttaaataattttgtctaatgctacatatacacaattaaaaaacctttacacta

SEQ ID NO: 284153 - DNA, 1231 bp, Homo sapiens
gtattttataatggatgacaattaattttgagccaagaattaaaatttgctgaaatcttcgaattgggaaaacaacatcctctgttgcatactgaagttcataacaacagttagactttaaacttaaatcttaagtttaaatctttttcctttggttcatgtaaaggagctacttgatgttactttttatttatcattcctctggctcctaagcacaacgtgattgtgaaattattgtttttgtgattaacgtagtaggaagtttctgcagttggcaatattgtaagagcatattgcagtttctgctcataatttctttcctatggagtgttagactttgttatttatgtgtataaatactagctggacacagtggtgcctgtggtccccagctactctggaggctaaggcaggagaaacacttgagcccagcggtttgaggctacagtgagatgtgatcctgccacatctcactgtagcatcgaacccctgggctcaagtgattcagcaagaatcacacgatttttaaaagacatggcagatcctgtgtctttaaaaaaaaatcaaaaccttgtaaatagtggttgaggtctatcccgatggggcttttcctgtagcctgcacatcgttggaaacgcctcatagagtaactctgtggttttactttactcacaggactattgttagatctgtgggaaggaattacaagacagttgctaaaagtttgaaaaagacggttgctaaacgttatgaaaaaccagataatctacttttttaccttaggtattggcatactccacacatctgtaccattcttgagtgatcgcttaggaatgaatgtgatttgaactcattcatgttgagagggtgtcaaattgagaaccaggtagatccccaccacctacagtaaaaaggaccctaaagtaaattggttgaagaaattagatcccaaagattcttggtgaattttgaagtcttcatcagtatatccatattaaaacgagatgacagaagccaaagtaattatgggctgacaggacaactggatcagtttcattaaaaagggcaaacttgaagataaatcttttgactccagctctttagaggatctaaagtgaccttgatggacagtggaagaaatcacaacatggaattcctcgaataacaatttattgactttaaataattttgtctaatgctacatatacacaattaaaaaacctttacacta

SEQ ID NO: 284154 - DNA, 1596 bp, Homo sapiens
tggaggtgattggattaacaattttattctgcatccactacaaaagggctggtgttttgttccaaatgtttagctgggagggctgtcgggagggtggtgtgtacagagctctaggactcacgcaccaggccagtcgcgggttttgggccgaggcctgggttacaagcagcaagtgcgcggttggggccactgcgaggccgttttagaaaactgtttaaaacaaagagcaattgatggataaatcaggaatagattctcttgaccatgtgacatctgatgctgtggaacttgcaaatcgaagtgataactcttctgatagcagcttatttaaaactcagtgtatcccttactcacctaaaggggagaaaagaaaccccattcgaaaatttgttcgtacacctgaaagtgttcacgcaagtgattcatcaagtgactcatcttttgaaccaataccattgactataaaagctatttttgaaagattcaagaacaggaaaaagagatataaaaaaaagaaaaagaggaggtaccagccaacaggaagaccacggggaagaccagaaggaaggagaaatcctatatactcactaatagataagaagaaacaatttagaagcagaggatctggcttcccatttttagaatcagagaatgaaaaaaacgcaccttggagaaaaattttaacgtttgagcaagctgttgcaagaggattttttaactatattgaaaaactgaagtatgaacaccacctgaaagaatcattgaagcaaatgaatgttggtgaagatttagaaaatgaagattttgacagtcgtagatacaaatttttggatgatgatggatccatttctcctattgaggagtcaacagcagaggatgaggatgcaacacatcttgaagataacgaatgtgatatcaaattggcaggggatagtttcatagtaagttctgaattccctgtaagactgagtgtatacttagaagaagaggatattactgaagaagctgctttgtctaaaaagagagctacaaaagccaaaaatactggacagagaggcctgaaaatgtgacaggatcatgaatgtcaaaggcttttatcttgagaacatggtgtctggagttaaagataatctacttttttaccttaggtattggcatactccacacatctgtaccattcttgagtgatcgcttaggaatgaatgtgatttgaactcattcatgttgagagggtgtcaaattgagaaccaggtagatccccaccacctacagtaaaaaggaccctaaagtaaattggttgaagaaattagatcccaaagattcttggtgaattttgaagtcttcatcagtatatccatattaaaacgagatgacagaagccaaagtaattatgggctgacaggacaactggatcagtttcattaaaaagggcaaacttgaagataaatcttttgactccagctctttagaggatctaaagtgaccttgatggacagtggaagaaatcacaacatggaattcctcgaataacaatttattgactttaaataattttgtctaatgctacatatacacaattaaaaaacctttacacta

SEQ ID NO: 284155 - DNA, 1574 bp, Homo sapiens
tggaggtgattggattaacaattttattctgcatccactacaaaagggctggtgttttgttccaaatgtttagctgggagggctgtcgggagggtggtgtgtacagagctctaggactcacgcaccaggccagtcgcgggttttgggccgaggcctgggttacaagcagcaagtgcgcggttggggccactgcgaggccgttttagaaaactgtttaaaacaaagagcaattgatggataaatcaggaatagattctcttgaccatgtgacatctgatgctgtggaacttgcaaatcgaagtgataactcttctgatagcagcttatttaaaactcagtgtatcccttactcacctaaaggggagaaaagaaaccccattcgaaaatttgttcgtacacctgaaagtgttcacgcaagtgattcatcaagtgactcatcttttgaaccaataccattgactataaaagctatttttgaaagattcaagaacaggaaaaagagatataaaaaaaagaaaaagaggaggtaccagccaacaggaagaccacggggaagaccagaaggaaggagaaatcctatatactcactaatagataagaagaaacaatttagaagcagaggatctggcttcccatttttagaatcagagaatgaaaaaaacgcaccttggagaaaaattttaacgtttgagcaagctgttgcaagaggattttttaactatattgaaaaactgaagtatgaacaccacctgaaagaatcattgaagcaaatgaatgttggtgaagatttagaaaatgaagattttgacagtcgtagatacaaatttttggatgatgatggatccatttctcctattgaggagtcaacagcagaggatgaggatgcaacacatcttgaagataacgaatgtgatatcaaattggcaggggatagtttcatagtaagttctgaattccctgtaagactgagtgtatacttagaagaagaggatattactgaagaagctgctttgtctaaaaagagagctacaaaagccaaaaatactggacagagaggcctgaaaatgtgacaggatcatgaatgtcaaaggcttttatcttgagaacatggtgtctggagttaaaggtattggcatactccacacatctgtaccattcttgagtgatcgcttaggaatgaatgtgatttgaactcattcatgttgagagggtgtcaaattgagaaccaggtagatccccaccacctacagtaaaaaggaccctaaagtaaattggttgaagaaattagatcccaaagattcttggtgaattttgaagtcttcatcagtatatccatattaaaacgagatgacagaagccaaagtaattatgggctgacaggacaactggatcagtttcattaaaaagggcaaacttgaagataaatcttttgactccagctctttagaggatctaaagtgaccttgatggacagtggaagaaatcacaacatggaattcctcgaataacaatttattgactttaaataattttgtctaatgctacatatacacaattaaaaaacctttacacta

SEQ ID NO: 284156 - DNA, 2510 bp, Homo sapiens
aagaccagaaggaaggagaaatcctatatactcactaatagataagaagaaacaatttagaagcagaggatctggcttcccatttttagaatcagagaatgaaaaaaacgcaccttggagaaaaattttaacgtttgagcaagctgttgcaagaggattttttagattctcttgaccatgtgacatctgatgctgtggaacttgcaaatcgaagtgataactcttctgatagcagcttatttaaaactcagtgtatcccttactcacctaaaggggagaaaagaaaccccattcgaaaatttgttcgtacacctgaaagtgttcacgcaagtgattcatcaagtgactcatcttttgaaccaataccattgactataaaagctatttttgaaagattcaagaacaggaaaaagagatataaaaaaaagaaaaagaggaggtaccagccaacaggaagaccacggggaagaccagaaggaaggagaaatcctatatactcactaatagataagaagaaacaatttagaagcagaggatctggcttcccatttttagaatcagagaatgaaaaaaacgcaccttggagaaaaattttaacgtttgagcaagctgttgcaagaggattttttaactatattgaaaaactgaagtatgaacaccacctgaaagaatcattgaagcaaatgaatgttggtgaagatttagaaaatgaagattttgacagtcgtagatacaaatttttggatgatgatggatccatttctcctattgaggagtcaacagcagaggatgaggatgcaacacatcttgaagataacgaatgtgatatcaaattggcaggggatagtttcatagtaagttctgaattccctgtaagactgagtgtatacttagaagaagaggatattactgaagaagctgctttgtctaaaaagagagctacaaaagccaaaaatactggacagagaggcctgaaaatgtgacaggatcatgaatgtcaaaggcttttatcttgagaacatggtgtctggagttaaaggtattggcatactccacacatctgtaccattcttgagtgatcgcttaggtaagttttaattggtgacagtataatcttttgggaaataatgattacagttcagatgatgaatttaactgttcaactgctgaatgataacgggcatgaactaaaacttaattctgacagagctggatatggctgtataataaactggatcttaaatttatacttgggttttagttttaataactggaaatgtatcctttctaaatctttaattggtactttctataggaatgaatgtgatttgaactcattcatgttgagaggtaagtaaaatatttaacttataataatcaaggactcaaaagatgaaaaatagaaattacaccatcccagtatttcaggtataacacagaattagtaagatactggcaaaaatattacaatgtatatatttgtatagagaaggaaaatgaagagactgcatgtctatacctaccaaacgaaactacctgtgttctttgcatcattattcaactggcagttacacatatttcatcctaaagtcacgtaaacctgtgtggatatgttgaatcaatagggatatgaattacataaaaagaattttgtgtaactggcagtttgagcaacaatgagcttgacgtttgttgtctgatctgttaagttacatgtatatattccatctttaagttttatagagagactgggcaaagattaggcaaagactagagttgtagcttaaaatgtagttaatgtagcttccttattacagtgacaattaggaaaaaagctcaaattattgtacttgttaaaggaatttgagaggtttgtgaaagcatttctcagcaatattgcaaatttgggaatacgagttgtacagttcagtcataattgcactgcatggtatctgcactcagcagtttacacctgctagggtgttcaaaggtcagtgctatagaaattcagtatctggcatcgttggttttcttggctttgtgcttgttaaacctggtatttctactgatacagtatttgtgtaggtttctcagagtgttcagtttgatatactctaaaatagtaagcaatgcttttttttccagggtgtcaaattgagaaccaggtagatccccaccacctacagtaaaaaggaccctaaagtaaattggttgaagaaattagatcccaaagattcttggtgaattttgaagtcttcatcagtatatccatattaaaacgagatgacagaagccaaagtaattatgggctgacaggacaactggatcagtttcattaaaaagggcaaacttgaagataaatcttttgactccagctctttagaggatctaaagtgaccttgatggacagtggaagaaatcacaacatggaattcctcgaataacaatttattgactttaaataattttgtctaatgctacatatacacaattaaaaaacctttacacta

SEQ ID NO: 284157 - DNA, 2676 bp, Homo sapiens
tggaggtgattggattaacaattttattctgcatccactacaaaagggctggtgttttgttccaaatgtttagctgggagggctgtcgggagggtggtgtgtacagagctctaggactcacgcaccaggccagtcgcgggttttgggccgaggcctgggttacaagcagcaagtgcgcggttggggccactgcgaggccgttttagaaaactgtttaaaacaaagagcaattgatggataaatcaggaatagattctcttgaccatgtgacatctgatgctgtggaacttgcaaatcgaagtgataactcttctgatagcagcttatttaaaactcagtgtatcccttactcacctaaaggggagaaaagaaaccccattcgaaaatttgttcgtacacctgaaagtgttcacgcaagtgattcatcaagtgactcatcttttgaaccaataccattgactataaaagctatttttgaaagattcaagaacaggaaaaagagatataaaaaaaagaaaaagaggaggtaccagccaacaggaagaccacggggaagaccagaaggaaggagaaatcctatatactcactaatagataagaagaaacaatttagaagcagaggatctggcttcccatttttagaatcagagaatgaaaaaaacgcaccttggagaaaaattttaacgtttgagcaagctgttgcaagaggattttttaactatattgaaaaactgaagtatgaacaccacctgaaagaatcattgaagcaaatgaatgttggtgaagatttagaaaatgaagattttgacagtcgtagatacaaatttttggatgatgatggatccatttctcctattgaggagtcaacagcagaggatgaggatgcaacacatcttgaagataacgaatgtgatatcaaattggcaggggatagtttcatagtaagttctgaattccctgtaagactgagtgtatacttagaagaagaggatattactgaagaagctgctttgtctaaaaagagagctacaaaagccaaaaatactggacagagaggcctgaaaatgtgacaggatcatgaatgtcaaaggcttttatcttgagaacatggtgtctggagttaaaggtattggcatactccacacatctgtaccattcttgagtgatcgcttaggtaagttttaattggtgacagtataatcttttgggaaataatgattacagttcagatgatgaatttaactgttcaactgctgaatgataacgggcatgaactaaaacttaattctgacagagctggatatggctgtataataaactggatcttaaatttatacttgggttttagttttaataactggaaatgtatcctttctaaatctttaattggtactttctataggaatgaatgtgatttgaactcattcatgttgagaggtaagtaaaatatttaacttataataatcaaggactcaaaagatgaaaaatagaaattacaccatcccagtatttcaggtataacacagaattagtaagatactggcaaaaatattacaatgtatatatttgtatagagaaggaaaatgaagagactgcatgtctatacctaccaaacgaaactacctgtgttctttgcatcattattcaactggcagttacacatatttcatcctaaagtcacgtaaacctgtgtggatatgttgaatcaatagggatatgaattacataaaaagaattttgtgtaactggcagtttgagcaacaatgagcttgacgtttgttgtctgatctgttaagttacatgtatatattccatctttaagttttatagagagactgggcaaagattaggcaaagactagagttgtagcttaaaatgtagttaatgtagcttccttattacagtgacaattaggaaaaaagctcaaattattgtacttgttaaaggaatttgagaggtttgtgaaagcatttctcagcaatattgcaaatttgggaatacgagttgtacagttcagtcataattgcactgcatggtatctgcactcagcagtttacacctgctagggtgttcaaaggtcagtgctatagaaattcagtatctggcatcgttggttttcttggctttgtgcttgttaaacctggtatttctactgatacagtatttgtgtaggtttctcagagtgttcagtttgatatactctaaaatagtaagcaatgcttttttttccagggtgtcaaattgagaaccaggtagatccccaccacctacagtaaaaaggaccctaaagtaaattggttgaagaaattagatcccaaagattcttggtgaattttgaagtcttcatcagtatatccatattaaaacgagatgacagaagccaaagtaattatgggctgacaggacaactggatcagtttcattaaaaagggcaaacttgaagataaatcttttgactccagctctttagaggatctaaagtgaccttgatggacagtggaagaaatcacaacatggaattcctcgaataacaatttattgactttaaataattttgtctaatgctacatatacacaattaaaaaacctttacactatttctagaaagtcagcatgtatttttggctcgaagtttctctagtgttttctgtggaaggaataaaaatttgagtttca

SEQ ID NO: 284158 - DNA, 3345 bp, Homo sapiens
tggaggtgattggattaacaattttattctgcatccactacaaaagggctggtgttttgttccaaatgtttagctgggagggctgtcgggagggtggtgtgtacagagctctaggactcacgcaccaggccagtcgcgggttttgggccgaggcctgggttacaagcagcaagtgcgcggttggggccactgcgaggccgttttagaaaactgtttaaaacaaagagcaattgatggataaatcaggaatagattctcttgaccatgtgacatctgatgctgtggaacttgcaaatcgaagtgataactcttctgatagcagcttatttaaaactcagtgtatcccttactcacctaaaggggagaaaagaaaccccattcgaaaatttgttcgtacacctgaaagtgttcacgcaagtgattcatcaagtgactcatcttttgaaccaataccattgactataaaagctatttttgaaagattcaagaacaggaaaaagagatataaaaaaaagaaaaagaggaggtaccagccaacaggaagaccacggggaagaccagaaggaaggagaaatcctatatactcactaatagataagaagaaacaatttagaagcagaggatctggcttcccatttttagaatcagagaatgaaaaaaacgcaccttggagaaaaattttaacgtttgagcaagctgttgcaagaggattttttaactatattgaaaaactgaagtatgaacaccacctgaaagaatcattgaagcaaatgaatgttggtgaagatttagaaaatgaagattttgacagtcgtagatacaaatttttggatgatgatggatccatttctcctattgaggagtcaacagcagaggatgaggatgcaacacatcttgaagataacgaatgtgatatcaaattggcaggggatagtttcatagtaagttctgaattccctgtaagactgagtgtatacttagaagaagaggatattactgaagaagctgctttgtctaaaaagagagctacaaaagccaaaaatactggacagagaggcctgaaaatgtgacaggatcatgaatgtcaaaggcttttatcttgagaacatggtgtctggagttaaaggtattggcatactccacacatctgtaccattcttgagtgatcgcttaggtaagttttaattggtgacagtataatcttttgggaaataatgattacagttcagatgatgaatttaactgttcaactgctgaatgataacgggcatgaactaaaacttaattctgacagagctggatatggctgtataataaactggatcttaaatttatacttgggttttagttttaataactggaaatgtatcctttctaaatctttaattggtactttctataggaatgaatgtgatttgaactcattcatgttgagaggtaagtaaaatatttaacttataataatcaaggactcaaaagatgaaaaatagaaattacaccatcccagtatttcaggtataacacagaattagtaagatactggcaaaaatattacaatgtatatatttgtatagagaaggaaaatgaagagactgcatgtctatacctaccaaacgaaactacctgtgttctttgcatcattattcaactggcagttacacatatttcatcctaaagtcacgtaaacctgtgtggatatgttgaatcaatagggatatgaattacataaaaagaattttgtgtaactggcagtttgagcaacaatgagcttgacgtttgttgtctgatctgttaagttacatgtatatattccatctttaagttttatagagagactgggcaaagattaggcaaagactagagttgtagcttaaaatgtagttaatgtagcttccttattacagtgacaattaggaaaaaagctcaaattattgtacttgttaaaggaatttgagaggtttgtgaaagcatttctcagcaatattgcaaatttgggaatacgagttgtacagttcagtcataattgcactgcatggtatctgcactcagcagtttacacctgctagggtgttcaaaggtcagtgctatagaaattcagtatctggcatcgttggttttcttggctttgtgcttgttaaacctggtatttctactgatacagtatttgtgtaggtttctcagagtgttcagtttgatatactctaaaatagtaagcaatgcttttttttccagggtgtcaaattgagaaccaggtagatccccaccacctacagtaaaaaggaccctaaagtaaattggttgaagaaattagatcccaaagattcttggtgaattttgaagtcttcatcagtatatccatattaaaacgagatgacagaagccaaagtaattatgggcaagtaatggtttttatcttaactataagttatttgctcaagggtgtaatggtcattaccaaggcttttagaatgcagtttctcatttgctgtggacatgaccataaaaaaatttcccagtaggttttctatctgctacgttgctagcaatcagcttattgggaacagttgattaactgtaatagaaatgcaatacaaataaaatgtgaaccacatgtgatttttctttaaaatcagtgagatttgaaaattctcctagatctcttgaatcatgcaaatttgctttgcctttatattgtaacccttgtgggttgctaataaccaagcagtttgtagtagagttaactcaggctcgttctagggactcattcatgttcactcactgtacactcatctctggaaatgtaaaatttacttttatactattgttatgtagggctgacaggacaactggatcagtttcattaaaaaggtatgtatgcattagaaaagacatttgtatgggtcatttcaaagagggcttatgaggctgtgaaacccagagctcttaacgctgtgaccaaagatggaagttctctataggaagccctatagcactcctaatgtttggtgctatgttttcctgaggagatataaaacgtaataatccatgattgttgccatgtgagagttttaaaggttaatcaaaatttctcttcttcagggcaaacttgaagataaatcttttgactccagctctttagaggatctaaagtgaccttgatggacagtggaagaaatcacaacatggaattcctcgaataacaatttattgactttaaataattttgtctaatgctacatatacacaattaaaaaacctttacactatttctagaaagtcagcatgtatttttggctcgaagtttctctagtgttttctgtggaaggaataaaaatttgagtttca

SEQ ID NO: 284159 - DNA, 2043 bp, Homo sapiens
tggaggtgattggattaacaattttattctgcatccactacaaaagggctggtgttttgttccaaatgtttagctgggagggctgtcgggagggtggtgtgtacagagctctaggactcacgcaccaggccagtcgcgggttttgggccgaggcctgggttacaagcagcaagtgcgcggttggggccactgcgaggccgttttagaaaactgtttaaaacaaagagcaattgatggataaatcaggaatagattctcttgaccatgtgacatctgatgctgtggaacttgcaaatcgaagtgataactcttctgatagcagcttatttaaaactcagtgtatcccttactcacctaaaggggagaaaagaaaccccattcgaaaatttgttcgtacacctgaaagtgttcacgcaagtgattcatcaagtgactcatcttttgaaccaataccattgactataaaagctatttttgaaagattcaagaacaggaaaaagagatataaaaaaaagaaaaagaggaggtaccagccaacaggaagaccacggggaagaccagaaggaaggagaaatcctatatactcactaatagataagaagaaacaatttagaagcagaggatctggcttcccatttttagaatcagagaatgaaaaaaacgcaccttggagaaaaattttaacgtttgagcaagctgttgcaagaggattttttaactatattgaaaaactgaagtatgaacaccacctgaaagaatcattgaagcaaatgaatgttggtgaagatttagaaaatgaagattttgacagtcgtagatacaaatttttggatgatgatggatccatttctcctattgaggagtcaacgcttttatcttgagaacatggtgtctggagttaaaggtattggcatactccacacatctgtaccattcttgagtgatcgcttaggaatgaatgtgatttgaactcattcatgttgagagtaagcaatgcttttttttccagggtgtcaaattgagaaccaggtagatccccaccacctacagtaaaaaggaccctaaagtaaattggttgaagaaattagatcccaaagattcttggtgaattttgaagtcttcatcagtatatccatattaaaacgagatgacagaagccaaagtaattatgggcaagtaatggtttttatcttaactataagttatttgctcaagggtgtaatggtcattaccaaggcttttagaatgcagtttctcatttgctgtggacatgaccataaaaaaatttcccagtaggttttctatctgctacgttgctagcaatcagcttattgggaacagttgattaactgtaatagaaatgcaatacaaataaaatgtgaaccacatgtgatttttctttaaaatcagtgagatttgaaaattctcctagatctcttgaatcatgcaaatttgctttgcctttatattgtaacccttgtgggttgctaataaccaagcagtttgtagtagagttaactcaggctcgttctagggactcattcatgttcactcactgtacactcatctctggaaatgtaaaatttacttttatactattgttatgtagggctgacaggacaactggatcagtttcattaaaaaggtatgtatgcattagaaaagacatttgtatgggtcatttcaaagagggcttatgaggctgtgaaacccagagctcttaacgctgtgaccaaagatggaagttctctataggaagccctatagcactcctaatgtttggtgctatgttttcctgaggagatataaaacgtaataatccatgattgttgccatgtgagagttttaaaggttaatcaaaatttctcttcttcagggcaaacttgaagataaatcttttgactccagctctttagaggatctaaagtgaccttgatggacagtggaagaaatcacaacatggaattcctcgaataacaatttattgactttaaataattttgtctaatgctacatatacacaattaaaaaacctttacacta

SEQ ID NO: 284160 - DNA, 1221 bp, Homo sapiens
cggtacccagttcgacggagactctcgaatgaatgtgatttgaactcattcatgttgagaggtaagtaaaatatttaacttataataatcaaggactcaaaagatgaaaaatagaaattacaccatcccagtatttcaggtataacacagaattagtaagatactggcaaaaatattacaatgtatatatttgtatagagaaggaaaatgaagagactgcatgtctatacctaccaaacgaaactacctgtgttctttgcatcattattcaactggcagttacacatatttcatcctaaagtcacgtaaacctgtgtggatatgttgaatcaatagggatatgaattacataaaaagaattttgtgtaactggcagtttgagcaacaatgagcttgacgtttgttgtctgatctgttaagttacatgtatatattccatctttaagttttatagagagactgggcaaagattaggcaaagactagagttgtagcttaaaatgtagttaatgtagcttccttattacagtgacaattaggaaaaaagctcaaattattgtacttgttaaaggaatttgagaggtttgtgaaagcatttctcagcaatattgcaaatttgggaatacgagttgtacagttcagtcataattgcactgcatggtatctgcactcagcagtttacacctgctagggtgttcaaaggtcagtgctatagaaattcagtatctggcatcgttggttttcttggctttgtgcttgttaaacctggtatttctactgatacagtatttgtgtaggtttctcagagtgttcagtttgatatactctaaaatagtaagcaatgcttttttttccagggtgtcaaattgagaaccaggtagatccccaccacctacagtaaaaaggaccctaaagtaaattggttgaagaaattagatcccaaagattcttggtgaattttgaagtcttcatcagtatatccatattaaaacgagatgacagaagccaaagtaattatgggctgacaggacaactggatcagtttcattaaaaagggcaaacttgaagataaatcttttgactccagctctttagaggatctaaagtgaccttgatggacagtggaagaaatcacaacatggaattcctcgaataacaatttattgactttaaataattttgtctaatgctacatatacacaattaaaaaacctttacacta

SEQ ID NO: 284161 - DNA, 3632 bp, Homo sapiens
  misc_feature (3632)..(3632): n is a, c, g, or t
tggaggtgattggattaacaattttattctgcatccactacaaaagggctggtgttttgttccaaatgtttagctgggagggctgtcgggagggtggtgtgtacagagctctaggactcacgcaccaggccagtcgcgggttttgggccgaggcctgggttacaagcagcaagtgcgcggttggggccactgcgaggccgttttagaaaactgtttaaaacaaagagcaattgatggataaatcaggaatagattctcttgaccatgtgacatctgatgctgtggaacttgcaaatcgaagtgataactcttctgatagcagcttatttaaaactcagtgtatcccttactcacctaaaggggagaaaagaaaccccattcgaaaatttgttcgtacacctgaaagtgttcacgcaagtgattcatcaagtgactcatcttttgaaccaataccattgactataaaagctatttttgaaagattcaagaacaggaaaaagagatataaaaaaaagaaaaagaggaggtaccagccaacaggaagaccacggggaagaccagaaggaaggagaaatcctatatactcactaatagataagaagaaacaatttagaagcagaggatctggcttcccatttttagaatcagagaatgaaaaaaacgcaccttggagaaaaattttaacgtttgagcaagctgttgcaagaggattttttaactatattgaaaaactgaagtatgaacaccacctgaaagaatcattgaagcaaatgaatgttggtgaagatttagaaaatgaagattttgacagtcgtagatacaaatttttggatgatgatggatccatttctcctattgaggagtcaacagcagaggatgaggatgcaacacatcttgaagataacgaatgtgatatcaaattggcaggggatagtttcatagtaagttctgaattccctgtaagactgagtgtatacttagaagaagaggatattactgaagaagctgctttgtctaaaaagagagctacaaaagccaaaaatactggacagagaggcctgaaaatgtgacaggatcatgaatgtcaaaggcttttatcttgagaacatggtgtctggagttaaaggtattggcatactccacacatctgtaccattcttgagtgatcgcttaggtaagttttaattggtgacagtataatcttttgggaaataatgattacagttcagatgatgaatttaactgttcaactgctgaatgataacgggcatgaactaaaacttaattctgacagagctggatatggctgtataataaactggatcttaaatttatacttgggttttagttttaataactggaaatgtatcctttctaaatctttaattggtactttctataggaatgaatgtgatttgaactcattcatgttgagaggtaagtaaaatatttaacttataataatcaaggactcaaaagatgaaaaatagaaattacaccatcccagtatttcaggtataacacagaattagtaagatactggcaaaaatattacaatgtatatatttgtatagagaaggaaaatgaagagactgcatgtctatacctaccaaacgaaactacctgtgttctttgcatcattattcaactggcagttacacatatttcatcctaaagtcacgtaaacctgtgtggatatgttgaatcaatagggatatgaattacataaaaagaattttgtgtaactggcagtttgagcaacaatgagcttgacgtttgttgtctgatctgttaagttacatgtatatattccatctttaagttttatagagagactgggcaaagattaggcaaagactagagttgtagcttaaaatgtagttaatgtagcttccttattacagtgacaattaggaaaaaagctcaaattattgtacttgttaaaggaatttgagaggtttgtgaaagcatttctcagcaatattgcaaatttgggaatacgagttgtacagttcagtcataattgcactgcatggtatctgcactcagcagtttacacctgctagggtgttcaaaggtcagtgctatagaaattcagtatctggcatcgttggttttcttggctttgtgcttgttaaacctggtatttctactgatacagtatttgtgtaggtttctcagagtgttcagtttgatatactctaaaatagtaagcaatgcttttttttccagggtgtcaaattgagaaccaggtagatccccaccacctacagtaaaaaggaccctaaagtaaattggttgaagaaattagatcccaaagattcttggtgaattttgaagtcttcatcagtatatccatattaaaacgagatgacagaagccaaagtaattatgggcaagtaatggtttttatcttaactataagttatttgctcaagggtgtaatggtcattaccaaggcttttagaatgcagtttctcatttgctgtggacatgaccataaaaaaatttcccagtaggttttctatctgctacgttgctagcaatcagcttattgggaacagttgattaactgtaatagaaatgcaatacaaataaaatgtgaaccacatgtgatttttctttaaaatcagtgagatttgaaaattctcctagatctcttgaatcatgcaaatttgctttgcctttatattgtaacccttgtgggttgctaataaccaagcagtttgtagtagagttaactcaggctcgttctagggactcattcatgttcactcactgtacactcatctctggaaatgtaaaatttacttttatactattgttatgtagggctgacaggacaactggatcagtttcattaaaaaggtatgtatgcattagaaaagacatttgtatgggtcatttcaaagagggcttatgaggctgtgaaacccagagctcttaacgctgtgaccaaagatggaagttctctataggaagccctatagcactcctaatgtttggtgctatgttttcctgaggagatataaaacgtaataatccatgattgttgccatgtgagagttttaaaggttaatcaaaatttctcttcttcagggcaaacttgaagataaatcttttgactccagctctttagaggatctaaagtgaccttgatggacagtggaagaaatcacaacatggaattcctcgaataacaatttattgactttaaataattttgtctaatgctacatatacacaattaaaaaacctttacactaaaaaaaaaaaaaaaaaaaaaaaaaaaaaaaaaaaaaaaaaaaaaaaaaaaaaaaaaaaaaaaaaaaaaaaaaaaaaaaaaaaaaaaaaaaaaaaaaaaaaaaagggggggcgcgcgccgcgcgcgacagaaaagagaacacaaacacaaaaggaggggaagagcagacacagagaagagaaaagaagaagagagaaagaggtgaaagagaagacagaggagagaaagagagggcggaggcacacacaagaaaaaaaaagcgcgggagagcaacaagaggagtaagaaaccacccacaagaggagacaagagagacagcgcgaagcaacacaaaaggaggacaagcagaggggaaataaaaaaacgn

SEQ ID NO: 284162 - DNA, 1631 bp, Homo sapiens
ttagaggatccacactgaagactgtcagaatcatcctccatcactagatcttctccaccagtcatgttccctgagcagtggggtggcttgaaggtataaaccagagaggcccaagggagggatagttagcagacttctggtctttttctagtttgtgctcttcttctaagtatacactcagtcttacaggggatagtttcatagtaagttctgaattccctgtaagactgagtgtatacttagaagaagaggatattactgaagaagctgctttgtctaaaaagagagctacaaaagccaaaaatactggacagagaggcctgaaaatgtgacaggatcatgaatgtcaaaggcttttatcttgagaacatggtgtctggagttaaaggtattggcatactccacacatctgtaccattcttgagtgatcgcttaggaatgaatgtgatttgaactcattcatgttgagaggtaagtaaaatatttaacttataataatcaaggactcaaaagatgaaaaatagaaattacaccatcccagtatttcaggtataacacagaattagtaagatactggcaaaaatattacaatgtatatatttgtatagagaaggaaaatgaagagactgcatgtctatacctaccaaacgaaactacctgtgttctttgcatcattattcaactggcagttacacatatttcatcctaaagtcacgtaaacctgtgtggatatgttgaatcaatagggatatgaattacataaaaagaattttgtgtaactggcagtttgagcaacaatgagcttgacgtttgttgtctgatctgttaagttacatgtatatattccatctttaagttttatagagagactgggcaaagattaggcaaagactagagttgtagcttaaaatgtagttaatgtagcttccttattacagtgacaattaggaaaaaagctcaaattattgtacttgttaaaggaatttgagaggtttgtgaaagcatttctcagcaatattgcaaatttgggaatacgagttgtacagttcagtcataattgcactgcatggtatctgcactcagcagtttacacctgctagggtgttcaaaggtcagtgctatagaaattcagtatctggcatcgttggttttcttggctttgtgcttgttaaacctggtatttctactgatacagtatttgtgtaggtttctcagagtgttcagtttgatatactctaaaatagtaagcaatgcttttttttccagggtgtcaaattgagaaccaggtagatccccaccacctacagtaaaaaggaccctaaagtaaattggttgaagaaattagatcccaaagattcttggtgaattttgaagtcttcatcagtatatccatattaaaacgagatgacagaagccaaagtaattatgggctgacaggacaactggatcagtttcattaaaaagggcaaacttgaagataaatcttttgactccagctctttagaggatctaaagtgaccttgatggacagtggaagaaatcacaacatggaattcctcgaataacaatttattgactttaaataattttgtctaatgctacatatacacaattaaaaaacctttacacta

SEQ ID NO: 284163 - DNA, 3114 bp, Homo sapiens
tggaggtgattggattaacaattttattctgcatccactacaaaagggctggtgttttgttccaaatgtttagctgggagggctgtcgggagggtggtgtgtacagagctctaggactcacgcaccaggccagtcgcgggttttgggccgaggcctgggttacaagcagcaagtgcgcggttggggccactgcgaggccgttttagaaaactgtttaaaacaaagagcaattgatggataaatcaggaatagattctcttgaccatgtgacatctgatgctgtggaacttgcaaatcgaagtgataactcttctgatagcagcttatttaaaactcagtgtatcccttactcacctaaaggggagaaaagaaaccccattcgaaaatttgttcgtacacctgaaagtgttcacgcaagtgattcatcaagtgactcatcttttgaaccaataccattgactataaaagctatttttgaaagattcaagaacaggaaaaagagatataaaaaaaagaaaaagaggaggtaccagccaacaggaagaccacggggaagaccagaaggaaggagaaatcctatatactcactaatagataagaagaaacaatttagaagcagaggatctggcttcccatttttagaatcagagaatgaaaaaaacgcaccttggagaaaaattttaacgtttgagcaagctgttgcaagaggattttttaactatattgaaaaactgaagtatgaacaccacctgaaagaatcattgaagcaaatgaatgttggtgaagatttagaaaatgaagattttgacagtcgtagatacaaatttttggatgatgatggatccatttctcctattgaggagtcaacagcagaggatgaggatgcaacacatcttgaagataacgaatgtgatatcaaattggcaggggatagtttcatagtaagttctgaattccctgtaagactgagtgtatacttagaagaagaggatattactgaagaagctgctttgtctaaaaagagagctacaaaagccaaaaatactggacagagaggcctgaaaatgtgacaggatcatgaatgtcaaaggcttttatcttgagaacatggtgtctggagttaaaggtattggcatactccacacatctgtaccattcttgagtgatcgcttaggtaagttttaattggtgacagtataatcttttgggaaataatgattacagttcagatgatgaatttaactgttcaactgctgaatgataacgggcatgaactaaaacttaattctgacagagctggatatggctgtataataaactggatcttaaatttatacttgggttttagttttaataactggaaatgtatcctttctaaatctttaattggtactttctataggaatgaatgtgatttgaactcattcatgttgagaggtaagtaaaatatttaacttataataatcaaggactcaaaagatgaaaaatagaaattacaccatcccagtatttcaggtataacacagaattagtaagatactggcaaaaatattacaatgtatatatttgtatagagaaggaaaatgaagagactgcatgtctatacctaccaaacgaaactacctgtgttctttgcatcattattcaactggcagttacacatatttcatcctaaagtcacgtaaacctgtgtggatatgttgaatcaatagggatatgaattacataaaaagaattttgtgtaactggcagtttgagcaacaatgagcttgacgtttgttgtctgatctgttaagttacatgtatatattccatctttaagttttatagagagactgggcaaagattaggcaaagactagagttgtagcttaaaatgtagttaatgtagcttccttattacagtgacaattaggaaaaaagctcaaattattgtacttgttaaaggaatttgagaggtttgtgaaagcatttctcagcaatattgcaaatttgggaatacgagttgtacagttcagtcataattgcactgcatggtatctgcactcagcagtttacacctgctagggtgttcaaaggtcagtgctatagaaattcagtatctggcatcgttggttttcttggctttgtgcttgttaaacctggtatttctactgatacagtatttgtgtaggtttctcagagtgttcagtttgatatactctaaaatagtaagcaatgcttttttttccagggtgtcaaattgagaaccaggtagatccccaccacctacagtaaaaaggaccctaaagtaaattggttgaagaaattagatcccaaagattcttggtgaattttgaagtcttcatcagtatatccatattaaaacgagatgacagaagccaaagtaattatgggcaagtaatggtttttatcttaactataagttatttgctcaagggtgtaatggtcattaccaaggcttttagaatgcagtttctcatttgctgtggacatgaccataaaaaaatttcccagtaggttttctatctgctacgttgctagcaatcagcttattgggaacagttgattaactgtaatagaaatgcaatacaaataaaatgtgaaccacatgtgatttttctttaaaatcagtgagatttgaaaattctcctagatctcttgaatcatgcaaatttgctttgcctttatattgtaacccttgtgggttgctaataaccaagcagtttgtagtagagttaactcaggctcgttctagggactcattcatgttcactcactgtacactcatctctggaaatgtaaaatttacttttatactattgttatgtagggctgacaggacaactggatcagtttcattaaaaagggcaaacttgaagataaatcttttgactccagctctttagaggatctaaagtgaccttgatggacagtggaagaaatcacaacatggaattcctcgaataacaatttattgactttaaataattttgtctaatgctacatatacacaattaaaaaacctttacactatttctagaaagtcagcatgtatttttggctcgaagtttctctagtgttttctgtggaaggaataaaaatttgagtttca

SEQ ID NO: 284164 - DNA, 3035 bp, Homo sapiens
tggaggtgattggattaacaattttattctgcatccactacaaaagggctggtgttttgttccaaatgtttagctgggagggctgtcgggagggtggtgtgtacagagctctaggactcacgcaccaggccagtcgcgggttttgggccgaggcctgggttacaagcagcaagtgcgcggttggggccactgcgaggccgttttagaaaactgtttaaaacaaagagcaattgatggataaatcaggaatagattctcttgaccatgtgacatctgatgctgtggaacttgcaaatcgaagtgataactcttctgatagcagcttatttaaaactcagtgtatcccttactcacctaaaggggagaaaagaaaccccattcgaaaatttgttcgtacacctgaaagtgttcacgcaagtgattcatcaagtgactcatcttttgaaccaataccattgactataaaagctatttttgaaagattcaagaacaggaaaaagagatataaaaaaaagaaaaagaggaggtaccagccaacaggaagaccacggggaagaccagaaggaaggagaaatcctatatactcactaatagataagaagaaacaatttagaagcagaggatctggcttcccatttttagaatcagagaatgaaaaaaacgcaccttggagaaaaattttaacgtttgagcaagctgttgcaagaggattttttaactatattgaaaaactgaagtatgaacaccacctgaaagaatcattgaagcaaatgaatgttggtgaagatttagaaaatgaagattttgacagtcgtagatacaaatttttggatgatgatggatccatttctcctattgaggagtcaacagcagaggatgaggatgcaacacatcttgaagataacgaatgtgatatcaaattggcaggggatagtttcatagtaagttctgaattccctgtaagactgagtgtatacttagaagaagaggatattactgaagaagctgctttgtctaaaaagagagctacaaaagccaaaaatactggacagagaggcctgaaaatgtgacaggatcatgaatgtcaaaggcttttatcttgagaacatggtgtctggagttaaaggtattggcatactccacacatctgtaccattcttgagtgatcgcttaggtaagttttaattggtgacagtataatcttttgggaaataatgattacagttcagatgatgaatttaactgttcaactgctgaatgataacgggcatgaactaaaacttaattctgacagagctggatatggctgtataataaactggatcttaaatttatacttgggttttagttttaataactggaaatgtatcctttctaaatctttaattggtactttctataggaatgaatgtgatttgaactcattcatgttgagaggtaagtaaaatatttaacttataataatcaaggactcaaaagatgaaaaatagaaattacaccatcccagtatttcaggtataacacagaattagtaagatactggcaaaaatattacaatgtatatatttgtatagagaaggaaaatgaagagactgcatgtctatacctaccaaacgaaactacctgtgttctttgcatcattattcaactggcagttacacatatttcatcctaaagtcacgtaaacctgtgtggatatgttgaatcaatagggatatgaattacataaaaagaattttgtgtaactggcagtttgagcaacaatgagcttgacgtttgttgtctgatctgttaagttacatgtatatattccatctttaagttttatagagagactgggcaaagattaggcaaagactagagttgtagcttaaaatgtagttaatgtagcttccttattacagtgacaattaggaaaaaagctcaaattattgtacttgttaaaggaatttgagaggtttgtgaaagcatttctcagcaatattgcaaatttgggaatacgagttgtacagttcagtcataattgcactgcatggtatctgcactcagcagtttacacctgctagggtgttcaaaggtcagtgctatagaaattcagtatctggcatcgttggttttcttggctttgtgcttgttaaacctggtatttctactgatacagtatttgtgtaggtttctcagagtgttcagtttgatatactctaaaatagtaagcaatgcttttttttccagggtgtcaaattgagaaccaggtagatccccaccacctacagtaaaaaggaccctaaagtaaattggttgaagaaattagatcccaaagattcttggtgaattttgaagtcttcatcagtatatccatattaaaacgagatgacagaagccaaagtaattatgggcaagtaatggtttttatcttaactataagttatttgctcaagggtgtaatggtcattaccaaggcttttagaatgcagtttctcatttgctgtggacatgaccataaaaaaatttcccagtaggttttctatctgctacgttgctagcaatcagcttattgggaacagttgattaactgtaatagaaatgcaatacaaataaaatgtgaaccacatgtgatttttctttaaaatcagtgagatttgaaaattctcctagatctcttgaatcatgcaaatttgctttgcctttatattgtaacccttgtgggttgctaataaccaagcagtttgtagtagagttaactcaggctcgttctagggactcattcatgttcactcactgtacactcatctctggaaatgtaaaatttacttttatactattgttatgtagggctgacaggacaactggatcagtttcattaaaaagggcaaacttgaagataaatcttttgactccagctctttagaggatctaaagtgaccttgatggacagtggaagaaatcacaacatggaattcctcgaataacaatttattgactttaaataattttgtctaatgctacatatacacaattaaaaaacctttacacta

SEQ ID NO: 284165 - DNA, 1653 bp, Homo sapiens
tggaggtgattggattaacaattttattctgcatccactacaaaagggctggtgttttgttccaaatgtttagctgggagggctgtcgggagggtggtgtgtacagagctctaggactcacgcaccaggccagtcgcgggttttgggccgaggcctgggttacaagcagcaagtgcgcggttggggccactgcgaggccgttttagaaaactgtttaaaacaaagagcaattgatggataaatcaggaatagattctcttgaccatgtgacatctgatgctgtggaacttgcaaatcgaagtgataactcttctgatagcagcttatttaaaactcagtgtatcccttactcacctaaaggggagaaaagaaaccccattcgaaaatttgttcgtacacctgaaagtgttcacgcaagtgattcatcaagtgactcatcttttgaaccaataccattgactataaaagctatttttgaaagattcaagaacaggaaaaagagatataaaaaaaagaaaaagaggaggtaccagccaacaggaagaccacggggaagaccagaaggaaggagaaatcctatatactcactaatagataagaagaaacaatttagaagcagaggatctggcttcccatttttagaatcagagaatgaaaaaaacgcaccttggagaaaaattttaacgtttgagcaagctgttgcaagaggattttttaactatattgaaaaactgaagtatgaacaccacctgaaagaatcattgaagcaaatgaatgttggtgaagatttagaaaatgaagattttgacagtcgtagatacaaatttttggatgatgatggatccatttctcctattgaggagtcaacagcagaggatgaggatgcaacacatcttgaagataacgaatgtgatatcaaattggcaggggatagtttcatagtaagttctgaattccctgtaagactgagtgtatacttagaagaagaggatattactgaagaagctgctttgtctaaaaagagagctacaaaagccaaaaatactggacagagaggcctgaaaatgtgacaggatcatgaatgtcaaaggcttttatcttgagaacatggtgtctggagttaaaggtattggcatactccacacatctgtaccattcttgagtgatcgcttaggaatgaatgtgatttgaactcattcatgttgagagggtgtcaaattgagaaccaggtagatccccaccacctacagtaaaaaggaccctaaagtaaattggttgaagaaattagatcccaaagattcttggtgaattttgaagtcttcatcagtatatccatattaaaacgagatgacagaagccaaagtaattatgggctgacaggacaactggatcagtttcattaaaaagggcaaacttgaagataaatcttttgactccagctctttagaggatctaaagtgaccttgatggacagtggaagaaatcacaacatggaattcctcgaataacaatttattgactttaaataattttgtctaatgctacatatacacaattaaaaaacctttacactatttctagaaagtcagcatgtatttttggctcgaagtttctctagtgttttctgtggaaggaataaaaatttgagtttca

SEQ ID NO: 284166 - DNA, 1491 bp, Homo sapiens
tggaggtgattggattaacaattttattctgcatccactacaaaagggctggtgttttgttccaaatgtttagctgggagggctgtcgggagggtggtgtgtacagagctctaggactcacgcaccaggccagtcgcgggttttgggccgaggcctgggttacaagcagcaagtgcgcggttggggccactgcgaggccgttttagaaaactgtttaaaacaaagagcaattgatggataaatcaggaatagattctcttgaccatgtgacatctgatgctgtggaacttgcaaatcgaagtgataactcttctgatagcagcttatttaaaactcagtgtatcccttactcacctaaaggggagaaaagaaaccccattcgaaaatttgttcgtacacctgaaagtgttcacgcaagtgattcatcaagtgactcatcttttgaaccaataccattgactataaaagctatttttgaaagattcaagaacaggaaaaagagatataaaaaaaagaaaaagaggaggtaccagccaacaggaagaccacggggaagaccagaaggaaggagaaatcctatatactcactaatagataagaagaaacaatttagaagcagaggatctggcttcccatttttagaatcagagaatgaaaaaaacgcaccttggagaaaaattttaacgtttgagcaagctgttgcaagaggattttttaactatattgaaaaactgaagtatgaacaccacctgaaagaatcattgaagcaaatgaatgttggtgaagatttagaaaatgaagattttgacagtcgtagatacaaatttttggatgatgatggatccatttctcctattgaggagtcaacagcagaggatgaggatgcaacacatcttgaagataacgaatgtgatatcaaattggcaggggatagtttcatagtaagttctgaattccctgtaagactgagtgtatacttagaagaagaggatattactgaagaagctgctttgtctaaaaagagagctacaaaagccaaaaatactggacagagaggcctgaaaatgtgacaggatcatgaatgtcaaaggcttttatcttgagaacatggtgtctggagttaaaggtattggcatactccacacatctgtaccattcttgagtgatcgcttaggaatgaatgtgatttgaactcattcatgttgagagggtgtcaaattgagaaccaggtagatccccaccacctacagtaaaaaggtgaattttgaagtcttcatcagtatatccatattaaaacgagatgacagaagccaaagtaattatgggcaaacttgaagataaatcttttgactccagctctttagaggatctaaagtgaccttgatggacagtggaagaaatcacaacatggaattcctcgaataacaatttattgactttaaataattttgtctaatgctacatatacacaattaaaaaacctttacacta

SEQ ID NO: 284167 - DNA, 1298 bp, Homo sapiens
tggaggtgattggattaacaattttattctgcatccactacaaaagggctggtgttttgttccaaatgtttagctgggagggctgtcgggagggtggtgtgtacagagctctaggactcacgcaccaggccagtcgcgggttttgggccgaggcctgggttacaagcagcaagtgcgcggttggggccactgcgaggccgttttagaaaactgtttaaaacaaagagcaattgatggataaatcaggaatagattctcttgaccatgtgacatctgatgctgtggaacttgcaaatcgaagtgataactcttctgatagcagcttatttaaaactcagtgtatcccttactcacctaaaggggagaaaagaaaccccattcgaaaatttgttcgtacacctgaaagtgttcacgcaagtgattcatcaagtgactcatcttttgaaccaataccattgactataaaagctatttttgaaagattcaagaacaggaaaaagagatataaaaaaaagaaaaagaggaggtaccagccaacaggaagaccacggggaagaccagaaggaaggagaaatcctatatactcactaatagataagaagaaacaatttagaagcagaggatctggcttcccatttttagaatcagagaatgaaaaaaacgcaccttggagaaaaattttaacgtttgagcaagctgttgcaagaggattttttaactatattgaaaaactgaagtatgaacaccacctgaaagaatcattgaagcaaatgaatgttggtgaagatttagaaaatgaagattttgacagtcgtagatacaaatttttggatgatgatggatccatttctcctattgaggagtcaacagcagaggatgaggatgcaacacatcttgaagataacgaatgtgatatcaaattggcaggggatagtttcatagtaagttctgaattccctgtaagactgagtgtatacttagaagaagaggatattactgaagaagctgctttgtctaaaaagagagctacaaaagccaaaaatactggacagagaggcctgaaaatgtgacaggatcatgaatgtcaaaggtgaagcatatagaaaaaacgacttcatagaaatgaataaagataaatgtggatatatgtaccagtctggtggtgaagaaattctgaaacccagaactttataacaagaaaaaaaatttttaaccctgtgaagaagtttgtgaaagaaacttgtgaagtagtaataattagaaaaaaaaccattaaaacaccagagaaaatacataga

SEQ ID NO: 284168 - DNA, 1560 bp, Homo sapiens
tggaggtgattggattaacaattttattctgcatccactacaaaagggctggtgttttgttccaaatgtttagctgggagggctgtcgggagggtggtgtgtacagagctctaggactcacgcaccaggccagtcgcgggttttgggccgaggcctgggttacaagcagcaagtgcgcggttggggccactgcgaggccgttttagaaaactgtttaaaacaaagagcaattgatggataaatcaggaatagattctcttgaccatgtgacatctgatgctgtggaacttgcaaatcgaagtgataactcttctgatagcagcttatttaaaactcagtgtatcccttactcacctaaaggggagaaaagaaaccccattcgaaaatttgttcgtacacctgaaagtgttcacgcaagtgattcatcaagtgactcatcttttgaaccaataccattgactataaaagctatttttgaaagattcaagaacaggaaaaagagatataaaaaaaagaaaaagaggaggtaccagccaacaggaagaccacggggaagaccagaaggaaggagaaatcctatatactcactaatagataagaagaaacaatttagaagcagaggatctggcttcccatttttagaatcagagaatgaaaaaaacgcaccttggagaaaaattttaacgtttgagcaagctgttgcaagaggattttttaactatattgaaaaactgaagtatgaacaccacctgaaagaatcattgaagcaaatgaatgttggtgaagatttagaaaatgaagattttgacagtcgtagatacaaatttttggatgatgatggatccatttctcctattgaggagtcaacagcagaggatgaggatgcaacacatcttgaagataacgaatgtgatatcaaattggcaggggatagtttcatagtaagttctgaattccctgtaagactgagtgtatacttagaagaagaggatattactgaagaagctgctttgtctaaaaagagagctacaaaagccaaaaatactggacagagaggcctgaaaatgtgacaggatcatgaatgtcaaaggcttttatcttgagaacatggtgtctggagttaaagataatctacttttttaccttaggtattggcatactccacacatctgtaccattcttgagtgatcgcttaggaatgaatgtgatttgaactcattcatgttgagagggtgtcaaattgagaaccaggtagatccccaccacctacagtaaaaaggaccctaaagtaaattggttgaagaaattagatcccaaagattcttggtgaattttgaagtcttcatcagtatatccatattaaaacgagatgacagaagccaaagtaattatgggcaaacttgaagataaatcttttgactccagctctttagaggatctaaagtgaccttgatggacagtggaagaaatcacaacatggaattcctcgaataacaatttattgactttaaataattttgtctaatgctacatatacacaattaaaaaacctttacacta

SEQ ID NO: 284169 - DNA, 1019 bp, Homo sapiens
tggaggtgattggattaacaattttattctgcatccactacaaaagggctggtgttttgttccaaatgtttagctgggagggctgtcgggagggtggtgtgtacagagctctaggactcacgcaccaggccagtcgcgggttttgggccgaggcctgggttacaagcagcaagtgcgcggttggggccactgcgaggccgttttagaaaactgtttaaaacaaagagcaattgatggataaatcaggaatagattctcttgaccatgtgacatctgatgctgtggaacttgcaaatcgaagtgataactcttctgatagcagcttatttaaaactcagtgtatcccttactcacctaaaggggagaaaagaaaccccattcgaaaatttgttcgtacacctgaaagtgttcacgcaagtgattcatcaagtgactcatcttttgaaccaataccattgactataaaagctatttttgaaagattcaagaacaggaaaaagagatataaaaaaaagaaaaagaggaggtaccagccaacaggaagaccacggggaagaccagaaggaaggagaaatcctatatactcactaatagataagaagaaacaatttagaagcagaggatctggcttcccatttttagaatcagagaatgaaaaaaacgcaccttggagaaaaattttaacgtttgagcaagctgttgcaagaggattttttaactatattgaaaaactgaagtatgaacaccacctgaaagaatcattgaagcaaatgaatgttggtgaagatttagaaaatgaagattttgacagtcgtagatacaaatttttggatgatgatggatccatttctcctattgaggagtcaacgtaagtggaatcatatgaaatactttggtaataggttataaattaaatttctatgttaattgcttcatattttgcctttaatatagttatacttaaataatgaacaaagatacagagtatgacaattgggattattacagttgagccaagc

SEQ ID NO: 284170 - DNA, 478 bp, Homo sapiens
attcacgatggcccctgggactccccgggctattaagcccctggccacaatctgtaccattcttgagtgatcgcttaggaatgaatgtgatttgaactcattcatgttgagagggtgtcaaattgagaaccaggtagatccccaccacctacagtaaaaaggaccctaaagtaaattggttgaagaaattagatcccaaagattcttggtgaattttgaagtcttcatcagtatatccatattaaaacgagatgacagaagccaaagtaattatgggctgacaggacaactggatcagtttcattaaaaagggcaaacttgaagataaatcttttgactccagctctttagaggatctaaagtgaccttgatggacagtggaagaaatcacaacatggaattcctcgaataacaatttattgactttaaataattttgtctaatgctacatatacacaattaaaaaacctttacacta

SEQ ID NO: 284171 - DNA, 373 bp, Homo sapiens
caatattagaaataacatttaataaggaattttcagctcttataggaccactttttttatgtgctgtatattgactgaaacattgtaatgtggtatacattactgtgtcttggatcaggtgtcaaaatgtaactgtactttgtacaattcaacttctaggaccctaaagtaaattggttgaagaaattagatcccaaagattcttggtaagttaattcattacttaaaaggccatgcaggttattttgttgaatactagcttttctccaaatgttattttaggttatttatttatctagcaatgctatgcaacatctatcaccacttaggagtaaaaaaaaggactaggcttacgttattatgtgtttaaact

SEQ ID NO: 284172 - DNA, 1672 bp, Homo sapiens
cacggaaatagccaacccttttcttccgcacggttggaggaggtcggctggttatcgggagttggagggctgaggtcgggagggtggtgtgtacagagctctaggactcacgcaccaggccagtcgcgggttttgggccgaggcctgggttacaagcagcaagtgcgcggttggggccactgcgaggccgttttagaaaactgtttaaaacaaagagcaattgatggataaatcaggaatagattctcttgaccatgtgacatctgatgctgtggaacttgcaaatcgaagtgataactcttctgatagcagcttatttaaaactcagtgtatcccttactcacctaaaggggagaaaagaaaccccattcgaaaatttgttcgtacacctgaaagtgttcacgcaagtgattcatcaagtgactcatcttttgaaccaataccattgactataaaagctatttttgaaagattcaagaacaggaaaaagagatataaaaaaaagaaaaagaggaggtaccagccaacaggaagaccacggggaagaccagaaggaaggagaaatcctatatactcactaatagataagaagaaacaatttagaagcagaggatctggcttcccatttttagaatcagagaatgaaaaaaacgcaccttggagaaaaattttaacgtttgagcaagctgttgcaagaggattttttaactatattgaaaaactgaagtatgaacaccacctgaaagaatcattgaagcaaatgaatgttggtgaagatttagaaaatgaagattttgacagtcgtagatacaaatttttggatgatgatggatccatttctcctattgaggagtcaacagcagaggatgaggatgcaacacatcttgaagataacgaatgtgatatcaaattggcaggggatagtttcatagtaagttctgaattccctgtaagactgagtgtatacttagaagaagaggatattactgaagaagctgctttgtctaaaaagagagctacaaaagccaaaaatactggacagagaggcctgaaaatgtgacaggatcatgaatgtcaaaggcttttatcttgagaacatggtgtctggagttaaaggactattgttagatctgtgggaaggaattacaagacagttgctaaaagtttgaaaaagacggttgctaaacgttatgaaaaaccagataatctacttttttaccttaggtattggcatactccacacatctgtaccattcttgagtgatcgcttaggaatgaatgtgatttgaactcattcatgttgagagggtgtcaaattgagaaccaggtagatccccaccacctacagtaaaaaggaccctaaagtaaattggttgaagaaattagatcccaaagattcttggtgaattttgaagtcttcatcagtatatccatattaaaacgagatgacagaagccaaagtaattatgggctgacaggacaactggatcagtttcattaaaaagggcaaacttgaagataaatcttttgactccagctctttagaggatctaaagtgaccttgatggacagtggaagaaatcacaacatggaattcctcgaataacaatttattgactttaaataattttgtctaatgctacatatacacaattaaaaaacctttacacta

SEQ ID NO: 284173 - DNA, 2597 bp, Homo sapiens
tggaggtgattggattaacaattttattctgcatccactacaaaagggctggtgttttgttccaaatgtttagctgggagggctgtcgggagggtggtgtgtacagagctctaggactcacgcaccaggccagtcgcgggttttgggccgaggcctgggttacaagcagcaagtgcgcggttggggccactgcgaggccgttttagaaaactgtttaaaacaaagagcaattgatggataaatcaggaatagattctcttgaccatgtgacatctgatgctgtggaacttgcaaatcgaagtgataactcttctgatagcagcttatttaaaactcagtgtatcccttactcacctaaaggggagaaaagaaaccccattcgaaaatttgttcgtacacctgaaagtgttcacgcaagtgattcatcaagtgactcatcttttgaaccaataccattgactataaaagctatttttgaaagattcaagaacaggaaaaagagatataaaaaaaagaaaaagaggaggtaccagccaacaggaagaccacggggaagaccagaaggaaggagaaatcctatatactcactaatagataagaagaaacaatttagaagcagaggatctggcttcccatttttagaatcagagaatgaaaaaaacgcaccttggagaaaaattttaacgtttgagcaagctgttgcaagaggattttttaactatattgaaaaactgaagtatgaacaccacctgaaagaatcattgaagcaaatgaatgttggtgaagatttagaaaatgaagattttgacagtcgtagatacaaatttttggatgatgatggatccatttctcctattgaggagtcaacagcagaggatgaggatgcaacacatcttgaagataacgaatgtgatatcaaattggcaggggatagtttcatagtaagttctgaattccctgtaagactgagtgtatacttagaagaagaggatattactgaagaagctgctttgtctaaaaagagagctacaaaagccaaaaatactggacagagaggcctgaaaatgtgacaggatcatgaatgtcaaaggcttttatcttgagaacatggtgtctggagttaaaggtattggcatactccacacatctgtaccattcttgagtgatcgcttaggtaagttttaattggtgacagtataatcttttgggaaataatgattacagttcagatgatgaatttaactgttcaactgctgaatgataacgggcatgaactaaaacttaattctgacagagctggatatggctgtataataaactggatcttaaatttatacttgggttttagttttaataactggaaatgtatcctttctaaatctttaattggtactttctataggaatgaatgtgatttgaactcattcatgttgagaggtaagtaaaatatttaacttataataatcaaggactcaaaagatgaaaaatagaaattacaccatcccagtatttcaggtataacacagaattagtaagatactggcaaaaatattacaatgtatatatttgtatagagaaggaaaatgaagagactgcatgtctatacctaccaaacgaaactacctgtgttctttgcatcattattcaactggcagttacacatatttcatcctaaagtcacgtaaacctgtgtggatatgttgaatcaatagggatatgaattacataaaaagaattttgtgtaactggcagtttgagcaacaatgagcttgacgtttgttgtctgatctgttaagttacatgtatatattccatctttaagttttatagagagactgggcaaagattaggcaaagactagagttgtagcttaaaatgtagttaatgtagcttccttattacagtgacaattaggaaaaaagctcaaattattgtacttgttaaaggaatttgagaggtttgtgaaagcatttctcagcaatattgcaaatttgggaatacgagttgtacagttcagtcataattgcactgcatggtatctgcactcagcagtttacacctgctagggtgttcaaaggtcagtgctatagaaattcagtatctggcatcgttggttttcttggctttgtgcttgttaaacctggtatttctactgatacagtatttgtgtaggtttctcagagtgttcagtttgatatactctaaaatagtaagcaatgcttttttttccagggtgtcaaattgagaaccaggtagatccccaccacctacagtaaaaaggaccctaaagtaaattggttgaagaaattagatcccaaagattcttggtgaattttgaagtcttcatcagtatatccatattaaaacgagatgacagaagccaaagtaattatgggctgacaggacaactggatcagtttcattaaaaagggcaaacttgaagataaatcttttgactccagctctttagaggatctaaagtgaccttgatggacagtggaagaaatcacaacatggaattcctcgaataacaatttattgactttaaataattttgtctaatgctacatatacacaattaaaaaacctttacacta

SEQ ID NO: 284174 - DNA, 3266 bp, Homo sapiens
tggaggtgattggattaacaattttattctgcatccactacaaaagggctggtgttttgttccaaatgtttagctgggagggctgtcgggagggtggtgtgtacagagctctaggactcacgcaccaggccagtcgcgggttttgggccgaggcctgggttacaagcagcaagtgcgcggttggggccactgcgaggccgttttagaaaactgtttaaaacaaagagcaattgatggataaatcaggaatagattctcttgaccatgtgacatctgatgctgtggaacttgcaaatcgaagtgataactcttctgatagcagcttatttaaaactcagtgtatcccttactcacctaaaggggagaaaagaaaccccattcgaaaatttgttcgtacacctgaaagtgttcacgcaagtgattcatcaagtgactcatcttttgaaccaataccattgactataaaagctatttttgaaagattcaagaacaggaaaaagagatataaaaaaaagaaaaagaggaggtaccagccaacaggaagaccacggggaagaccagaaggaaggagaaatcctatatactcactaatagataagaagaaacaatttagaagcagaggatctggcttcccatttttagaatcagagaatgaaaaaaacgcaccttggagaaaaattttaacgtttgagcaagctgttgcaagaggattttttaactatattgaaaaactgaagtatgaacaccacctgaaagaatcattgaagcaaatgaatgttggtgaagatttagaaaatgaagattttgacagtcgtagatacaaatttttggatgatgatggatccatttctcctattgaggagtcaacagcagaggatgaggatgcaacacatcttgaagataacgaatgtgatatcaaattggcaggggatagtttcatagtaagttctgaattccctgtaagactgagtgtatacttagaagaagaggatattactgaagaagctgctttgtctaaaaagagagctacaaaagccaaaaatactggacagagaggcctgaaaatgtgacaggatcatgaatgtcaaaggcttttatcttgagaacatggtgtctggagttaaaggtattggcatactccacacatctgtaccattcttgagtgatcgcttaggtaagttttaattggtgacagtataatcttttgggaaataatgattacagttcagatgatgaatttaactgttcaactgctgaatgataacgggcatgaactaaaacttaattctgacagagctggatatggctgtataataaactggatcttaaatttatacttgggttttagttttaataactggaaatgtatcctttctaaatctttaattggtactttctataggaatgaatgtgatttgaactcattcatgttgagaggtaagtaaaatatttaacttataataatcaaggactcaaaagatgaaaaatagaaattacaccatcccagtatttcaggtataacacagaattagtaagatactggcaaaaatattacaatgtatatatttgtatagagaaggaaaatgaagagactgcatgtctatacctaccaaacgaaactacctgtgttctttgcatcattattcaactggcagttacacatatttcatcctaaagtcacgtaaacctgtgtggatatgttgaatcaatagggatatgaattacataaaaagaattttgtgtaactggcagtttgagcaacaatgagcttgacgtttgttgtctgatctgttaagttacatgtatatattccatctttaagttttatagagagactgggcaaagattaggcaaagactagagttgtagcttaaaatgtagttaatgtagcttccttattacagtgacaattaggaaaaaagctcaaattattgtacttgttaaaggaatttgagaggtttgtgaaagcatttctcagcaatattgcaaatttgggaatacgagttgtacagttcagtcataattgcactgcatggtatctgcactcagcagtttacacctgctagggtgttcaaaggtcagtgctatagaaattcagtatctggcatcgttggttttcttggctttgtgcttgttaaacctggtatttctactgatacagtatttgtgtaggtttctcagagtgttcagtttgatatactctaaaatagtaagcaatgcttttttttccagggtgtcaaattgagaaccaggtagatccccaccacctacagtaaaaaggaccctaaagtaaattggttgaagaaattagatcccaaagattcttggtgaattttgaagtcttcatcagtatatccatattaaaacgagatgacagaagccaaagtaattatgggcaagtaatggtttttatcttaactataagttatttgctcaagggtgtaatggtcattaccaaggcttttagaatgcagtttctcatttgctgtggacatgaccataaaaaaatttcccagtaggttttctatctgctacgttgctagcaatcagcttattgggaacagttgattaactgtaatagaaatgcaatacaaataaaatgtgaaccacatgtgatttttctttaaaatcagtgagatttgaaaattctcctagatctcttgaatcatgcaaatttgctttgcctttatattgtaacccttgtgggttgctaataaccaagcagtttgtagtagagttaactcaggctcgttctagggactcattcatgttcactcactgtacactcatctctggaaatgtaaaatttacttttatactattgttatgtagggctgacaggacaactggatcagtttcattaaaaaggtatgtatgcattagaaaagacatttgtatgggtcatttcaaagagggcttatgaggctgtgaaacccagagctcttaacgctgtgaccaaagatggaagttctctataggaagccctatagcactcctaatgtttggtgctatgttttcctgaggagatataaaacgtaataatccatgattgttgccatgtgagagttttaaaggttaatcaaaatttctcttcttcagggcaaacttgaagataaatcttttgactccagctctttagaggatctaaagtgaccttgatggacagtggaagaaatcacaacatggaattcctcgaataacaatttattgactttaaataattttgtctaatgctacatatacacaattaaaaaacctttacacta

SEQ ID NO: 284175 - DNA, 3051 bp, Homo sapiens
  misc_feature (2687)..(2687): n is a, c, g, or t
tggaggtgattggattaacaattttattctgcatccactacaaaagggctggtgttttgttccaaatgtttagctgggagggctgtcgggagggtggtgtgtacagagctctaggactcacgcaccaggccagtcgcgggttttgggccgaggcctgggttacaagcagcaagtgcgcggttggggccactgcgaggccgttttagaaaactgtttaaaacaaagagcaattgatggataaatcaggaatagattctcttgaccatgtgacatctgatgctgtggaacttgcaaatcgaagtgataactcttctgatagcagcttatttaaaactcagtgtatcccttactcacctaaaggggagaaaagaaaccccattcgaaaatttgttcgtacacctgaaagtgttcacgcaagtgattcatcaagtgactcatcttttgaaccaataccattgactataaaagctatttttgaaagattcaagaacaggaaaaagagatataaaaaaaagaaaaagaggaggtaccagccaacaggaagaccacggggaagaccagaaggaaggagaaatcctatatactcactaatagataagaagaaacaatttagaagcagaggatctggcttcccatttttagaatcagagaatgaaaaaaacgcaccttggagaaaaattttaacgtttgagcaagctgttgcaagaggattttttaactatattgaaaaactgaagtatgaacaccacctgaaagaatcattgaagcaaatgaatgttggtgaagatttagaaaatgaagattttgacagtcgtagatacaaatttttggatgatgatggatccatttctcctattgaggagtcaacagcagaggatgaggatgcaacacatcttgaagataacgaatgtgatatcaaattggcaggggatagtttcatagtaagttctgaattccctgtaagactgagtgtatacttagaagaagaggatattactgaagaagctgctttgtctaaaaagagagctacaaaagccaaaaatactggacagagaggcctgaaaatgtgacaggatcatgaatgtcaaaggcttttatcttgagaacatggtgtctggagttaaaggtattggcatactccacacatctgtaccattcttgagtgatcgcttaggtaagttttaattggtgacagtataatcttttgggaaataatgattacagttcagatgatgaatttaactgttcaactgctgaatgataacgggcatgaactaaaacttaattctgacagagctggatatggctgtataataaactggatcttaaatttatacttgggttttagttttaataactggaaatgtatcctttctaaatctttaattggtactttctataggaatgaatgtgatttgaactcattcatgttgagaggtaagtaaaatatttaacttataataatcaaggactcaaaagatgaaaaatagaaattacaccatcccagtatttcaggtataacacagaattagtaagatactggcaaaaatattacaatgtatatatttgtatagagaaggaaaatgaagagactgcatgtctatacctaccaaacgaaactacctgtgttctttgcatcattattcaactggcagttacacatatttcatcctaaagtcacgtaaacctgtgtggatatgttgaatcaatagggatatgaattacataaaaagaattttgtgtaactggcagtttgagcaacaatgagcttgacgtttgttgtctgatctgttaagttacatgtatatattccatctttaagttttatagagagactgggcaaagattaggcaaagactagagttgtagcttaaaatgtagttaatgtagcttccttattacagtgacaattaggaaaaaagctcaaattattgtacttgttaaaggaatttgagaggtttgtgaaagcatttctcagcaatattgcaaatttgggaatacgagttgtacagttcagtcataattgcactgcatggtatctgcactcagcagtttacacctgctagggtgttcaaaggtcagtgctatagaaattcagtatctggcatcgttggttttcttggctttgtgcttgttaaacctggtatttctactgatacagtatttgtgtaggtttctcagagtgttcagtttgatatactctaaaatagtaagcaatgcttttttttccagggtgtcaaattgagaaccaggtagatccccaccacctacagtaaaaaggaccctaaagtaaattggttgaagaaattagatcccaaagattcttggtgaattttgaagtcttcatcagtatatccatattaaaacgagatgacagaagccaaagtaattatgggctgacaggacaactggatcagtttcattaaaaagggcaaacttgaagataaatcttttgactccagctctttagaggatctaaagtgaccttgatggacagtggaagaaatcacaacatggaattcctcgaataacaatttattgactttaaataattttgtctaatgctacatatacacaattaaaaaacctttacactatttctagaaagtcagcatgtatttttggctcgaagtttctctagtgttttctgtggaaggaataaaaatttgagtttcaataaaaaacanaacaaacaacacgaaacacgaaaaacaatctgttgtgcggcgcccctgggccccttgagagaaaactttttagaaccccttttgcgttgtggcggcccgggggccccacagttgggtttaggtgggcacccttgtgtctacaagtggtgtctccccaagagagagaacacctccggggtcaagcggacaacaagagtgcgtcgtgaggactcttcacccaaagtatataaaacccgccccgcgggggaaccaccggccgcttttctgtagacacaacccccacagtgggaacctctgagggcgcacacacagggcgagccttatcaacaaggggtgcccaacagaaaccccgagttaaaaatcg

SEQ ID NO: 284176 - DNA, 2881 bp, Homo sapiens
tggaggtgattggattaacaattttattctgcatccactacaaaagggctggtgttttgttccaaatgtttagctgggagggctgtcgggagggtggtgtgtacagagctctaggactcacgcaccaggccagtcgcgggttttgggccgaggcctgggttacaagcagcaagtgcgcggttggggccactgcgaggccgttttagaaaactgtttaaaacaaagagcaattgatggataaatcaggaatagattctcttgaccatgtgacatctgatgctgtggaacttgcaaatcgaagtgataactcttctgatagcagcttatttaaaactcagtgtatcccttactcacctaaaggggagaaaagaaaccccattcgaaaatttgttcgtacacctgaaagtgttcacgcaagtgattcatcaagtgactcatcttttgaaccaataccattgactataaaagctatttttgaaagattcaagaacaggaaaaagagatataaaaaaaagaaaaagaggaggtaccagccaacaggaagaccacggggaagaccagaaggaaggagaaatcctatatactcactaatagataagaagaaacaatttagaagcagaggatctggcttcccatttttagaatcagagaatgaaaaaaacgcaccttggagaaaaattttaacgtttgagcaagctgttgcaagaggattttttaactatattgaaaaactgaagtatgaacaccacctgaaagaatcattgaagcaaatgaatgttggtgaagatttagaaaatgaagattttgacagtcgtagatacaaatttttggatgatgatggatccatttctcctattgaggagtcaacagcagaggatgaggatgcaacacatcttgaagataacgaatgtgatatcaaattggcaggggatagtttcatagtaagttctgaattccctgtaagactgagtgtatacttagaagaagaggatattactgaagaagctgctttgtctaaaaagagagctacaaaagccaaaaatactggacagagaggcctgaaaatgtgacaggatcatgaatgtcaaaggcttttatcttgagaacatggtgtctggagttaaaggtattggcatactccacacatctgtaccattcttgagtgatcgcttaggtaagttttaattggtgacagtataatcttttgggaaataatgattacagttcagatgatgaatttaactgttcaactgctgaatgataacgggcatgaactaaaacttaattctgacagagctggatatggctgtataataaactggatcttaaatttatacttgggttttagttttaataactggaaatgtatcctttctaaatctttaattggtactttctataggaatgaatgtgatttgaactcattcatgttgagaggtaagtaaaatatttaacttataataatcaaggactcaaaagatgaaaaatagaaattacaccatcccagtatttcaggtataacacagaattagtaagatactggcaaaaatattacaatgtatatatttgtatagagaaggaaaatgaagagactgcatgtctatacctaccaaacgaaactacctgtgttctttgcatcattattcaactggcagttacacatatttcatcctaaagtcacgtaaacctgtgtggatatgttgaatcaatagggatatgaattacataaaaagaattttgtgtaactggcagtttgagcaacaatgagcttgacgtttgttgtctgatctgttaagttacatgtatatattccatctttaagttttatagagagactgggcaaagattaggcaaagactagagttgtagcttaaaatgtagttaatgtagcttccttattacagtgacaattaggaaaaaagctcaaattattgtacttgttaaaggaatttgagaggtttgtgaaagcatttctcagcaatattgcaaatttgggaatacgagttgtacagttcagtcataattgcactgcatggtatctgcactcagcagtttacacctgctagggtgttcaaaggtcagtgctatagaaattcagtatctggcatcgttggttttcttggctttgtgcttgttaaacctggtatttctactgatacagtatttgtgtaggtttctcagagtgttcagtttgatatactctaaaatagtaagcaatgcttttttttccagggtgtcaaattgagaaccaggtagatccccaccacctacagtaaaaaggaccctaaagtaaattggttgaagaaattagatcccaaagattcttggtgaattttgaagtcttcatcagtatatccatattaaaacgagatgacagaagccaaagtaattatgggctgacaggacaactggatcagtttcattaaaaagggcaaacttgaagataaatcttttgactccagctctttagaggatctaaagtgaccttgatggacagtggaagaaatcacaacatggaattcctcgaataacaatttattgactttaaataattttgtctaatgctacatatacacaattaaaaaacctttacactatttctagaaagtcagcatgtatttttggctcgaagtttctctagtgttttctgtggaaggaataaaaatttgagtttcagttgtgtacttcatgcttgaaaaattaagtccttctccctcagttatactcaccttatggaattcttttgcccttgctctgttttgggcataagcttcttgttttgttttttcttccttttgttgtttcacttcagctagttgattgtataacctgtaaagaatttatatagaattagagacaaacactgcaaaaagtgaatcac

SEQ ID NO: 284177 - DNA, 3550 bp, Homo sapiens
tggaggtgattggattaacaattttattctgcatccactacaaaagggctggtgttttgttccaaatgtttagctgggagggctgtcgggagggtggtgtgtacagagctctaggactcacgcaccaggccagtcgcgggttttgggccgaggcctgggttacaagcagcaagtgcgcggttggggccactgcgaggccgttttagaaaactgtttaaaacaaagagcaattgatggataaatcaggaatagattctcttgaccatgtgacatctgatgctgtggaacttgcaaatcgaagtgataactcttctgatagcagcttatttaaaactcagtgtatcccttactcacctaaaggggagaaaagaaaccccattcgaaaatttgttcgtacacctgaaagtgttcacgcaagtgattcatcaagtgactcatcttttgaaccaataccattgactataaaagctatttttgaaagattcaagaacaggaaaaagagatataaaaaaaagaaaaagaggaggtaccagccaacaggaagaccacggggaagaccagaaggaaggagaaatcctatatactcactaatagataagaagaaacaatttagaagcagaggatctggcttcccatttttagaatcagagaatgaaaaaaacgcaccttggagaaaaattttaacgtttgagcaagctgttgcaagaggattttttaactatattgaaaaactgaagtatgaacaccacctgaaagaatcattgaagcaaatgaatgttggtgaagatttagaaaatgaagattttgacagtcgtagatacaaatttttggatgatgatggatccatttctcctattgaggagtcaacagcagaggatgaggatgcaacacatcttgaagataacgaatgtgatatcaaattggcaggggatagtttcatagtaagttctgaattccctgtaagactgagtgtatacttagaagaagaggatattactgaagaagctgctttgtctaaaaagagagctacaaaagccaaaaatactggacagagaggcctgaaaatgtgacaggatcatgaatgtcaaaggcttttatcttgagaacatggtgtctggagttaaaggtattggcatactccacacatctgtaccattcttgagtgatcgcttaggtaagttttaattggtgacagtataatcttttgggaaataatgattacagttcagatgatgaatttaactgttcaactgctgaatgataacgggcatgaactaaaacttaattctgacagagctggatatggctgtataataaactggatcttaaatttatacttgggttttagttttaataactggaaatgtatcctttctaaatctttaattggtactttctataggaatgaatgtgatttgaactcattcatgttgagaggtaagtaaaatatttaacttataataatcaaggactcaaaagatgaaaaatagaaattacaccatcccagtatttcaggtataacacagaattagtaagatactggcaaaaatattacaatgtatatatttgtatagagaaggaaaatgaagagactgcatgtctatacctaccaaacgaaactacctgtgttctttgcatcattattcaactggcagttacacatatttcatcctaaagtcacgtaaacctgtgtggatatgttgaatcaatagggatatgaattacataaaaagaattttgtgtaactggcagtttgagcaacaatgagcttgacgtttgttgtctgatctgttaagttacatgtatatattccatctttaagttttatagagagactgggcaaagattaggcaaagactagagttgtagcttaaaatgtagttaatgtagcttccttattacagtgacaattaggaaaaaagctcaaattattgtacttgttaaaggaatttgagaggtttgtgaaagcatttctcagcaatattgcaaatttgggaatacgagttgtacagttcagtcataattgcactgcatggtatctgcactcagcagtttacacctgctagggtgttcaaaggtcagtgctatagaaattcagtatctggcatcgttggttttcttggctttgtgcttgttaaacctggtatttctactgatacagtatttgtgtaggtttctcagagtgttcagtttgatatactctaaaatagtaagcaatgcttttttttccagggtgtcaaattgagaaccaggtagatccccaccacctacagtaaaaaggaccctaaagtaaattggttgaagaaattagatcccaaagattcttggtgaattttgaagtcttcatcagtatatccatattaaaacgagatgacagaagccaaagtaattatgggcaagtaatggtttttatcttaactataagttatttgctcaagggtgtaatggtcattaccaaggcttttagaatgcagtttctcatttgctgtggacatgaccataaaaaaatttcccagtaggttttctatctgctacgttgctagcaatcagcttattgggaacagttgattaactgtaatagaaatgcaatacaaataaaatgtgaaccacatgtgatttttctttaaaatcagtgagatttgaaaattctcctagatctcttgaatcatgcaaatttgctttgcctttatattgtaacccttgtgggttgctaataaccaagcagtttgtagtagagttaactcaggctcgttctagggactcattcatgttcactcactgtacactcatctctggaaatgtaaaatttacttttatactattgttatgtagggctgacaggacaactggatcagtttcattaaaaaggtatgtatgcattagaaaagacatttgtatgggtcatttcaaagagggcttatgaggctgtgaaacccagagctcttaacgctgtgaccaaagatggaagttctctataggaagccctatagcactcctaatgtttggtgctatgttttcctgaggagatataaaacgtaataatccatgattgttgccatgtgagagttttaaaggttaatcaaaatttctcttcttcagggcaaacttgaagataaatcttttgactccagctctttagaggatctaaagtgaccttgatggacagtggaagaaatcacaacatggaattcctcgaataacaatttattgactttaaataattttgtctaatgctacatatacacaattaaaaaacctttacactatttctagaaagtcagcatgtatttttggctcgaagtttctctagtgttttctgtggaaggaataaaaatttgagtttcagttgtgtacttcatgcttgaaaaattaagtccttctccctcagttatactcaccttatggaattcttttgcccttgctctgttttgggcataagcttcttgttttgttttttcttccttttgttgtttcacttcagctagttgattgtataacctgtaaagaatttatatagaattagagacaaacactgcaaaaagtgaatcac

SEQ ID NO: 284178 - DNA, 2595 bp, Homo sapiens
tggaggtgattggattaacaattttattctgcatccactacaaaagggctggtgttttgttccaaatgtttagctgggagggctgtcgggagggtggtgtgtacagagctctaggactcacgcaccaggccagtcgcgggttttgggccgaggcctgggttacaagcagcaagtgcgcggttggggccactgcgaggccgttttagaaaactgtttaaaacaaagagcaattgatggataaatcaggaatagattctcttgaccatgtgacatctgatgctgtggaacttgcaaatcgaagtgataactcttctgatagcagcttatttaaaactcagtgtatcccttactcacctaaaggggagaaaagaaaccccattcgaaaatttgttcgtacacctgaaagtgttcacgcaagtgattcatcaagtgactcatcttttgaaccaataccattgactataaaagctatttttgaaagattcaagaacaggaaaaagagatataaaaaaaagaaaaagaggaggtaccagccaacaggaagaccacggggaagaccagaaggaaggagaaatcctatatactcactaatagataagaagaaacaatttagaagcagaggatctggcttcccatttttagaatcagagaatgaaaaaaacgcaccttggagaaaaattttaacgtttgagcaagctgttgcaagaggattttttaactatattgaaaaactgaagtatgaacaccacctgaaagaatcattgaagcaaatgaatgttggtgaagatttagaaaatgaagattttgacagtcgtagatacaaatttttggatgatgatggatccatttctcctattgaggagtcaacagcagaggatgaggatgcaacacatcttgaagataacgaatgtgatatcaaattggcaggggatagtttcatagtaagttctgaattccctgtaagactgagtgtatacttagaagaagaggatattactgaagaagctgctttgtctaaaaagagagctacaaaagccaaaaatactggacagagaggcctgaaaatgtgacaggatcatgaatgtcaaaggcttttatcttgagaacatggtgtctggagttaaaggtattggcatactccacacatctgtaccattcttgagtgatcgcttaggtaagttttaattggtgacagtataatcttttgggaaataatgattacagttcagatgatgaatttaactgttcaactgctgaatgataacgggcatgaactaaaacttaattctgacagagctggatatggctgtataataaactggatcttaaatttatacttgggttttagttttaataactggaaatgtatcctttctaaatctttaattggtactttctataggaatgaatgtgatttgaactcattcatgttgagaggtaagtaaaatatttaacttataataatcaaggactcaaaagatgaaaaatagaaattacaccatcccagtatttcaggtataacacagaattagtaagatactggcaaaaatattacaatgtatatatttgtatagagaaggaaaatgaagagactgcatgtctatacctaccaaacgaaactacctgtgttctttgcatcattattcaactggcagttacacatatttcatcctaaagtcacgtaaacctgtgtggatatgttgaatcaatagggatatgaattacataaaaagaattttgtgtaactggcagtttgagcaacaatgagcttgacgtttgttgtctgatctgttaagttacatgtatatattccatctttaagttttatagagagactgggcaaagattaggcaaagactagagttgtagcttaaaatgtagttaatgtagcttccttattacagtgacaattaggaaaaaagctcaaattattgtacttgttaaaggaatttgagaggtttgtgaaagcatttctcagcaatattgcaaatttgggaatacgagttgtacagttcagtcataattgcactgcatggtatctgcactcagcagtttacacctgctagggtgttcaaaggtcagtgctatagaaattcagtatctggcatcgttggttttcttggctttgtgcttgttaaacctggtatttctactgatacagtatttgtgtaggtttctcagagtgttcagtttgatatactctaaaatagtaagcaatgcttttttttccagggtgtcaaattgagaaccaggtagatccccaccacctacagtaaaaaggaccctaaagtaaattggttgaagaaattagatcccaaagattcttggtgaattttgaagtcttcatcagtatatccatattaaaacgagatgacagaagccaaagtaattatgggctgacaggacaactggatcagtttcattaaaaagggcaaacttgaagataaatcttttgactccagctctttagaggatctaaagtgaccttgatggacagtggaagaaatcacaacatggaattcctcgaataacaatttattgactttaaataattttgtctaatgctacatgcatcatacggggatcgctctagag

SEQ ID NO: 284179 - DNA, 1538 bp, Homo sapiens
tggaggtgattggattaacaattttattctgcatccactacaaaagggctggtgttttgttccaaatgtttagctgggagggctgtcgggagggtggtgtgtacagagctctaggactcacgcaccaggccagtcgcgggttttgggccgaggcctgggttacaagcagcaagtgcgcggttggggccactgcgaggccgttttagaaaactgtttaaaacaaagagcaattgatggataaatcaggaatagattctcttgaccatgtgacatctgatgctgtggaacttgcaaatcgaagtgataactcttctgatagcagcttatttaaaactcagtgtatcccttactcacctaaaggggagaaaagaaaccccattcgaaaatttgttcgtacacctgaaagtgttcacgcaagtgattcatcaagtgactcatcttttgaaccaataccattgactataaaagctatttttgaaagattcaagaacaggaaaaagagatataaaaaaaagaaaaagaggaggtaccagccaacaggaagaccacggggaagaccagaaggaaggagaaatcctatatactcactaatagataagaagaaacaatttagaagcagaggatctggcttcccatttttagaatcagagaatgaaaaaaacgcaccttggagaaaaattttaacgtttgagcaagctgttgcaagaggattttttaactatattgaaaaactgaagtatgaacaccacctgaaagaatcattgaagcaaatgaatgttggtgaagatttagaaaatgaagattttgacagtcgtagatacaaatttttggatgatgatggatccatttctcctattgaggagtcaacagcagaggatgaggatgcaacacatcttgaagataacgaatgtgatatcaaattggcaggggatagtttcatagtaagttctgaattccctgtaagactgagtgtatacttagaagaagaggatattactgaagaagctgctttgtctaaaaagagagctacaaaagccaaaaatactggacagagaggcctgaaaatgtgacaggatcatgaatgtcaaaggcttttatcttgagaacatggtgtctggagttaaaggtattggcatactccacacatctgtaccattcttgagtgatcgcttaggaatgaatgtgatttgaactcattcatgttgagagggtgtcaaattgagaaccaggtagatccccaccacctacagtaaaaaggaccctaaagtaaattggttgaagaaattagatcccaaagattcttggtgaattttgaagtcttcatcagtatatccatattaaaacgagatgacagaagccaaagtaattatgggcaaacttgaagataaatcttttgactccagctctttagaggatctaaagtgaccttgatggacagtggaagaaatcacaacatggaattcctcgaataacaatttattgactttaaataattttgtctaatgctacatatacacaattaaaaaacctttacacta

SEQ ID NO: 284180 - DNA, 1664 bp, Homo sapiens
tggaggtgattggattaacaattttattctgcatccactacaaaagggctggtgttttgttccaaatgtttagctgggagggctgtcgggagggtggtgtgtacagagctctaggactcacgcaccaggccagtcgcgggttttgggccgaggcctgggttacaagcagcaagtgcgcggttggggccactgcgaggccgttttagaaaactgtttaaaacaaagagcaattgatggataaatcaggaatagattctcttgaccatgtgacatctgatgctgtggaacttgcaaatcgaagtgataactcttctgatagcagcttatttaaaactcagtgtatcccttactcacctaaaggggagaaaagaaaccccattcgaaaatttgttcgtacacctgaaagtgttcacgcaagtgattcatcaagtgactcatcttttgaaccaataccattgactataaaagctatttttgaaagattcaagaacaggaaaaagagatataaaaaaaagaaaaagaggaggtaccagccaacaggaagaccacggggaagaccagaaggaaggagaaatcctatatactcactaatagataagaagaaacaatttagaagcagaggatctggcttcccatttttagaatcagagaatgaaaaaaacgcaccttggagaaaaattttaacgtttgagcaagctgttgcaagaggattttttaactatattgaaaaactgaagtatgaacaccacctgaaagaatcattgaagcaaatgaatgttggtgaagatttagaaaatgaagattttgacagtcgtagatacaaatttttggatgatgatggatccatttctcctattgaggagtcaacagcagaggatgaggatgcaacacatcttgaagataacgaatgtgatatcaaattggcaggggatagtttcatagtaagttctgaattccctgtaagactgagtgtatacttagaagaagaggatattactgaagaagctgctttgtctaaaaagagagctacaaaagccaaaaatactggacagagaggcctgaaaatgtgacaggatcatgaatgtcaaaggtgaagcatatagaaaaaacgacttcatagaaatgaataaagataaatgtggatatatgtaccagtctggtggtgaagaaattctgaaacccagaactttataacaagaaaaaaaatttttaaccctgtgaagaagtttgtgaaagaaacttgtgaagtagtaataattagaaaaaaaaccattaaaacaccagagaaaatacatagaaaaatttgagaaattgtcatttgatttctgaataagagcttacaggtgtcctgtgagtattgaaacaatgaaatgtagtgattttaattttgaaaagaaaatcttaaagtaacttgacacccaaccatcttgaagaggggatttgaaatgctgtaattttatcccagctttgttcagccatgacaagtgacctgtcagatgcttagtattgtaataacctcatttccctttccaaatttagagtatctttaatactattttttttagacagagtctcgatctgtcacccaggctgtagtgcaatggccgcagtcttggcttactgcaacctccatctcccgggttcaagcgattctgcctcagcct

SEQ ID NO: 284181 - DNA, 1329 bp, Homo sapiens
tggaggtgattggattaacaattttattctgcatccactacaaaagggctggtgttttgttccaaatgtttagctgggagggctgtcgggagggtggtgtgtacagagctctaggactcacgcaccaggccagtcgcgggttttgggccgaggcctgggttacaagcagcaagtgcgcggttggggccactgcgaggccgttttagaaaactgtttaaaacaaagagcaattgatggataaatcaggaatagattctcttgaccatgtgacatctgatgctgtggaacttgcaaatcgaagtgataactcttctgatagcagcttatttaaaactcagtgtatcccttactcacctaaaggggagaaaagaaaccccattcgaaaatttgttcgtacacctgaaagtgttcacgcaagtgattcatcaagtgactcatcttttgaaccaataccattgactataaaagctatttttgaaagattcaagaacaggaaaaagagatataaaaaaaagaaaaagaggaggtaccagccaacaggaagaccacggggaagaccagaaggaaggagaaatcctatatactcactaatagataagaagaaacaatttagaagcagaggatctggcttcccatttttagaatcagagaatgaaaaaaacgcaccttggagaaaaattttaacgtttgagcaagctgttgcaagaggattttttaactatattgaaaaactgaagtatgaacaccacctgaaagaatcattgaagcaaatgaatgttggtgaagatttagaaaatgaagattttgacagtcgtagatacaaatttttggatgatgatggatccatttctcctattgaggagtcaacagcagaggatgaggatgcaacacatcttgaagataacgaatgtgatatcaaattggcaggggatagtttcatagtaagttctgaattccctgtaagactgagtgtatacttagaagaagaggatattactgaagaagctgctttgtctaaaaagagagctacaaaagccaaaaatactggacagagaggcctgaaaatgtgacaggatcatgaatgtcaaaggcttttatcttgagaacatggtgtctggagttaaagggctgacaggacaactggatcagtttcattaaaaagggcaaacttgaagataaatcttttgactccagctctttagaggatctaaagtgaccttgatggacagtggaagaaatcacaacatggaattcctcgaataacaatttattgactttaaataattttgtctaatgctacatatacacaattaaaaaacctttacacta

SEQ ID NO: 284182 - DNA, 493 bp, Homo sapiens
tggaggtgattggattaacaattttattctgcatccactacaaaagggctggtgttttgttccaaatgtttagctgggagggctgtcgggagggtggtgtgtacagagctctaggactcacgcaccaggccagtcgcgggttttgggccgaggcctgggttacaagcagcaagtgcgcggttggggccactgcgaggccgttttagaaaactgtttaaaacaaagagcaattgatggataaatcaggaatagattctcttgaccatgtgacatctgatgctgtggaacttgcaaatcgaagtgataactcttctgatagcagcttatttaaaactcagtgtatcccttactcacctaaaggggagaaaagaaaccccattcgaaaatttgttcgtacacctgaaagtgttcacgcaagtgattcatcaagtgactcatcttttgaaccaataccattgactataaaagctatttttgaaagattcaagaacag

SEQ ID NO: 284183 - DNA, 1813 bp, Homo sapiens
ccattttatagataggcaggcagagaaagatgaattgcttgcttttcttttgggaacctggattcttttaatagttgttgaagcctccagggggccaggcggatcacttgaggcccagcctggccaacatagcgaaaccctgcctctactaaaaccacaaaaatcagccgggtatggtggcacacgcttataatcccagctatttgggacgctgaggtgggatatagcttgaacccgggaaggagactgcagtcagggaagcctagggaagcctcagaccaaggatgattgaataacaaagaaaaggtgtaagtaaagatctccaactcttagggagtactaattaggaaagttaagggtagaaaaagataaattaaggaaaataccgttgagatgctaatgggttaatttcagagaaaaaagactgagtagagggggtatggggaatgtgtgctggggagggagtgtgacgaaggtcgtaaagagacccttgctcaacgtcagttgacgttctgactgtggggaggtcgaaaactcggaagggcctgagggaaggaatgggcagtaccacgttctgacacctaggtcagtatggcgggggaagagtaaagaagacaaggaccgagaccctgccatgtcagtacctttctcttacggaggggcaccgccctgttggggtccacagccaaccccatctcggccaggttctgccgtaccgatttagcgtggtcccaggcatgtcggatgtgggagctaccggcaaagagagacatcgcggatccgtcatctcgcggaccgtcccggccgaggcccacggccacccggaaccccagccccctcaccattcgatccgcggcgctgccttccgtcgagcattccggttcagacgctttcggttgacactgtaaccaaacttctgcctccgggttttgcccttggccttgggcatcgcgctgaccaccgcaccagcagctcaaacacgctgcctctgtctctcagacctcgtgtaacaaactccttccggaaggcgtgcacaaggctttgcgggcatttggggaaatgtagtccttttgtagcactaccgtgctgagcactacgactcccaggatgcaacgagcatttgcgcctgcgtacaaggctcaatttattcgtttccccgcccctttcatgaccttcaccgggaggctgaggtcggagtcccgattttctcctgctgctgtggcccggacatggcgactcccggccctgtgattccggaggtcccctttgaaccatcgaagcctccagtcattgaggggctgagccccactgtttacaggaatccagagagtttcaaggaaaagttcgttcgcaagacccgcgagaacccggtggtacccataggttgcctggccacggcggccgccctcacctacggcctctactccttccaccggggcaacagccagcgctctcagctcatgatgcgcacccggatcgccgcccagggtttcacggtcgcagccatcttgctgggtctggctgtcactgctatgaagtctcgaccctaagcccagggtctggccttgaaagctccgcagaaatgattccaaaacccagggagcaaccactggccctaccgtgggacttactccctcctctcctttgagaggcccatgtgtcgctggggaggaagtgaccctttgtgtaactgtaaccgaaagttttttcaaaaatcctagatgctgttgtttgaatgttacatacttctatttgtgccacatctcccctccactcccctgcttaataaactctaaaaatccacttgtattta

SEQ ID NO: 284184 - DNA, 1866 bp, Homo sapiens
  misc_feature (1866)..(1866): n is a, c, g, or t
ccattttatagataggcaggcagagaaagatgaattgcttgcttttcttttgggaacctggattcttttaatagttgttgaagcctccagggggccaggcggatcacttgaggcccagcctggccaacatagcgaaaccctgcctctactaaaaccacaaaaatcagccgggtatggtggcacacgcttataatcccagctatttgggacgctgaggtgggatatagcttgaacccgggaaggagactgcagtcagggaagcctagggaagcctcagaccaaggatgattgaataacaaagaaaaggtgtaagtaaagatctccaactcttagggagtactaattaggaaagttaagggtagaaaaagataaattaaggaaaataccgttgagatgctaatgggttaatttcagagaaaaaagactgagtagagggggtatggggaatgtgtgctggggagggagtgtgacgaaggtcgtaaagagacccttgctcaacgtcagttgacgttctgactgtggggaggtcgaaaactcggaagggcctgagggaaggaatgggcagtaccacgttctgacacctaggtcagtatggcgggggaagagtaaagaagacaaggaccgagaccctgccatgtcagtacctttctcttacggaggggcaccgccctgttggggtccacagccaaccccatctcggccaggttctgccgtaccgatttagcgtggtcccaggcatgtcggatgtgggagctaccggcaaagagagacatcgcggatccgtcatctcgcggaccgtcccggccgaggcccacggccacccggaaccccagccccctcaccattcgatccgcggcgctgccttccgtcgagcattccggttcagacgctttcggttgacactgtaaccaaacttctgcctccgggttttgcccttggccttgggcatcgcgctgaccaccgcaccagcagctcaaacacgctgcctctgtctctcagacctcgtgtaacaaactccttccggaaggcgtgcacaaggctttgcgggcatttggggaaatgtagtccttttgtagcactaccgtgctgagcactacgactcccaggatgcaacgagcatttgcgcctgcgtacaaggctcaatttattcgtttccccgcccctttcatgaccttcaccgggaggctgaggtcggagtcccgattttctcctgctgctgtggcccggacatggcgactcccggccctgtgattccggaggtcccctttgaaccatcgaagcctccagtcattgaggggctgagccccactgtttacaggaatccagagagtttcaaggaaaagttcgttcgcaagacccgcgagaacccggtggtacccataggttgcctggccacggcggccgccctcacctacggcctctactccttccaccggggcaacagccagcgctctcagctcatgatgcgcacccggatcgccgcccagggtttcacggtcgcagccatcttgctgggtctggctgtcactgctatgaagtctcgaccctaagcccagggtctggccttgaaagctccgcagaaatgattccaaaacccagggagcaaccactggccctaccgtgggacttactccctcctctcctttgagaggcccatgtgtcgctggggaggaagtgaccctttgtgtaactgtaaccgaaagttttttcaaaaatcctagatgctgttgtttgaatgttacatacttctatttgtgccacatctcccctccactcccctgcttaataaactctaaaaatccacttgtatttacaaacaaattacttgaggtgggccccgggacccttcgccttatggagtcgttn

SEQ ID NO: 284185 - DNA, 1455 bp, Homo sapiens
ccattttatagataggcaggcagagaaagatgaattgcttgcttttcttttgggaacctggattcttttaatagttgttgaagcctccagggggccaggcggatcacttgaggcccagcctggccaacatagcgaaaccctgcctctactaaaaccacaaaaatcagccgggtatggtggcacacgcttataatcccagctatttgggacgctgaggtgggatatagcttgaacccgggaaggagactgcagtcagggaagcctagggaagcctcagaccaaggatgattgaataacaaagaaaaggtgtaagtaaagatctccaactcttagggagtactaattaggaaagttaagggtagaaaaagataaattaaggaaaataccgttgagatgctaatgggttaatttcagagaaaaaagactgagtagagggggtatggggaatgtgtgctggggagggagtgtgacgaaggtcgtaaagagacccttgctcaacgtcagttgacgttctgactgtggggaggtcgaaaactcggaagggcctgagggaaggaatgggcagtaccacgttctgacacctaggtcagtatggcgggggaagagtaaagaagacaaggaccgagaccctgccatgtcagtacctttctcttacggaggggcaccgccctgttggggtccacagccaaccccatctcggccaggttctgccgtaccgatttagcgtggtcccaggcatgtcggatgtgggagctaccggcaaagagagacatcgcggatccgtcatctcgcggaccgtcccggccgaggcccacggccacccggaaccccagccccctcaccattcgatccgcggcgctgccttccgtcgagcattccggttcagacgctttcggttgacactgtaaccaaacttctgcctccgggttttgcccttggccttgggcatcgcgctgaccaccgcaccagcagctcaaacacgctgcctctgtctctcagacctcgtgtaacaaactccttccggaaggcgtgcacaaggctttgcgggcatttggggaaatgtagtccttttgtagcactaccgtgctgagcactacgactcccaggatgcaacgagcatttgcgcctgcgtacaaggctcaatttattcgtttccccgcccctttcatgaccttcaccgggaggctgaggtcggagtcccgattttctcctgctgctgtggcccggacatggcgactcccggccctgtgattccggaggtcccctttgaaccatcgaagcctccagtcattgaggggctgagccccactgtttacaggaatccaagtcagaatcggtcgaacggaacgtgtcatagtgctgccggcgctcctagctatctcacagcaagcaggttcgtctgtggcacgacgcgcagttccggcgactctgtgtcgcgtatgtatattcactacc

SEQ ID NO: 284186 - DNA, 266 bp, Homo sapiens
cctagttttagaagtttcaatagcacctagttttagaagtttcaaaacccagggagcaaccactggccctaccgtgggacttactccctcctctcctttgagaggcccatgtgtcgctggggaggaagtgaccctttgtgtaactgtaaccgaaagttttttcaaaaatcctagatgctgttgtttgaatgttacatacttctatttgtgccacatctcccctccactcccctgcttaataaactctaaaaatccacttgtattta

SEQ ID NO: 284187 - DNA, 1145 bp, Homo sapiens
cctgacctgcctgtcgtcgtggtggccaacaagcaggttctgccgtaccgatttagcgtggtcccaggcatgtcggatgtgggagctaccggcaaagagagacatcgcggatccgtcatctcgcggaccgtcccggccgaggcccacggccacccggaaccccagccccctcaccattcgatccgcggcgctgccttccgtcgagcattccggttcagacgctttcggttgacactgtaaccaaacttctgcctccgggttttgcccttggccttgggcatcgcgctgaccaccgcaccagcagctcaaacacgctgcctctgtctctcagacctcgtgtaacaaactccttccggaaggcgtgcacaaggctttgcgggcatttggggaaatgtagtccttttgtagcactaccgtgctgagcactacgactcccaggatgcaacgagcatttgcgcctgcgtacaaggctcaatttattcgtttccccgcccctttcatgaccttcaccgggaggctgaggtcggagtcccgattttctcctgctgctgtggcccggacatggcgactcccggccctgtgattccggaggtcccctttgaaccatcgaagcctccagtcattgaggggctgagccccactgtttacaggaatccagagagtttcaaggaaaagttcgttcgcaagacccgcgagaacccggtggtacccataggttgcctggccacggcggccgccctcacctacggcctctactccttccaccggggcaacagccagcgctctcagctcatgatgcgcacccggatcgccgcccagggtttcacggtcgcagccatcttgctgggtctggctgtcactgctatgaagtctcgaccctaagcccagggtctggccttgaaagctccgcagaaatgattccaaaacccagggagcaaccactggccctaccgtgggacttactccctcctctcctttgagaggcccatgtgtcgctggggaggaagtgaccctttgtgtaactgtaaccgaaagttttttcaaaaatcctagatgctgttgtttgaatgttacatacttctatttgtgccacatctcccctccactcccctgcttaataaactctaaaaatccacttgtattta

SEQ ID NO: 284188 - DNA, 2170 bp, Homo sapiens
ccattttatagataggcaggcagagaaagatgaattgcttgcttttcttttgggaacctggattcttttaatagttgttgaagcctccagggggccaggcggatcacttgaggcccagcctggccaacatagcgaaaccctgcctctactaaaaccacaaaaatcagccgggtatggtggcacacgcttataatcccagctatttgggacgctgaggtgggatatagcttgaacccgggaaggagactgcagtcagggaagcctagggaagcctcagaccaaggatgattgaataacaaagaaaaggtgtaagtaaagatctccaactcttagggagtactaattaggaaagttaagggtagaaaaagataaattaaggaaaataccgttgagatgctaatgggttaatttcagagaaaaaagactgagtagagggggtatggggaatgtgtgctggggagggagtgtgacgaaggtcgtaaagagacccttgctcaacgtcagttgacgttctgactgtggggaggtcgaaaactcggaagggcctgagggaaggaatgggcagtaccacgttctgacacctaggtcagtatggcgggggaagagtaaagaagacaaggaccgagaccctgccatgtcagtacctttctcttacggaggggcaccgccctgttggggtccacagccaaccccatctcggccaggttctgccgtaccgatttagcgtggtcccaggcatgtcggatgtgggagctaccggcaaagagagacatcgcggatccgtcatctcgcggaccgtcccggccgaggcccacggccacccggaaccccagccccctcaccattcgatccgcggcgctgccttccgtcgagcattccggttcagacgctttcggttgacactgtaaccaaacttctgcctccgggttttgcccttggccttgggcatcgcgctgaccaccgcaccagcagctcaaacacgctgcctctgtctctcagacctcgtgtaacaaactccttccggaaggcgtgcacaaggctttgcgggcatttggggaaatgtagtccttttgtagcactaccgtgctgagcactacgactcccaggatgcaacgagcatttgcgcctgcgtacaaggctcaatttattcgtttccccgcccctttcatgaccttcaccgggaggctgaggtcggagtcccgattttctcctgctgctgtggcccggacatggcgactcccggccctgtgattccggaggtcccctttgaaccatcgaagcctccagtcattgaggggctgagccccactgtttacaggaatccagagagtttcaaggaaaagttcgttcgcaagacccgcgagaacccggtggtacccataggtaagtgggtgcggtaggaactgcacaaggagaggacagtgatgtcggagggaaggaagtagagaaggaccagagcgctagcggggagcggaaggagagcggactagagaagagacgagggggcggggcggtgaggggcgaaactgattggagcgggagcagcgggtttagggggcgggatttggggcctaagattgggaggactctgtaactaggaagacctcgactcgacctaccctcgccgccctccctccgctgtgatccagagatcttggctttggggaagcgagacccaaagcggggaatgacctgcggggcccgacctgctgtttcccagttgctttgtcccctcctcaggttgcctggccacggcggccgccctcacctacggcctctactccttccaccggggcaacagccagcgctctcagctcatgatgcgcacccggatcgccgcccagggtttcacggtcgcagccatcttgctgggtctggctgtcactgctatgaagtctcgaccctaagcccagggtctggccttgaaagctccgcagaaatgattccaaaacccagggagcaaccactggccctaccgtgggacttactccctcctctcctttgagaggcccatgtgtcgctggggaggaagtgaccctttgtgtaactgtaaccgaaagttttttcaaaaatcctagatgctgttgtttgaatgttacatacttctatttgtgccacatctcccctccactcccctgcttaataaactctaaaaatccacttgtattta

SEQ ID NO: 284189 - DNA, 1798 bp, Homo sapiens
ccattttatagataggcaggcagagaaagatgaattgcttgcttttcttttgggaacctggattcttttaatagttgttgaagcctccagggggccaggcggatcacttgaggcccagcctggccaacatagcgaaaccctgcctctactaaaaccacaaaaatcagccgggtatggtggcacacgcttataatcccagctatttgggacgctgaggtgggatatagcttgaacccgggaaggagactgcagtcagggaagcctagggaagcctcagaccaaggatgattgaataacaaagaaaaggtgtaagtaaagatctccaactcttagggagtactaattaggaaagttaagggtagaaaaagataaattaaggaaaataccgttgagatgctaatgggttaatttcagagaaaaaagactgagtagagggggtatggggaatgtgtgctggggagggagtgtgacgaaggtcgtaaagagacccttgctcaacgtcagttgacgttctgactgtggggaggtcgaaaactcggaagggcctgagggaaggaatgggcagtaccacgttctgacacctaggtcagtatggcgggggaagagtaaagaagacaaggaccgagaccctgccatgtcagtacctttctcttacggaggggcaccgccctgttggggtccacagccaaccccatctcggccaggttctgccgtaccgatttagcgtggtcccaggcatgtcggatgtgggagctaccggcaaagagagacatcgcggatccgtcatctcgcggaccgtcccggccgaggcccacggccacccggaaccccagccccctcaccattcgatccgcggcgctgccttccgtcgagcattccggttcagacgctttcggttgacactgtaaccaaacttctgcctccgggttttgcccttggccttgggcatcgcgctgaccaccgcaccagcagctcaaacacgctgcctctgtctctcagacctcgtgtaacaaactccttccggaaggcgtgcacaaggctttgcgggcatttggggaaatgtagtccttttgtagcactaccgtgctgagcactacgactcccaggatgcaacgagcatttgcgcctgcgtacaaggctcaatttattcgtttccccgcccctttcatgaccttcaccgggaggctgaggtcggagtcccgattttctcctgctgctgtggcccggacatggcgactcccggccctgtgattccggaggtcccctttgaaccatcgaagcctccagtcattgaggggctgagccccactgtttacaggaatccagagagtttcaaggaaaagttcgttcgcaagacccgcgagaacccggtggtacccataggttgcctggccacggcggccgccctcacctacggcctctactccttccaccggggcaacagccagcgctctcagctcatgatgcgcacccggatcgccgcccagggtttcacggtcgcagccatcttgctgggtctggctgtcactgctatgaagtctcgaccctaagcccagggtctggccttgaaagctccgcagaaatgattccaaaacccagggagcaaccactggccctaccgtgggacttactccctcctctcctttgagaggcccatgtgtcgctggggaggaagtgaccctttgtgtaactgtaaccgaaagttttttctgttgtttgaatgttacatacttctatttgtgccacatctcccctccactcccctgcttaataaactctaaaaatccacttgtattta

SEQ ID NO: 284190 - DNA, 2804 bp, Homo sapiens
acttctcgcgagagttgagcgcgcctggccggacgggaggaaagtatccgttccgccaaggggggaaaggaggagctggagacagattgtaggaccgagcgcgggcaggcgggaggcaacggagctaccagccgctcctctctgctatatgaaatatgggagacgacagaccgtttgtgtgcaatgccccgggctgtggacagagatttacaaacgaggaccacctggcagttcataaacacaagcatgagatgacattgaaatttggcccagcccgaactgactcagtcatcattgcagatcaaacgcctactccaactagattcctgaagaactgtgaggaggtgggactcttcaatgaactagctagctcctttgaacatgaattcaagaaagctgcagatgaggatgaggctgctgctgggccccttgacatgtctctgccttccacaccagacatcaaaatcaaagaagaagagccagtggaggtagactcatccccacctgatagccctgcctctagtccctgttccccaccactgaaggagaaggaggttaccccaaagcctgttctgatctctacccccacacccaccattgtacgtcctggctccctgcctctccacttgggctatgatccacttcatccaacccttccctccccaacctctgtcatcacacaggctccaccatccaacaggcaaatggggtctcccactggctccctccctcttgtcatgcatcttgctaatggacagaccatgcctgtgttgccagggcctccagtacagatgccgtctgttatatcgctggccagacctgtgtccatggtgcccaacattcctggtatccctggcccaccagttaacagtagtggctccatttctccctctggccaccctataccatcagaagccaagatgagactgaaagccaccctaactcaccaagtctcctcaatcaatggtggttgtggaatggtggtgggtactgccagcaccatggtgacagcccgcccagagcagagccagattctcatccagcaccctgatgccccatcccctgcccagccacaggtctcaccagctcagcccacccctagtactggggggcgacggcggcgcacagtagatgaagatccagatgagcgacggcagcgctttctggagcgcaaccgggctgcagcctcccgctgccgccaaaagcgaaagctgtgggtgtcctccctagagaagaaggccgaagaactcacttctcagaacattcagctgagtaatgaagtcacattactacgcaatgaggtggcccagttgaaacagctactgttagctcataaagactgcccagtcactgcactacagaaaaagactcaaggctatttagaaagccccaaggaaagctcagagccaacgggttctccagcccctgtgattcagcacagctcagcaacagcccctagcaatggcctcagtgttcgctctgcagctgaagctgtggccacctcggtcctcactcagatggccagccaaaggacagaactgagcatgccgatacaatcgcatgtaatcatgaccccacagtcccagtctgcgggcagatgatgcctcctctggtggagaggtcctcagccagagctcgcccgcccaagagccaagagagatgtcatcttatcccctcccatctgccttggacatggcaatatgggtggggggaattgtgtgttgtgagtaatggacagatatggggctttttagccatgtggtcatgtacgtttgacacctgtgctgggggcctcccagccccggagcctcatagatcatcccccagggtggggtttctgatgcatccacagccaaaggcctttccagatggtccgaacaatcacccctgccccatgcacgtgtatctgtctcttttaacactaacccttggcacttctaggtttggggtttctcagttccctctcttcccactaagccgtggctgttacctttttgttccttaccagcatgccacttcctgccagatagagggaggctagatttgatgacatattacccgctgacccagccccagccaccccatggactcaggactcaggtctcccatagctgcttatttacccgtttcctttttcctcttccttaattctagttaaaacattcacttacggagaatgtaaggttacctttgatgtatgaagtagcagtattttccagtttttccataagctttattccttctctctacctgccaccaaaaagaaagaaaccctcaagagttctaattctttttcatctatttgcagagctatttgggtacctcattttgtcccttgactttagtgtagtggtggggtctttcccaccaccccactaagccttggcaacctcattttgtggccttattattaaagattgcttggtagtgaaaagggaagggcccagaatctgactggctgattctgtctcctcccctccctccttctttagtttaaccatcagggcagacaggaacaaagtatttcaaagcttgttccatcaagttagggattaatcgattcctttatgttttataagagtttaccggccaaagcatattgtcatctttggtcatttttctgctcctgcttctctctcttcattggggtatcaacattaccgcccctgtctctcttcattcccctatcaacattaccgcccctgtctcttctgtaactacttcagactcagccctcctggaggctgtcatgtaggggactctcgaggttcctttgttctaccccatctctcccccccgaattc

SEQ ID NO: 284191 - DNA, 488 bp, Homo sapiens
gcgccccctactactactacatttgcggccggtcgacgaaaaaggcaagaagcaggactgttgccaaaaaactggtggtattcagacctaggctatttttattgtgctttgggataattttcttaattggttaaaacacaaaatcatgggcttagtagagtaaaaccagtaaaaccagatagtagtcactaatcccagtcagccattcaggtctttaggagttccagatgatggatcagcacaagtctgtcgtcaccgaaaattagtcctcttgttcttccaggggagtattagtttaataatcggttttttaaaaaatatttatattataaatatgttgaagatgttaaaaggtgataaattactcagattttgttggataacatatttgttgccaaattccactcttttctgagctgatcagacttctcagctacactgtttttttgaatcagcaagtcaataaacatttatcaaatttccactct

SEQ ID NO: 284192 - DNA, 2807 bp, Homo sapiens
acttctcgcgagagttgagcgcgcctggccggacgggaggaaagtatccgttccgccaaggggggaaaggaggagctggagacagattgtaggaccgagcgcgggcaggcgggaggcaacggagctaccagccgctcctctctgctatatgaaatatgggagacgacagaccgtttgtgtgcaatgccccgggctgtggacagagatttacaaacgaggaccacctggcagttcataaacacaagcatgagatgacattgaaatttggcccagcccgaactgactcagtcatcattgcagatcaaacgcctactccaactagattcctgaagaactgtgaggaggtgggactcttcaatgaactagctagctcctttgaacatgaattcaagaaagctgcagatgaggatgagaaaaaggcaagaagcaggactgttgccaaaaaactggtggctgctgctgggccccttgacatgtctctgccttccacaccagacatcaaaatcaaagaagaagagccagtggaggtagactcatccccacctgatagccctgcctctagtccctgttccccaccactgaaggagaaggaggttaccccaaagcctgttctgatctctacccccacacccaccattgtacgtcctggctccctgcctctccacttgggctatgatccacttcatccaacccttccctccccaacctctgtcatcacacaggctccaccatccaacaggcaaatggggtctcccactggctccctccctcttgtcatgcatcttgctaatggacagaccatgcctgtgttgccagggcctccagtacagatgccgtctgttatatcgctggccagacctgtgtccatggtgcccaacattcctggtatccctggcccaccagttaacagtagtggctccatttctccctctggccaccctataccatcagaagccaagatgagactgaaagccaccctaactcaccaagtctcctcaatcaatggtggttgtggaatggtggtgggtactgccagcaccatggtgacagcccgcccagagcagagccagattctcatccagcaccctgatgccccatcccctgcccagccacaggtctcaccagctcagcccacccctagtactggggggcgacggcggcgcacagtagatgaagatccagatgagcgacggcagcgctttctggagcgcaaccgggctgcagcctcccgctgccgccaaaagcgaaagctgtgggtgtcctccctagagaagaaggccgaagaactcacttctcagaacattcagctgagtaatgaagtcacattactacgcaatgaggtggcccagttgaaacagctactgttagctcataaagactgcccagtcactgcactacagaaaaagactcaaggctatttagaaagccccaaggaaagctcagagccaacgggttctccagcccctgtgattcagcacagctcagcaacagcccctagcaatggcctcagtgttcgctctgcagctgaagctgtggccacctcggtcctcactcagatggccagccaaaggacagaactgagcatgccgatacaatcgcatgtaatcatgaccccacagtcccagtctgcgggcagatgatgcctcctctggtggagaggtcctcagccagagctcgcccgcccaagagccaagagagatgtcatcttatcccctcccatctgccttggacatggcaatatgggtggggggaattgtgtgttgtgagtaatggacagatatggggctttttagccatgtggtcatgtacgtttgacacctgtgctgggggcctcccagccccggagcctcatagatcatcccccagggtggggtttctgatgcatccacagccaaaggcctttccagatggtccgaacaatcacccctgccccatgcacgtgtatctgtctcttttaacactaacccttggcacttctaggtttggggtttctcagttccctctcttcccactaagccgtggctgttacctttttgttccttaccagcatgccacttcctgccagatagagggaggctagatttgatgacatattacccgctgacccagccccagccaccccatggactcaggactcaggtctcccatagctgcttatttacccgtttcctttttcctcttccttaattctagttaaaacattcacttacggagaatgtaaggttacctttgatgtatgaagtagcagtattttccagtttttccataagctttattccttctctctacctgccaccaaaaagaaagaaaccctcaagagttctaattctttttcatctatttgcagagctatttgggtacctcattttgtcccttgactttagtgtagtggtggggtctttcccaccaccccactaagccttggcaacctcattttgtggccttattattaaagattgcttggtagtgaaaagggaagggcccagaatctgactggctgattctgtctcctcccctccctccttctttagtttaaccatcagggcagacaggaacaaagtatttcaaagcttgttccatcaagttagggattaatcgattcctttatgttttataagagtttaccggccaaagcatattgtcatctttggtcatttttctgctcctgcttctctctcttcattcccctatcaacattaccgcccctgtctcttctgtaactacttcagactcagccctcctggaggctgtcatgtaggggactctcgaggttcctttgttctaccccatctctcccccccgaattc

SEQ ID NO: 284193 - DNA, 721 bp, Homo sapiens
ggtcgatctcatagacggatcccccacatttgcaggatggactcaggactcaggtctcccatagctgcttatttacccgtttcctttttcctcttccttaattctagttaaaacattcacttacggagaatgtaaggttacctttgatgtatgaagtagcagtattttccagtttttccataagctttattccttctctctacctgccaccaaaaagaaagaaaccctcaagagttctaattctttttcatctatttgcagagctatttgggtacctcattttgtcccttgactttagtgtagtggtggggtctttcccaccaccccactaagccttggcaacctcattttgtggccttattattaaagattgcttggtagtgaaaagggaagggcccagaatctgactggctgattctgtctcctcccctccctccttctttagtttaaccatcagggcagacaggaacaaagtatttcaaagcttgttccatcaagttagggattaatcgattcctttatgttttataagagtttaccggccaaagcatattgtcatctttggtcatttttctgctcctgcttctctctcttcattcccctatcaacattaccgcccctgtctcttctgtaactacttcagactcagccctcctggaggctgtcatgtaggggactctcgaggttcctttgttctaccccatctctcccccccgaattc

SEQ ID NO: 284194 - DNA, 719 bp, Homo sapiens
gcgccccctactactactacatttgcggccggtcgacgaaaaaggcaagaagcaggactgttgccaaaaaactggtggctgctgctgggccccttgacatgtctctgccttccacaccagacatcaaaatcaaagaagaagagccagtggaggtagactcatccccacctgatagccctgcctctagtccctgttccccaccactgaaggagaaggaggttaccccaaagcctgttctgatctctacccccacacccaccattgtacgtcctggctccctgcctctccacttgggctatgatccacttcatccaacccttccctccccaacctctgtcatcacacaggctccaccatccaacaggcaaatggggtaagtacagagagcagggagaagtagtgaaggctgcatttctttccattacatgaaactatttgataaaactgggactgttttccaatacccaaggaaaataagtcactgagattatctctcaaaataaatttttcccccataaacagaatcttctttacctttttaatagacaagcaaatatttatttggaggtaatactttttgttttttttgggtttttttgagatagaggctcactccagcctgggtgatagagcaagactctgtctaaaaaaataccaaaaaaacaaatcctgttgatgggctaaagaggataaggactgtttatcagtatataatctat

SEQ ID NO: 284195 - DNA, 364 bp, Homo sapiens
aaatatgggagacgacagaccgtttgtgtgcaatgccccgggctgtggacaggtacgtttacaatatactttattgtgaatgtctcgttgtgaatcaaagtggctgttttatcactaaggcaaagagtttaaagccagtattttacgtgatcactggaggtaatcagatcagaggatttgcagtgtgtaaatccaagttatgaggaagtgtaggcactctaccgtaatgaaatctgccttgctgtcttccatattgttattctactggtgtttgtttcccaccacacagtatggaaaaatacatgttgctgtctcctcctttctaaagctgtccatctaaatacaaagcaagtttagaaatgtt

SEQ ID NO: 284196 - DNA, 863 bp, Homo sapiens
acttctcgcgagagttgagcgcgcctggccggacgggaggaaagtatccgttccgccaaggggggaaaggaggagctggagacagattgtaggaccgagcgcgggcaggcgggaggcaacggagctaccagccgctcctctctgctatatgaaatatgggagacgacagaccgtttgtgtgcaatgccccgggctgtggacagagatttacaaacgaggaccacctggcagttcataaacacaagcatgagatgacattgaaatttggcccagcccgaactgactcagtcatcattgcagatcaaacgcctactccaactagattcctgaagaactgtgaggaggtgggactcttcaatgaactagctagctcctttgaacatgaattcaagaaagctgcagatgaggatgagaaaaaggcaagaagcaggactgttgccaaaaaactggtggtattcagacctaggctatttttattgtgctttgggataattttcttaattggttaaaacacaaaatcatgggcttagtagagtaaaaccagtaaaaccagatagtagtcactaatcccagtcagccattcaggtctttaggagttccagatgatggatcagcacaagtctgtcgtcaccgaaaattagtcctcttgttcttccaggggagtattagtttaataatcggttttttaaaaaatatttatattataaatatgttgaagatgttaaaaggtgataaattactcagattttgttggataacatatttgttgccaaattccactcttttctgagctgatcagacttctcagctacactgtttttttgaatcagcaagtcaataaacatttatcaaatttccactct

SEQ ID NO: 284197 - DNA, 781 bp, Homo sapiens
tcctttggggggaaggcggggccagaggcttgaagtgtggggagaacttggtctcctctctgctatatgaaatatgggagacgacagaccgtttgtgtgcaatgccccgggctgtggacagagatttacaaacgaggaccacctggcagttcataaacacaagcatgagatgacattgaaatttggcccagcccgaactgactcagtcatcattgcagatcaaacgcctactccaactagattcctgaagaactgtgaggaggtgggactcttcaatgaactagctagctcctttgaacatgaattcaagaaagctgcagatgaggatgagaaaaaggcaagaagcaggactgttgccaaaaaactggtggtattcagacctaggctatttttattgtgctttgggataattttcttaattggttaaaacacaaaatcatgggcttagtagagtaaaaccagtaaaaccagatagtagtcactaatcccagtcagccattcaggtctttaggagttccagatgatggatcagcacaagtctgtcgtcaccgaaaattagtcctcttgttcttccaggggagtattagtttaataatcggttttttaaaaaatatttatattataaatatgttgaagatgttaaaaggtgataaattactcagattttgttggataacatatttgttgccaaattccactcttttctgagctgatcagacttctcagctacactgtttttttgaatcagcaagtcaataaacatttatcaaatttccactct

SEQ ID NO: 284198 - DNA, 2028 bp, Homo sapiens
acttctcgcgagagttgagcgcgcctggccggacgggaggaaagtatccgttccgccaaggggggaaaggaggagctggagacagattgtaggaccgagcgcgggcaggcgggaggcaacggagctaccagccgctcctctctgctatatgaaatatgggagacgacagaccgtttgtgtgcaatgccccgggctgtggacagagatttacaaacgaggaccacctggcagttcataaacacaagcatgagatgacattgaaatttggcccagcccgaactgactcagtcatcattgcagatcaaacgcctactccaactagattcctgaagaactgtgaggaggtgggactcttcaatgaactagctagctcctttgaacatgaattcaagaaagctgcagatgaggatgagaaaaaggcaagaagcaggactgttgccaaaaaactggtggctgctgctgggccccttgacatgtctctgccttccacaccagacatcaaaatcaaagaagaagagccagtggaggtagactcatccccacctgatagccctgcctctagtccctgttccccaccactgaaggagaaggaggttaccccaaagcctgttctgatctctacccccacacccaccattgtacgtcctggctccctgcctctccacttgggctatgatccacttcatccaacccttccctccccaacctctgtcatcacacaggctccaccatccaacaggcaaatggggtctcccactggctccctccctcttgtcatgcatcttgctaatggacagaccatgcctgtgttgccagggcctccagtacagatgccgtctgttatatcgctggccagacctgtgtccatggtgcccaacattcctggtatccctggcccaccagttaacagtagtggctccatttctccctctggccaccctataccatcagaagccaagatgagactgaaagccaccctaactcaccaagtctcctcaatcaatggtggttgtggaatggtggtgggtactgccagcaccatggtgacagcccgcccagagcagagccagattctcatccagcaccctgatgccccatcccctgcccagccacaggtctcaccagctcagcccacccctagtactggggggcgacggcggcgcacagtagatgaagatccagatgagcgacggcagcgctttctggagcgcaaccgggctgcagcctcccgctgccgccaaaagcgaaagctgtgggtgtcctccctagagaagaaggccgaagaactcacttctcagaacattcagctgagtaatgaagtcacattactacgcaatgaggtggcccagttgaaacagctactgttagctcataaagactgcccagtcactgcactacagaaaaagactcaaggctatttagaaagccccaaggaaagctcagagccaacgggttctccagcccctgtgattcagcacagctcagcaacagcccctagcaatggcctcagtgttcgctctgcagctgaagctgtggccacctcggtcctcactcagatggccagccaaaggacagaactgagcatgccgatacaatcgcatgtaatcatgaccccacagtcccagtctgcgggcagatgatgcctcctctggtggagaggtcctcagccagagctcgcccgcccaagagccaagagagatgtcatcttatcccctcccatctgccttggacatggcaatatgggtggggggaattgtgtgttgtgagtaatggacagatatggggctttttagccatgtggtcatgtacgtttgacacctgtgctgggggcctcccagccccggagcctcatagatcatcccccagggtggggtttctgatgcatccacagccaaaggcctttccagatggtccgaacaatcacccctgccccatgcacgtgtatctgtctcttttaacactaatttttggctctagaagaatggattttcatagttacctctttccctgccgtagttttaccctcaa

SEQ ID NO: 284199 - DNA, 1729 bp, Homo sapiens
gcgtacaacccggaagttggcgcagcgcggttgccaatggtcgctccctgagaggatgccgctcgtggtgttttgcgggctgccgtacagcggcaagagccggcgtgctgaagagttgcgcgtggcgctggctgccgagggccgcgcggtgtacgtggtggacgacgcagctgtcctgggcgcagaggacccagcggtgtacggcgattctgcccgtgagaaggcattgcgtggagctctgcgagcctccgtggaacggcgcctgagtcgccacgacgtggtcatcctggactcgcttaactacatcaaaggtttccgttacgagctctactgcctggcacgggcggcgcgcaccccgctctgcctggtctactgcgtacggcccggcggcccgatcgcgggacctcaggtggcgggcgcgaacgagaaccctggccggaacgtcagtgtgagttggcggccacgcgctgaggaggacgggagagcccaggcggcgggcagcagcgtcctcagggaactgcatactgcggactctgtagtaaatggaagtgcccaggccgacgtacccaaggaactggagcgagaagaatccggggctgcggagtctccagctcttgtgactccggattcagagaaatctgcaaagcatgggtccggtgccttttactctcccgaactcctggaggccctaacgctgcgctttgaggctcccgattctcggaatcgctgggaccggcctttattcactttggtgggcctagaggagccgttgcccctggcggggatccgctctgccctgtttgagaaccgggccccaccaccccatcagtctacgcagtcccagcccctcgcctccggcagctttctgcaccagttggaccaggtcacgagtcaagtactggccggattgatggaagcgcagaagagcgctgtccccggggacttgctcacgcttcctggtaccacagagcacttgcggtttacccggcccttgaccatggcagaactgagtcgccttcgtcgccagtttatttcgtacactaaaatgcatcccaacaatgagaacttgccgcaactggccaacatgtttcttcagtatttgagccagagcctgcactgaccagaggaggtaggggggaagccatggcttctgatctccactccactttatttctctgggaaaaataggctgcaggtctccagagcatatcgatgcagtactgtactagagctgttgtgactgattcactcaaactttcctgcatacccctgtgccaggccttgggtttacagcataagttcagactaaagagaatggagaactattgtggtgcaacctggcaaatccctcagaggacagagctaaggtggacagggattacctagattggatcctacttgggctatcacagagcattgaccattggcttccctcatctgaggcgtgggagagcagactggatagatgagaattgttttaaaacaattgtgaacagaaactgaagatggtacagttctacatctgcacctgcccttttttcataccacaaaagtattttttgagtactgtactgactttttgctagtttctattctgggaccgagttcacagataaatccattggtttgtatccttgagaaactttgtttttgtggaagtaagaaagttatctactagattatttcctctaataaaatcttttaaaatagtctactggaatctctttca

SEQ ID NO: 284200 - DNA, 779 bp, Homo sapiens
ctgatctagaggatacctcgaatcgacggtttctccggcccttgaccatggcagaactgagtcgccttcgtcgccagtttatttcgtacactaaaatgcatcccaacaatgagaacttgccgcaactggccaacatgtttcttcagtatttgagccagagcctgcactgaccagaggaggtaggggggaagccatggcttctgatctccactccactttatttctctgggaaaaataggctgcaggtctccagagcatatcgatgcagtactgtactagagctgttgtgactgattcactcaaactttcctgcatacccctgtgccaggccttgggtttacagcataagttcagactaaagagaatggagaactattgtggtgcaacctggcaaatccctcagaggacagagctaaggtggacagggattacctagattggatcctacttgggctatcacagagcattgaccattggcttccctcatctgaggcgtgggagagcagactggatagatgagaattgttttaaaacaattgtgaacagaaactgaagatggtacagttctacatctgcacctgcccttttttcataccacaaaagtattttttgagtactgtactgactttttgctagtttctattctgggaccgagttcacagataaatccattggtttgtatccttgagaaactttgtttttgtggaagtaagaaagttatctactagattatttcctctaataaaatcttttaaaatagtctactggaatctctttca

SEQ ID NO: 284201 - DNA, 1702 bp, Homo sapiens
gcgtacaacccggaagttggcgcagcgcggttgccaatggtcgctccctgagaggatgccgctcgtggtgttttgcgggctgccgtacagcggcaagagccggcgtgctgaagagttgcgcgtggcgctggctgccgagggccgcgcggtgtacgtggtggacgacgcagctgtcctgggcgcagaggacccagcggtgtacggcgattctgcccgtgagaaggcattgcgtggagctctgcgagcctccgtggaacggcgcctgagtcgccacgacgtggtcatcctggactcgcttaactacatcaaaggtttccgttacgagctctactgcctggcacgggcggcgcgcaccccgctctgcctggtctactgcgtacggcccggcggcgcgaacgagaaccctggccggaacgtcagtgtgagttggcggccacgcgctgaggaggacgggagagcccaggcggcgggcagcagcgtcctcagggaactgcatactgcggactctgtagtaaatggaagtgcccaggccgacgtacccaaggaactggagcgagaagaatccggggctgcggagtctccagctcttgtgactccggattcagagaaatctgcaaagcatgggtccggtgccttttactctcccgaactcctggaggccctaacgctgcgctttgaggctcccgattctcggaatcgctgggaccggcctttattcactttggtgggcctagaggagccgttgcccctggcggggatccgctctgccctgtttgagaaccgggccccaccaccccatcagtctacgcagtcccagcccctcgcctccggcagctttctgcaccagttggaccaggtcacgagtcaagtactggccggattgatggaagcgcagaagagcgctgtccccggggacttgctcacgcttcctggtaccacagagcacttgcggtttacccggcccttgaccatggcagaactgagtcgccttcgtcgccagtttatttcgtacactaaaatgcatcccaacaatgagaacttgccgcaactggccaacatgtttcttcagtatttgagccagagcctgcactgaccagaggaggtaggggggaagccatggcttctgatctccactccactttatttctctgggaaaaataggctgcaggtctccagagcatatcgatgcagtactgtactagagctgttgtgactgattcactcaaactttcctgcatacccctgtgccaggccttgggtttacagcataagttcagactaaagagaatggagaactattgtggtgcaacctggcaaatccctcagaggacagagctaaggtggacagggattacctagattggatcctacttgggctatcacagagcattgaccattggcttccctcatctgaggcgtgggagagcagactggatagatgagaattgttttaaaacaattgtgaacagaaactgaagatggtacagttctacatctgcacctgcccttttttcataccacaaaagtattttttgagtactgtactgactttttgctagtttctattctgggaccgagttcacagataaatccattggtttgtatccttgagaaactttgtttttgtggaagtaagaaagttatctactagattatttcctctaataaaatcttttaaaatagtctactggaatctctttca

SEQ ID NO: 284202 - DNA, 1115 bp, Homo sapiens
ggctggtactggctcgggattatgggcatgtggaagggaggtcacgctatcgtccgcggccccagcagccctgtgccctcgttggatcccgcgacgcggctcctttaagagcctcgcgggtcgcccgccgctaggtcgctccccggccatgcgggcgctgcgggccggcctgaccctggcgttgggcgcggggctgggtgcggtcgtcgagggctggcggcggcggcgggaggacgcgcgggcggcgccgggactgctgggccggctgcccgtgctgcccgtggcggcggcagccgagttgccccctgtgcccgggggaccccgcggcccgggcgagctggccaagtacgggctgccggggctggcgcagtcaagagccgcgagtcgtacgtgctgtgctacgacccgcgcacccgcggcgcgctctgggtggtggagcagctgcgacccgagcgtctccgcggcgaacggcgaccggcgcgagtgcgacttccgcgaggacgactcggtgcacgcgtaccaccgtgccaccaacgccgactaccgcggcagtggcttcgaccgcggtcacttggccgccgccgccaaccaccgctggagccagaaggccatggacgacacgttctacctgagcaacgtcgcgccccaggtgccccacctcaaccagaatgcctggaacaacctggagaaatatagccgcagcttgacccgcagctaccaaaacgtctatgtctgcacagggccactcttcctgcccaggacagaggctgatgggaaatcctacgtaaagtaccaggtcatcggcaagaaccacgtggcagtgcccacacacttcttcaaggtgctgatcctggaggcagcaggtgggcaaattgagctccgcacctacgtgatgcccaacgcacctgtggatgaggccatcccactggagcgcttcctggtgcccatcgagagcattgagcgggcttcggggctgctctttgtgccaaacatcctggcgcgggcaggcagcctcaaggccatcacggcgggcagtaagtgagggtggagcccagtgagactgtgggtgtgtgcaggccggggagtattaaaggtggtgatttttggagacaagt

SEQ ID NO: 284203 - DNA, 475 bp, Homo sapiens
tcccagagaccctgggtggggctggggacaggcctcattcctctctgaaaggtggagacaggctcttccttcattcgactcttgggagctgagaaaagactttgactcctgggctgtgggagggacagatggtggtggctaccactctatcagccctgggtttcagggagtgactttcattccttgagcctcagtttccccccgcttgtctcactggatatctctgagcctgtccatcccctcaggacctggggcggccctctgatagaggaggaagggtcccagccacagtcctgctaagccctatctctcctaccaggtgccccacctcaaccagaatgcctggaacaacctggagaaatatagccgcagcttgacccgcagctaccaaaacgtctatgtctgcacagggccactcttcctgcccaggtaaggtggaaaccaggggggcggcagaacctcccactcacccgag

SEQ ID NO: 284204 - DNA, 1151 bp, Homo sapiens
cacccggttgggctctgctgctcccttctgggttccgaggcccaagcccttggcagtgtttgtgagtggaagggaggtcacgctatcgtccgcggccccagcagccctgtgccctcgttggatcccgcgacgcggctcctttaagagcctcgcgggtcgcccgccgctaggtcgctccccggccatgcgggcgctgcgggccggcctgaccctggcgttgggcgcggggctgggtgcggtcgtcgagggctggcggcggcggcgggaggacgcgcgggcggcgccgggactgctgggccggctgcccgtgctgcccgtggcggcggcagccgagttgccccctgtgcccgggggaccccgcggcccgggcgagctggccaagtacgggctgccggggctggcgcagtcaagagccgcgagtcgtacgtgctgtgctacgacccgcgcacccgcggcgcgctctgggtggtggagcagctgcgacccgagcgtctccgcggcgaacggcgaccggcgcgagtgcgacttccgcgaggacgactcggtgcacgcgtaccaccgtgccaccaacgccgactaccgcggcagtggcttcgaccgcggtcacttggccgccgccgccaaccaccgctggagccagaaggccatggacgacacgttctacctgagcaacgtcgcgccccaggtgccccacctcaaccagaatgcctggaacaacctggagaaatatagccgcagcttgacccgcagctaccaaaacgtctatgtctgcacagggccactcttcctgcccaggacagaggctgatgggaaatcctacgtaaagtaccaggtcatcggcaagaaccacgtggcagtgcccacacacttcttcaaggtgctgatcctggaggcagcaggtgggcaaattgagctccgcacctacgtgatgcccaacgcacctgtggatgaggccatcccactggagcgcttcctggtgcccatcgagagcattgagcgggcttcggggctgctctttgtgccaaacatcctggcgcgggcaggcagcctcaaggccatcacggcgggcagtaagtgagggtggagcccagtgagactgtgggtgtgtgcaggccggggagtattaaaggtggtgatttttggagacaagt

SEQ ID NO: 284205 - DNA, 576 bp, Homo sapiens
tatcagccctgggtttcagggagtgactttcattccttgagcctcagtttccccccgcttgtctcactggatatctctgagcctgtccatcccctcaggacctggggcggccctctgatagaggaggaagggtcccagccacagtcctgctaagccctatctctcctaccaggtgccccacctcaaccagaatgcctggaacaacctggagaaatatagccgcagcttgacccgcagctaccaaaacgtctatgtctgcacagggccactcttcctgcccaggtaaggtggaaaccaggggggcggcagaacctcccactcacccgaggcccctactgccactcacagggccaggcttgccccaggctctgggtcaataccagttccctactcatctggtttcttggcaagcctgtcagcttccctgcctcgagtcccctcattccacctccacagccaaagacctgtcgggtacccctgaccatctctcctctgcccatgggcagcagcaggccctgaatctgcccccgcttctccctgctgtcacctcttggcatgcccacccaatcttgttct

SEQ ID NO: 284206 - DNA, 504 bp, Homo sapiens
tggtggtgagtatctttcttgttgaaactttgacatacagttttaacaatagctctatataaaaggcggcagtagtatttctagcttgaagaagttactgttcagttatgtcattaaaatattttaatcctatcattttttttttactctgaacaagttactgtagaaacaagatgctgatgtgagcatctaaaaagtggactcttaaggccaggcgcggtggctcacgcctgtaatctcagcacttgggaggccgaggcgggcagatcacctgaggtcaggagttcaagaccagcctggccagcaggtgaaaacccatctctactaaaaatagaaaagttagttgggcatggtggtggtggcaggcgcctgtagtgccagctcttcaggaagctaaggtaggagaatcacttgaacctggttggtggaggttgcagtcagcctgagatggtgccactgcactccagcctgggtgctagagtgagactccattaaaaaaaaaaa

SEQ ID NO: 284207 - DNA, 807 bp, Homo sapiens
cccgagccgggagggaagcctggggaggacacctggggggcacggccctgaccacgctcagacccaagagggcggggaggggcgcagggcgcgtggggggcgcgggcgcacttactcgagctccttgaagcgctcgcggcccgccgccacgtacttgccgcccgcctgcagcgcgtccagccccagcacccggtgcccacgcgtgggcgtgaagaggcggcgcacgccgaacgggacgtccacctgctccgtgagctgctccagcagcgcctcgaaggttgaatttgaccggttcagccccagtgtcttccaggactcctggcccagagtggggaatttgagcttttccaccagaggaggaggtgtgcagagccactgggaggccgtgaggaaccgcgctatagccgctggtgtgcggtgtcaggcgcgtgccattcagaacgcatcctcattggggaatgattcaaagggagagggggtctttggaagaatcgttcctactctgggtaaagataggccagtccccttgagtgattctagacagtcagtaggctacatgttacggctggaagtccacaccgaaggtacagatattgatattatgagtattaatatcttataatgttcaaaaaaagtagttccgtagagaccaccagtcacagccatagccagtatgtaagctactaaatgcctcatagcaacattaaatacagagatcaatttgtgagacgaccactttattaaatcaccaggtgttcaaaacatttgaaaagaagactatgactgggaaattactgctgtgtgtcc

SEQ ID NO: 284208 - DNA, 558 bp, Homo sapiens
cccgagccgggagggaagcctggggaggacacctggggggcacggccctgaccacgctcagacccaagagggcggggaggggcgcagggcgcgtggggggcgcgggcgcacttactcgagctccttgaagcgctcgcggcccgccgccacgtacttgccgcccgcctgcagcgcgtccagccccagcacccggtgcccacgcgtgggcgtgaagaggcggcgcacgccgaacgggacgtccacctgctccgtgagctgctccagcagcgcctcgaaggtggccgcgcggcgccgcgacagcacgaacttcttgcccacgtagaacgggtccccgttgcggtacaccacgatggtcttggcgggcgtggtgtccaccggcgcggagggcccgcgggttcccatagccgcgccccgctcctcgctcgccggggccgagaggctgcggcagcgcgggcagcgacgcctgcagagccgcgcccaggcccgggcaccgccgacgggaggtccgctccagccgctggcgcaggacggggacgggacggggacgggacgggggct

SEQ ID NO: 284209 - DNA, 2060 bp, Homo sapiens
ggcccgcgggctagaggcactttaccgcccggcgggagcgcctctcctccgcgtccctcgccccagccccctgcccgccccactttgggaccctccagccgctttccccacgaatgagatctttgcaatgagcaaacgaaagtggcgcggatttcggggcgcccagcaggagcgagcgcagccgccagccgcaagtccgcagccgtgtcccgcgccccacgccggcctccccggcggcagccggagacgagcgccagcaccggcgggacagcagcagatgcgggccgagagccggtcaggggcgcagaggcggaggggatcggcgcggcggggagctcaccgcgaagctggaggctgcgtccgcgggcgcaccaggagctcaggcagcgagcgatcgaacgctctgtggcaggcggtggacgctgctgaagctctggctctgagctcaccgctccgccgtccgtgggaccaagcccagcattttacaaacccagctcctgtctccaagggtcctcagagcgcccctccgtcaccccctgcagggcgccgcagacgaggcgctgaccttgcgctcgctcccctcgctggggaaggacacactcgctggcgtcagccggccggcctgggaagtaggactaaggacccgaactgcaaccctccacaccagacagcacagaccaccccaaggctgctcaatctgcccaaagccaaaagagctcccctgccaggacctcggtgccgtggagactgcggggaacctgctctgcccacacctgctctggcccctagacggaagcacctggagccaaccacggaactccagatcccagctgtgtgactgaatccacgccagcctctctgagccaaagctgcttgcagaagggggagatcccagttcgaagactcccgcgcagagcctgtggccctctctgccaggcctcagggtgcctgagacactcacctctctgcctcgcagttggggctgaggctggggctggctgccagcctcagttctgggagcgctggggtcgcctgggccacaggccacagcagctcacctcaggactgggctctctggcctgctggggctcaggctgtggggcaggctgggcagggggctgagctggcagcgattcagagccctggggctgggggctggaatccacctcctcccacacaagctcggtggtgactcttcggcccctggggaaaaacaaaaagatattgctgagatgacctcttttaaaagcaaagcccccctccccatacaccccaggcctgagccctgtcccatccccctccccgggttccttcaggtcaccttgtcaggatctgggcagcggcttccccctctagcccctcccctgcctagagctccctctttcaaagtataagggagggaagaagtggtgagaagtttgcctagaaagggcttcccggtgctgatggagaggccgagacccttctgttggacaggctgccctgttcctgggtgaggatgggcttctgcctggcactgggggtggagggtgcacacgaatggcccgccttgaggggtcatggcacggaatatgaaagcctcctccacctccaaacacccccaccttggaaggagataaggagggggccccagcaaaagccactggacacacagctctgcttgacgaggccagtgagggacggcgtggctgtgcttcctggggaaatgaaccccctccccacagacaccaccctgggtggattgaggagtctgggtccagggtgcaacagagaaaaacttcatgcatgaatgagcattcccagggaaactgccttggccccagggcgcctctctgtgccagggaggctgggagagcagcaagggggaccaggtgcgccatcaggaggagagaagctaaacctaggggggacatggagggccgttgttgcctctcccggcgtttctcctcagtctcctgtccaatttcttgctggtggtcagcaggcatagggaggcaggagggaaggaagctttacctgtaaaatggtgtatatatgtataaataaaatatctgcgccag

SEQ ID NO: 284210 - DNA, 1949 bp, Homo sapiens
ggcccgcgggctagaggcactttaccgcccggcgggagcgcctctcctccgcgtccctcgccccagccccctgcccgccccactttgggaccctccagccgctttccccacgaatgagatctttgcaatgagcaaacgaaagtggcgcggatttcggggcgcccagcaggagcgagcgcagccgccagccgcaagtccgcagccgtgtcccgcgccccacgccggcctccccggcggcagccggagacgagcgccagcaccggcgggacagcagcagatgcgggccgagagccggtcaggggcgcagaggcggaggggatcggcgcggcggggagctcaccgcgaagctggaggctgcgtccgcgggcgcaccaggagctcaggcagcgagcgatcgaacgctctgtggcaggcggtggacgctgctgaagggcgccgcagacgaggcgctgaccttgcgctcgctcccctcgctggggaaggacacactcgctggcgtcagccggccggcctgggaagtaggactaaggacccgaactgcaaccctccacaccagacagcacagaccaccccaaggctgctcaatctgcccaaagccaaaagagctcccctgccaggacctcggtgccgtggagactgcggggaacctgctctgcccacacctgctctggcccctagacggaagcacctggagccaaccacggaactccagatcccagctgtgtgactgaatccacgccagcctctctgagccaaagctgcttgcagaagggggagatcccagttcgaagactcccgcgcagagcctgtggccctctctgccaggcctcagggtgcctgagacactcacctctctgcctcgcagttggggctgaggctggggctggctgccagcctcagttctgggagcgctggggtcgcctgggccacaggccacagcagctcacctcaggactgggctctctggcctgctggggctcaggctgtggggcaggctgggcagggggctgagctggcagcgattcagagccctggggctgggggctggaatccacctcctcccacacaagctcggtggtgactcttcggcccctggggaaaaacaaaaagatattgctgagatgacctcttttaaaagcaaagcccccctccccatacaccccaggcctgagccctgtcccatccccctccccgggttccttcaggtcaccttgtcaggatctgggcagcggcttccccctctagcccctcccctgcctagagctccctctttcaaagtataagggagggaagaagtggtgagaagtttgcctagaaagggcttcccggtgctgatggagaggccgagacccttctgttggacaggctgccctgttcctgggtgaggatgggcttctgcctggcactgggggtggagggtgcacacgaatggcccgccttgaggggtcatggcacggaatatgaaagcctcctccacctccaaacacccccaccttggaaggagataaggagggggccccagcaaaagccactggacacacagctctgcttgacgaggccagtgagggacggcgtggctgtgcttcctggggaaatgaaccccctccccacagacaccaccctgggtggattgaggagtctgggtccagggtgcaacagagaaaaacttcatgcatgaatgagcattcccagggaaactgccttggccccagggcgcctctctgtgccagggaggctgggagagcagcaagggggaccaggtgcgccatcaggaggagagaagctaaacctaggggggacatggagggccgttgttgcctctcccggcgtttctcctcagtctcctgtccaatttcttgctggtggtcagcaggcatagggaggcaggagggaaggaagctttacctgtaaaatggtgtatatatgtataaataaaatatctgcgccag

SEQ ID NO: 284211 - DNA, 289 bp, Homo sapiens
acatgcaggctgcgctgggggccgtgacctggagccgtggccagggggacagcatcctggagccagaaatgtctgacagctcatcctcatctcattctatggatgagaaaaaagagaccgctggggtcgtggggacaggggtacgttgcgtgcctctgacgccttatctgaagaccagaatggcctcctgtgacctgatggtgtctgatgcctaggacatccaactacccccaagaagtcttttcacccagaacatataatcccccagccttggcaccataacttatat

SEQ ID NO: 284212 - DNA, 901 bp, Homo sapiens
tgcctcctgtttgtcaaatagaatgaatggtgatggtgatgggagggatagttaaacgttttctctgctaggttaacttcttacaggtataattacaatgcctgaaattctgtagtttcatttctttggattagtcgttgtcttttccagattgtacacaatctgatcaacacaaaggtagttagtagatcattaacctcaattgcaaggttataatttctcaaacattaagcatattatcagagtcctactagaaacaaacattccaaatgaactctgaatgcctgactcaggcgttttggaggtttgggttatccccttgtcattaggcacacaagggttttttgttgtttttgttttttgggtttttgttttgttttgaggcagtctcgctctgttgtacaagctggagtgctgtattgtgatcttgactcactgcaacctctgcctcctggttcaagcgattctcccagctaacttagccaggctgaggcaggaagtataggtcggaacccaggaggcagcagtagcgagtgagccaagatcgtgccagtaatccagcctggggcaaaatagcaagaaccgacccacatctctactaaacacacgaacctttaacacacgttgacactacgcagtcctagaagaatttacgaaacaagcagcaataagttacttgttggcccttgagacaacccggtgcgggcctgctcttaacggcactctaatataggtactcgtaaagggacacagcaggaagccactggcaaaagcacgcacgtcctacagactataaccaaaggatcaacctagagaaacgggagtcaccaattcaaccgggccgacacagcgcggaagcaacagcctgaccagggccctaggacagcagcaaagccctgaa

SEQ ID NO: 284213 - DNA, 527 bp, Homo sapiens
gaacatctctgcttccacccaaaaccacagcctttgaatattatataaggaacttaatggatagatatgtttattatttttgatagcacaactgctttctctgctattataaggaaaactgagaatagcaggtgggtagggtaggatgaggaaacaagatgcccaaagcctagatgccacagaattcatggtgataatcagggcatattttgagtcctactagaaacaaacattccaaatgaactctgaatgcctgactcaggcgttttggaggtttgggttatccccttgtcattaggcacacaagggttttttgttgtttttgttttttgggtttttgttttgttttgaggcagtctcgctctgttgtacaagctggagtgctgtattgtgatcttgactcactgcaacctctgcctcctggttcaagcgattctcctgccttggcctcctgagtagctgggattataagtgcctgccactatgcccggctaatttttgtatttttagtggagatggagttttgc

SEQ ID NO: 284214 - DNA, 1788 bp, Homo sapiens
attgtccactcttacttataaaacacttttttgttcattgtttaatcttgatagcagtattgaggctggtatttatatgataggttatgaaacaggttcaaagaagttgtgtcttggaaaaaaagtgacaatgcttttgaaaatgatgacgaaaaaggcatcttgtctgttaaccacagcttgctttaatagaatcctgggagggtgattgggactttttagtattacaaccttagtgtcattgaggaggattttggtctagttagtgggctgagtttcatatacctctccctccatgtgcaggtttgttaagataattggtagtttttaataatataaaatacttaagttgaaatacaaaagtgtggcaacaattattaaatattggctagaattctaggagagttacacaactagtggaagtccatgtttagaaaataaatggcttgtttaaggaaaagtttttgtgtccaaagctccttaaagtcagagagatttctacctggtacttaacatcatatggaaattgatgctttagtgagggtgttggctatcctattgtcaatttcctgcatccttttttcttctttatttttgtatagagacaaggtctcgctatgttgcccaggctggtcttgttcctgggctcaagcagtcctcccgcctcggtctcccaaagtgccgggattacaggtgtgagccactgtgcccagcttatccttttttcattacacaaaaagactgaatttggttagttctaagttggaagataaagatggtatgcacaggaggcccttgggagccctcagataactttctcattcttccaaaatcaggctgggatgcattctgtaaattttccctgcctaggatgtatacctgaggaataaggtaaggaagatgtcagcaagtcagcctctggtttacctgctagctggcatggatccttaaggaagcaggagggagttgggaagagaggaaggggtgaagttggtatcttttaaagcgagagtgattttacctcagattttgaagaatactaaggaatccagttgttggggtacatgctattattagaaggatctagataatttgtcctctgagtcatacttgacattgtacctgtggcacatcaatccgcactgtttgatactctggctgaatctcagctttcaccaacattgtcaaaggaccttttttagtgcccagccatgcctaagagtgtgtcatctgaagagggaagcatctgcatactgctgtcctgattgctcagtcctcactacctaccagacccgttggtaaggtacaaaagtacatgcttggaaaagcagtctgcaccaccagtgataagctgtgacagagtggaacagcctcaatgaaatgaaggaaggattgctacagtggcattaaggatggtctcttaatcctgtgttaaccactagattaactttacaatcaactcaaaatccttcaaaggctttccactttctttagtggcattcagaccccctctagtttgacccctacctccaacttgaacctctgttactcttccgtatgaacattttcctctagccctggactactagtaccgaagtcactagtcacataggactcatttgaaatatgactagtctcaattgagatgtaatgtaagtgtaaaatacacagcagatttctaagacagcacacaaaatgtaaaatatgtcaaaaatatttgatactgattacatgttgaaatatatgtgttgggttaaataaaatgcattaaagttaaaaaaaaaaaat

SEQ ID NO: 284215 - DNA, 1592 bp, Homo sapiens
tgcctcctgtttgtcaaatagaatgaatggtgatggtgatgggagggatagttaaacgttttctctgctaggttaacttcttacaggtataattacaatgcctgaaattctgtagtttcatttctttggattagtcgttgtcttttccagattgtacacaatctgatcaacacaaaggtagttagtagatcattaacctcaattgcaaggttataatttctcaaacattaagcatattatcagtcatgtggattcaaacacagtataagaaaatcctcaaggctgggtgtgatggcttatgcctgtaatcccagctacttagcaggctgaggcaggagtattgtttgaacccaggaggcagagttgcagtgagccaagatcgtgccactactccagcctgggcaaaatagcaagacccgaccccccatctctactaaaaagaaatttaaaaaaatgaaataaaatcctagaaaattagaaaaagcaacaatagttacttgtgagccactgtgcccagcttatccttttttcattacacaaaaagactgaatttggttagttctaagttggaagataaagatggtatgcacaggaggcccttgggagccctcagataactttctcattcttccaaaatcaggctgggatgcattctgtaaattttccctgcctaggatgtatacctgaggaataaggtaaggaagatgtcagcaagtcagcctctggtttacctgctagctggcatggatccttaaggaagcaggagggagttgggaagagaggaaggggtgaagttggtatcttttaaagcgagagtgattttacctcagattttgaagaatactaaggaatccagttgttggggtacatgctattattagaaggatctagataatttgtcctctgagtcatacttgacattgtacctgtggcacatcaatccgcactgtttgatactctggctgaatctcagctttcaccaacattgtcaaaggaccttttttagtgcccagccatgcctaagagtgtgtcatctgaagagggaagcatctgcatactgctgtcctgattgctcagtcctcactacctaccagacccgttggtaaggtacaaaagtacatgcttggaaaagcagtctgcaccaccagtgataagctgtgacagagtggaacagcctcaatgaaatgaaggaaggattgctacagtggcattaaggatggtctcttaatcctgtgttaaccactagattaactttacaatcaactcaaaatccttcaaaggctttccactttctttagtggcattcagaccccctctagtttgacccctacctccaacttgaacctctgttactcttccgtatgaacattttcctctagccctggactactagtaccgaagtcactagtcacataggactcatttgaaatatgactagtctcaattgagatgtaatgtaagtgtaaaatacacagcagatttctaagacagcacacaaaatgtaaaatatgtcaaaaatatttgatactgattacatgttgaaatatatgtgttgggttaaataaaatgcattaaagttaaaaaaaaaaaat

SEQ ID NO: 284216 - DNA, 1734 bp, Homo sapiens
attgtccactcttacttataaaacacttttttgttcattgtttaatcttgatagcagtattgaggctggtatttatatgataggttatgaaacaggttcaaagaagttgtgtcttggaaaaaaagtgacaatgcttttgaaaatgatgacgaaaaaggcatcttgtctgttaaccacagcttgctttaatagaatcctgggagggtgattgggactttttagtattacaaccttagtgtcattgaggaggattttggtctagttagtgggctgagtttcatatacctctccctccatgtgcaggtttgttaagataattggtagtttttaataatataaaatacttaagttgaaatacaaaagtgtggcaacaattattaaatattggctagaattctaggagagttacacaactagtggaagtccatgtttagaaaataaatggcttgtttaaggaaaagtttttgtgtccaaagctccttaaagtcagagagatttctacctggtacttaacatcatatggaaattgatgctttagtgagggtgttggctatcctattgtcaatttcctgcatccttttttcttctttatttttgtatagagacaaggtctcgctatgttgcccaggctggtcttgttcctgggctcaagcagtcctcccgcctcggtctcccaaagtgccgggattacaggtgtgagccactgtgcccagcttatccttttttcattacacaaaaagactgaatttggttagttctaagttggaagataaagatggtatgcacaggaggcccttgggagccctcagataactttctcattcttccaagaataaggtaaggaagatgtcagcaagtcagcctctggtttacctgctagctggcatggatccttaaggaagcaggagggagttgggaagagaggaaggggtgaagttggtatcttttaaagcgagagtgattttacctcagattttgaagaatactaaggaatccagttgttggggtacatgctattattagaaggatctagataatttgtcctctgagtcatacttgacattgtacctgtggcacatcaatccgcactgtttgatactctggctgaatctcagctttcaccaacattgtcaaaggaccttttttagtgcccagccatgcctaagagtgtgtcatctgaagagggaagcatctgcatactgctgtcctgattgctcagtcctcactacctaccagacccgttggtaaggtacaaaagtacatgcttggaaaagcagtctgcaccaccagtgataagctgtgacagagtggaacagcctcaatgaaatgaaggaaggattgctacagtggcattaaggatggtctcttaatcctgtgttaaccactagattaactttacaatcaactcaaaatccttcaaaggctttccactttctttagtggcattcagaccccctctagtttgacccctacctccaacttgaacctctgttactcttccgtatgaacattttcctctagccctggactactagtaccgaagtcactagtcacataggactcatttgaaatatgactagtctcaattgagatgtaatgtaagtgtaaaatacacagcagatttctaagacagcacacaaaatgtaaaatatgtcaaaaatatttgatactgattacatgttgaaatatatgtgttgggttaaataaaatgcattaaagttaaaaaaaaaaaat

SEQ ID NO: 284217 - DNA, 1480 bp, Homo sapiens
gaacatctctgcttccacccaaaaccacagcctttgaatattatataaggaacttaatggatagatatgtttattatttttgatagcacaactgctttctctgctattataaggaaaactgagaatagcaggtgggtagggtaggatgaggaaacaagatgcccaaagcctagatgccacagaattcatggtgataatcagggcatattttgagtcctactagaaacaaacattccaaatgaactctgaatgcctgactcaggcgttttggaggtttgggttatccccttgtcattaggcacacaagggttttttgttgtttttgttttttgggtttttgttttgttttgaggcagtctcgctatgttgcccaggctggtcttgttcctgggctcaagcagtcctcccgcctcggtctcccaaagtgccgggattacaggtgtgagccactgtgcccagcttatccttttttcattacacaaaaagactgaatttggttagttctaagttggaagataaagatggtatgcacaggaggcccttgggagccctcagataactttctcattcttccaagaataaggtaaggaagatgtcagcaagtcagcctctggtttacctgctagctggcatggatccttaaggaagcaggagggagttgggaagagaggaaggggtgaagttggtatcttttaaagcgagagtgattttacctcagattttgaagaatactaaggaatccagttgttggggtacatgctattattagaaggatctagataatttgtcctctgagtcatacttgacattgtacctgtggcacatcaatccgcactgtttgatactctggctgaatctcagctttcaccaacattgtcaaaggaccttttttagtgcccagccatgcctaagagtgtgtcatctgaagagggaagcatctgcatactgctgtcctgattgctcagtcctcactacctaccagacccgttggtaaggtacaaaagtacatgcttggaaaagcagtctgcaccaccagtgataagctgtgacagagtggaacagcctcaatgaaatgaaggaaggattgctacagtggcattaaggatggtctcttaatcctgtgttaaccactagattaactttacaatcaactcaaaatccttcaaaggctttccactttctttagtggcattcagaccccctctagtttgacccctacctccaacttgaacctctgttactcttccgtatgaacattttcctctagccctggactactagtaccgaagtcactagtcacataggactcatttgaaatatgactagtctcaattgagatgtaatgtaagtgtaaaatacacagcagatttctaagacagcacacaaaatgtaaaatatgtcaaaaatatttgatactgattacatgttgaaatatatgtgttgggttaaataaaatgcattaaagttaaaaaaaaaaaat

SEQ ID NO: 284218 - DNA, 538 bp, Homo sapiens
cctactactactactactacacccgcggccggtgcgacagacccgttggtaaggtacaaaagtacatgcttggaaaagcagtctgcaccaccagtgataagctgtgacagagtggaacagcctcaatgaaatgaaggaaggattgctacagtggcattaaggatggtctcttaatcctgtgttaaccactagattaactttacaatcaactcaaaatccttcaaaggctttccactttctttagtggcattcagaccccctctagtttgacccctacctccaacttgaacctctgttactcttccgtatgaacattttcctctagccctggactactagtaccgaagtcactagtcacataggactcatttgaaatatgactagtctcaattgagatgtaatgtaagtgtaaaatacacagcagatttctaagacagcacacaaaatgtaaaatatgtcaaaaatatttgatactgattacatgttgaaatatatgtgttgggttaaataaaatgcattaaagttaaaaaaaaaaaat

SEQ ID NO: 284219 - DNA, 326 bp, Homo sapiens
ggccacaggagctctggccaaggccccaggagtcaagaagtgcacagagggcatggatgcgttggaaaggggaggtgctggccttttaaagatcatatggcttggacaaggaacatgagcactgagatctgctataatcaacactcttattggaagcattactgttccgtgaaaaatcgcctgtgcctgggcttctcttgcatgctgcagacctcctattgttttctaatgccacgccgaagaaatgctcatctatatttgtttttgttagatcagccaaagacatagcaaacaacctaataaaagaaaagtaaaacctaaaaaaa

SEQ ID NO: 284220 - DNA, 599 bp, Homo sapiens
caggaagaagctcagcagcaccagcgtgaccaacagctgggtgacgaaagtccacatcctcgcctcctcaccagcccggtcctctggcagccagggccccggcaccacgggggcctgcctctcattctccactgggactcctgagtccccagggaccccttgcattccccctccctatctctctggtttgctctcttggtctctcactgtttctctctctgtgggcaggacaccgaatggccctctcggctgaagcagcccggcccaagtgcccttctgcccagcagccaggctctgccctgagtggcccgggtgacatcacgctcctataattttacctccccaaaccagctgccggagctgtccaaccgggctagaaggaagccggcaggtgcccatgtcctgagcactgaaagcacaagtgaaagtcactgtgtgagtgacacccgctgctgcctaaccccgccctgcccagagacctggaagtgggggctcggcctctcgcctatcctgcccatccccatgggaactagaaagagttctgcccagggaaagtttcttactttcagaaaataatacagtccgagaaagcagctact

SEQ ID NO: 284221 - DNA, 476 bp, Homo sapiens
ggaggtgcagacacactgcccaccagggagaagagagactggagagagagctcataaagagcactttgcagtatagaaaagcccttcgacaggcagcatcacccagaatgtgacttgcttgaaaccccagagccagttggtgacagaaacaggacgatccgggtgcaatcccatggctgcacgcctgctatcccagcactttgggaggccaaggccggaggaccacttgagcccaggagttcaagaccaatttgggcaacatagcgagcccccatctctacaaaaatttttttaaaatagccaggcatggtggtgtgtgcctgtagtaccagctactcagaaggctgaggcaggaggatcacttgagcccaggaatttacagtaagcccaggttacagtgagccatgagcatgccactgcactccagcctggactaaacagcaagacttcatctctaaaaacaaaagaaaaaagag

SEQ ID NO: 284222 - DNA, 1019 bp, Homo sapiens
agcgccgagcggccgctggccgcggctgctggcggcgaggacgcggcggcggccggaggcgggggcggtccgggggcggccgaggaggaggccctggagtggtgtaagtgccttctggcgggcggcggcggctacgacgagttctgcgcggcggtgcgggcctacgatcccgcggcgctctgcggcctggtctggacagccaacttcgtggcctaccgctgccggacgtgcggcatctcgccctgcatgtcgctgtgcgccgagtgcttccaccagggcgaccacaccggacacgacttcaacatgttccgcagccaggccgggggcgcctgcgactgcggggacagcaacgtgatgcgggagagcgggttttgcaaaaggcatcaaattaaatcaagttcaaatattccctgtgtccctaaagacttactgatgatgtctgaatttgttcttccaagatttatattttgtcttattcagtacttaagagaaggctataatgaaccagcagctgatggaccatcagaaaaggaccttaacaaagtccttcagcttttggaacctcaaatttcctttttagaagacctgactaaaatgggaggagcaatgcggtctgttcttactcaggttttgacaaaccaacaaaactacaaagatctgacttctggtcttggagaaaatgcttgtgtaaagaaaagtcatgaaaagtaccttatagctttaaagagctctggacttacatatcctgaggataagcttgtatatggtgtgcaggagccatctgctggtactagttctctggctgttcaaggtttcataggcgcaacaggaactttgggacaagtggattcttcagatgaggatgatcaggatggtagtcaaggtctgggcaagagaaaaagggtaaaactaagcagtggcaccaaagatcaatccataatggatgttttgaagcataaaagcttcctagaagaactattattttggactataaaatatgaattccctcaaaagatggt

SEQ ID NO: 284223 - DNA, 630 bp, Homo sapiens
gggtgtgtgcggaacatggcggagcgcggcaggaagcggccgtgcggcccgggtgaacacggccaaaggattgagtggcgaaaatggaagcaacagagatgttcttttatccagagaaagaggagaaaaaaaaatggaaggatctcaagctgatgaaaaaactggagcggcagcgggcacaggaggaacaggcaaagcgcctggaagaggaggaggcagcggcagagaaggaggaccgcgggcggccctacacactgagcgtagccctgccgggctccatcctggacaatgctcagtcgccggagcttcgcacctacttggccggtcagattgccagagcctgtgccatcttctgtgtggatgagatcgtggtgtttgatgaggagggctaggatgccaagactgtggagggggaattcacaggagttgggaagaaggggcaggcgtgcgtacagctggcccggatcctgcagtacctggagtgtccacagtacctgaggaaggcgttcttccccaagcaccaggatctacagtttgcaggtaacgctgtgtgggcccgcccccccatttcccctggatcatgccacagacactgagaccacccagtcctaccctgcgctgtccaggtgg

SEQ ID NO: 284224 - DNA, 1689 bp, Homo sapiens
gggtgtgtgcggaacatggcggagcgcggcaggaagcggccgtgcggcccgggtgaacacggccaaaggattgagtggcgaaaatggaagcaacagagatgttcttttatccagagaaagaggagaaaaaaaaatggaaggatctcaagctgatgaaaaaactggagcggcagcgggcacaggaggaacaggcaaagcgcctggaagaggaggaggcagcggcagagaaggaggaccgcgggcggccctacacactgagcgtagccctgccgggctccatcctggacaatgctcagtcgccggagcttcgcacctacttggccggtcagattgccagagcctgtgccatcttctgtgtggatgagatcgtggtgtttgatgaggagggctaggatgccaagactgtggagggggaattcacaggagttgggaagaaggggcaggcgtgcgtacagctggcccggatcctgcagtacctggagtgtccacagtacctgaggaaggcgttcttccccaagcaccaggatctacagtttgcagggcttctgaaccccctggacagcccccaccacatgcgtcaggatgaggaatccgagttccgagagggcatcgtggtggatcggcccacccggccaggccacggctcctttgtcaactgtggcatgaaaaaggaggtgaagattgacaagaacctggagcccgggcttcgggtgactgtgcgactgaaccagcagcagcacccagactgcaagacctaccatggcaaagtggtatcatcgcaggaccctcgcaccaaagctggtctctactggggctacaccgtccgactggcttcctgcctcagtgctgtgtttgctgaggcccccttccaagatgggtatgacctgaccatcgggacgtcagagcgcggctcagatgtggcctctgcccagcttcccaacttcaggaagccatcctcatctccctggccgccctgcagcctggcctcacccaggcgggtgcccggcacacctgaaagttctaaggggccgaggacatcagtgaagcagcagtgaaaccaggggctctgcaggtcacttgggacggacgccaccagacttgtctccaaaaatcaccacctttaatactccccggcctgcacacacccacagtctcactgggctccaccctcacttactgcccgccgtgatggccttgaggctgcctgcccgcgccaggatgtttggcacaaagagcagccccgaagcccgctcaatgctctcgatgggcaccaggaagcgctccagtgggatggcctcatccacaggtgcgttgggcatcacgtaggtgcggagctcaatttgcccacctgctgcctccaggatcagcaccttgaagaagtgtgtgggcactgccacgtggttcttgccgatgacctggtactttacgtaggatttcccatcagcctctgtcctgtgggcagacccaggcacacgtgggcagggggcctggatgaacccaaagccacctcttccaggcagccttccctgatctgtcctctaacttctgtcaacctgcaggaccacgccctcactgtgagacttctgtagcctgcctggctcctccttgaggctggaactctctccagggtggttaactctttccctctgttttccttatgcccaacactgggtcaggcagagtgggcga

SEQ ID NO: 284225 - DNA, 1837 bp, Homo sapiens
gggtgtgtgcggaacatggcggagcgcggcaggaagcggccgtgcggcccgggtgaacacggccaaaggattgagtggcgaaaatggaagcaacagagatgttcttttatccagagaaagaggagaaaaaaaaatggaaggatctcaagctgatgaaaaaactggagcggcagcgggcacaggaggaacaggcaaagcgcctggaagaggaggaggcagcggcagagaaggaggaccgcgggcggccctacacactgagcgtagccctgccgggctccatcctggacaatgctcagtcgccggagcttcgcacctacttggccggtcagattgccagagcctgtgccatcttctgtgtggatgagatcgtggtgtttgatgaggagggctaggatgccaagactgtggagggggaattcacaggagttgggaagaaggggcaggcgtgcgtacagctggcccggatcctgcagtacctggagtgtccacagtacctgaggaaggcgttcttccccaagcaccaggatctacagtttgcagggcttctgaaccccctggacagcccccaccacatgcgtcaggatgaggaatccgagttccgagagggcatcgtggtggatcggcccacccggccaggccacggctcctttgtcaactgtggcatgaaaaaggaggtgaagattgacaagaacctggagcccgggcttcgggtgactgtgcgactgaaccagcagcagcacccagactgcaagacctaccatggcaaagtggtatcatcgcaggaccctcgcaccaaagctggtctctactggggctacaccgtccgactggcttcctgcctcagtgctgtgtttgctgaggcccccttccaagatgggtatgacctgaccatcgggacgtcagagcgcggctcagatgtggcctctgcccagcttcccaacttcaggcatgctcttgtggtgttcgggggcctccagggtctggaagctggagcggatgctgaccccaacctggaggtggctgaacccagtgtcctctttgacctgtacgtcaatacctgtcctggccagggtagccgtaccatccgcacggaggaagccatcctcatctccctggccgccctgcagcctggcctcacccaggcgggtgcccggcacacctgaaagttctaaggggccgaggacatcagtgaagcagcagtgaaaccaggggctctgcaggtcacttgggacggacgccaccagacttgtctccaaaaatcaccacctttaatactccccggcctgcacacacccacagtctcactgggctccaccctcacttactgcccgccgtgatggccttgaggctgcctgcccgcgccaggatgtttggcacaaagagcagccccgaagcccgctcaatgctctcgatgggcaccaggaagcgctccagtgggatggcctcatccacaggtgcgttgggcatcacgtaggtgcggagctcaatttgcccacctgctgcctccaggatcagcaccttgaagaagtgtgtgggcactgccacgtggttcttgccgatgacctggtactttacgtaggatttcccatcagcctctgtcctgtgggcagacccaggcacacgtgggcagggggcctggatgaacccaaagccacctcttccaggcagccttccctgatctgtcctctaacttctgtcaacctgcaggaccacgccctcactgtgagacttctgtagcctgcctggctcctccttgaggctggaactctctccagggtggttaactctttccctctgttttccttatgcccaacactgggtcaggcagagtgggcga

SEQ ID NO: 284226 - DNA, 492 bp, Homo sapiens
atctttccaattcccagtccctctgcctagaatgcatccttattgtgaaaggaatacatcagcttagcacaattcaacattctctgactctgatttcccttgttctgattccagtcccaccaatccaacttgtactgattactttcttttccagtgtaggttagctcatgggaagagaatgcattattcatgtcctctcaaatatactggttgccctgacagttgtttcttattgtatgaactggacttgaggcaatgggctggagctgcaggtgcttatacttctgtttctgggacagatctgtttctttttgaacattgatactattttggttttataaatcagtcttgtcaacttagttactgtgactccaccccagcagtcttcagtatgctaatctagtgcctaagctaaaaggttgagggtcagctcctgaccctggtgaattgtgcattaaagccgcttagaaaccagcgtgccaaccccctgct

SEQ ID NO: 284227 - DNA, 1921 bp, Homo sapiens
attcctgctgtggatcccaactttcctaacaaaccaccccttacatttgacataattaggaagaatgttgaaaataatcgctaccgtcggcttgatttatttcaagagcatatgtttgaagtattggaacgagcaagaaggatgaatcggacagattcagaaatatatgaagatgcagtagaacttcagcagttttttattaaaattcgtgatgaactctgcaaaaatggagagattcttctttcaccggcactcagctataccacaaaacatttgcataatgatgtggagaaagagagaaaggaaaaattgccaaaagaaatagaggaagataaactaaaacgagaagaagaaaaaagagaagctgaaaagagtgaagattcctctggtgctgcaggcctctcaggcttacatcgcacatacagccaggactgtagctttaaaaacagcatgtaccatgttggagattacgtctatgtggaacctgcagaggccaacctacaaccacatatcgtctgtattgaaagactgtgggaggattcagctggtgaaaaatggttgtatggctgttggttttaccgaccaaatgaaacattccacctggctacacgaaaatttctagaaaaagaagtttttaagagtgactattacaacaaagttccagttagtaaaattctaggcaagtgtgtggtcatgtttgtcaaggaatactttaagttatgcccagaaaacttccgagatgaggatgtttttgtctgtgaatcacggtattctgccaaaaccaaatcttttaagaaaattaaactgtggaccatgcccatcagctcagtcaggtttgtccctcgggatgtgcctctgcctgtggttcgcgtggcctctgtatttgcaaatgcagataaaggtgatgatgagaagaatacagacaactcagaggacagtcgagctgaagacaattttaacttggaaaaggtatgcagataatagccacacagaaaaaattttacatctcaaaacacctattccagaaaataaatgaataaagtattcaaacttagaaaaagagcaacaacacaaaaccttagccaaacaggaagaaggaaactataacagaaagaaatttacactttcaaaactgtacattataatttaaaagtaaatcaggccaagtgcattggttcacgcctgtaatcccagcattttgggaggccaaggcgggcagatcacgagatcaggagttcgagaccagcctgaccaacatggtgaaacctcatctctactaaaaatacaaaaattagctgggtgtggtggcgcgtgcctgtaattccagctacccaggaggctgaggcaggagaatggcgtgaacctgggaggcggaggctgcagtgagctgagaccacgccactctactccagcctgggcaacagagtgagtctctgtctcaaaaaaacaaaaaatttttttaaagtaaatctaagagctaattatttgacaagtccaattagataaactgccaactatctaataatgggaaaagaaaggggttaaacttcgacacaaaatgtggaagaaggccaggcgcggtggctcacacctgtaatcccagcactttgggaggccaagatgggtggattacctgaggtcaggagttcgagaccagcctggccaacgtggtgaaaccctgtctctactaaaaatacaaaaaattagctgggtgaggtggtgggtgcctgtaatcccaacgggaggctgaggcaggagaatcgcttgaacccaggaggcagaggttgcagtgagccgagatcgtgctattgcagtccagcctgggcaacaagagcgaaactctgtctcaaaaaataaataaataaataaatgtggaagaaatgtaaagactgtatatttctgctaataaatttgaaaacct

SEQ ID NO: 284228 - DNA, 353 bp, Homo sapiens
ccacaggtaagaggcagccactgctttatttttatttcttttataaggacagtggtagggggtggttgagagctgacaaaatgcgacaggttctttagttggatagaaacacagtggaagccacacgtgagaatttcaattttctatcagccacataaaaataagtaaaaagaaactggtcagcctgtctctacaaaaaaattaaaaagtagctgtggtggcgtgttcccgtggtcccatctactcgggaggctgaggtgagaggatcgcttgagcccgggaggcagaggttgcagtgagctctgattggaccgctgcactccagcctgggcaacagagagaaaccctgtctc

SEQ ID NO: 284229 - DNA, 929 bp, Homo sapiens
tgttgtcccacaagtaggctgatttctgatcgcacagatgggtcagagtaaaaccttctattcttgagcctgtgccccgcgacactgaacttcacaagtgcttctcagttcttccttctcctctcacttggcgggacaagatgaatagaggaagatgatgggggatacatctctttccacaggactcagtggtctttgaggatgtggctgtggacttcaccctggaggagtgggctttgctggattctgctcagagggacctctacagagatgtgatgctggagaccttccggaacctggcctcagtagatgatgggactcaatttaaagccaatgggtcagtttctctgcaggatatgtacgggcaagaaaaatctaaggaacagacaataccaaacttcacaggaaataattcctgtgcctacactttagaaaaaaattgtgaaggctatggcactgaagaccaccacaaaaatctgagaaatcatatggtggacagattctgtacacataatgaaggtaatcaatatggagaagccatccatcaaatgccagatcttaccctgcacaagaaagtttctgctggagaaaaaccatatgaatgcaccaagtgcaggacagtcttcacgcatctttcttctcttaaaaggcacgtcaagtctcactgtggacgaaaagcacctccaggtgaggaatgtaagcaggcctgcatttgtccctcacacctacacagtcacggaagaaccgacactgaggagaagccgtataagtgtcaagcatgtgggcaaactttccaacatcctcgttacctctcccaccacgtaaagactcacacagcagagaaaacctacaaatgcgagcagtgtcggatggcgtttaatgggttcgcaagcttcactagacatgtgagaactcacacaaaagacagg

SEQ ID NO: 284230 - DNA, 830 bp, Homo sapiens
gggagtacctgtacctttcagctgcgccggccgcgaggccacggagagctcgccttggagagcccaggagcaggggagacatggactcagtggtctttgaggatgtggctgtggacttcaccctggaggagtgggctttgctggattctgctcagagggacctctacagagatgtgatgctggagaccttccggaacctggcctcagtagatgatgggactcaatttaaagccaatgggtcagtttctctgcaggatatgtacgggcaagaaaaatctaaggaacagacaataccaaacttcacaggaaataattcctgtgcctacactttagaaaaaaattgtgaaggctatggcactgaagaccaccacaaaaatctgagaaatcatatggtggacagattctgtacacataatgaaggtaatcaatatggagaagccatccatcaaatgccagatcttaccctgcacaagaaagtttctgctggagaaaaaccatatgaatgcaccaagtgcaggacagtcttcacgcatctttcttctcttaaaaggcacgtcaagtctcactgtggacgaaaagcacctccaggtgaggaatgtaagcaggcctgcatttgtccctcacacctacacagtcacggaagaaccgacactgaggagaagccgtataagtgtcaagcatgtgggcaaactttccaacatcctcgttacctctcccaccacgtaaagactcacacagcagagaaaacctacaaatgcgagcagtgtcggatggcgtttaatgggttcgcaagcttcactagacatgtgagaactcacacaaaagacagg

SEQ ID NO: 284231 - DNA, 803 bp, Homo sapiens
tgttgtcccacaagtaggctgatttctgatcgcacagatgggtcagagtaaaacctgactcagtggtctttgaggatgtggctgtggacttcaccctggaggagtgggctttgctggattctgctcagagggacctctacagagatgtgatgctggagaccttccggaacctggcctcagtagatgatgggactcaatttaaagccaatgggtcagtttctctgcaggatatgtacgggcaagaaaaatctaaggaacagacaataccaaacttcacaggaaataattcctgtgcctacactttagaaaaaaattgtgaaggctatggcactgaagaccaccacaaaaatctgagaaatcatatggtggacagattctgtacacataatgaaggtaatcaatatggagaagccatccatcaaatgccagatcttaccctgcacaagaaagtttctgctggagaaaaaccatatgaatgcaccaagtgcaggacagtcttcacgcatctttcttctcttaaaaggcacgtcaagtctcactgtggacgaaaagcacctccaggtgaggaatgtaagcaggcctgcatttgtccctcacacctacacagtcacggaagaaccgacactgaggagaagccgtataagtgtcaagcatgtgggcaaactttccaacatcctcgttacctctcccaccacgtaaagactcacacagcagagaaaacctacaaatgcgagcagtgtcggatggcgtttaatgggttcgcaagcttcactagacatgtgagaactcacacaaaagacagg

SEQ ID NO: 284232 - DNA, 920 bp, Homo sapiens
  misc_feature (587)..(587): n is a, c, g, or t
  misc_feature (911)..(920): n is a, c, g, or t
tgtctgtcagagctgtcagcctgcttaagcagagtaaaatggtacaggcagtgcagcctggtagcgagaaaaaaggctgcctgtgaaatcccactgtgggaccataagtggggacctcagggccccttcatggcatctccatggccatgtcatgctggagaaggaggcgtttcaagaatgtgagctgatcgctggaaactgctcatctgactccagtctcaaaagaggctatgtgcaagaatcgggtgaagttgtgagaccccatccacccctcacaagattgtatccccaccctgtctgaccttactgctgctcaaactatctgtccaaggatgaaaacccaggacaaaggaggagtaaccctcatgatgtgaagcacgtgttcacctgtgaatataacctgaggatcatgagactatctgtggatttcacagagaagacagacgagaagacaccgctgacacttctccacggaggtctccttttccaccaagatgcagatgcttcttgcaaggactatcctgtgaatcccacagagaagacaggtgtggttccaatgccggtgcacctccagggaattctccttntctaccaagctccaggccttctgccatgatcatgagactatttgtggatttcacagagaagataggtgaaggtacagcatggcatccacccctcaccagaggggtatccccacccctatctgaccttattaccttattgctgttcaaagtctctatcccagactgaaatcccaagacaatggagaagttccccctgatgatgtgaagcaccaactcctctgggaatcaaattcgaggtaaatttaataggcccggtagagatgaatgatagtgtctctccttggattggctgaaagacaattaaacactggtatatttctgttnnnnnnnnnn

SEQ ID NO: 284233 - DNA, 717 bp, Homo sapiens
tctacccttcctatggaaaagggacacatttgacaactcttgaacctgctttgttgctcttagttctgtagcattcttagcaaacagggattcttacatttgatatatggaaatgtcagcctatgattttctattcttaaggcacataacattaaattagaagaaatacttaaaacttgaagaaaatattcttcacagttttaagctgtattcagattatagctcagaaaaacatgtttccagttcacaaaccatttgttcaaaataaaacccacaagttacaaatagaataaaaatcatgattattttaatcaaaagaaatctgactgactagcatatgtgatttctcttcctggctttcctcattttaagtatgtgtgtttgtgtgcatgtgcacacacctgtgcaaaggtgtgtttatggtggacaaagggattttaggcagtagccacaggaactgagttggttctttcagttatctaacggcaatcccaattttaggattcctcttcctaaactggaatctcagggacaagcttgcatagctaaagaaaaaaacactgaacatgaactataataacagggtttgggtttttttgttttgttttgagacagggtctcactctgttgcccaggcaggggtacagtgatgctttctcagctcacgctagttcatcgcgagcggccgcacaactttgtacaagaaagttgggtttt

SEQ ID NO: 284234 - DNA, 1012 bp, Homo sapiens
tcaggacaaatcagggtggtgaccttggccacatcactgtcatagagcttcttcacagcctgtctgatctggtgcttgttggctttaacatccacagtgaacacaagcgtgttgttttcttctatcttcttcacggccgactcagtggtcagcggaaacttgatgatagcatagtggccaagcttgtttctcctgggggtgctcttccgaggatatctgggctgcctccggagtcgcagtgtcttgggccgcctgaagatattatttccccctgatgctttcctgaaagctcctgcaatcaactacaggtcagaatgttcgtctccaagacaggactccccctgagactcacagaaaagactatgacaggtactctggttataggcttctgatgatattgcttaaataactttaagaccatacacttgactcagttaaggtctccagaagtccggttgggaaactgatgggttcatgacactgctaactcaagatccacaagactggaattgattacatggcactgaatgaactgatgaaaattgattataattgtatagctttttggagcattgctggttaatattctagtttctggatttaagaaatctctttctcttactctaactgtaacttacaacaatttagtagattatacttttgtaaacagaaatgaagcgtttatctttttcttgcctgatttttccagaattttgaaatccttactgaatactcttatttccacgatgatattgttgttagcaaaagtccaataagaatctattcatcttataacaggacataattggaaattttggttatattatcaaggtttttactggaatatcatatttagggagtgtacctaagatcagttatgaccagcaattttaaggaagtaaggttgacttttatggagacaatgcttacaaagcactgtggaaaactttgaggaaagttcttcctcaaagattataaagtcacaactacccactatttttatatgtatgtg

SEQ ID NO: 284235 - DNA, 751 bp, Homo sapiens
gagccatgaaagacttaagtatttttctatataaacttcagaattcaataatgtcagtgtatatctttaaaacaaatttctcagttaaaaccaaataggacatagtgatttactttaaacgtcaagcatctttcagatcaaactgtcatatgttgtgttgccaggaacgggtaaaacgacatttatcagaatgcttgctggaagacttaaacctgatgaaggaggagaagtaccagttctaaatgtcagttataagccacagaaaattagtcccaaatcaactggaagtgttcgccagttactacatgaaaagataagagatgcttatactcacccacaatttgtgaccgatgtaatgaagcctctgcaaattgaaaacatcattgatcaagaggtgcagacattatctggtggtgaactacagcgagtagctttagccctttgcttgggcaaacctgctgatgtctatttaattgatgaaccatctgcatatttggattctgagcaaagactgatggcagctcgagttgtcaaacgtttcatactccatgcaaaaaagacagcctttgttgtggaacatgacttcatcatggccacctatctagcggatcgcgtcatcgtttttgatggtgttccatctaagaacacagttgcaaacaggtaaaattactttttaatatgttcaaagtaattcattttaaattttccagtaaatagtaaagtcactcactttaatttttaaaaaatgaaa

SEQ ID NO: 284236 - DNA, 630 bp, Homo sapiens
tagccgagcgtggtggcagcgcctgtagtcccagctactcaggaggctgaggcaggagaatggcgtgaacctgggaggcagagcttgcagtgagtggagattgcatcactacactctagcctgggcgacaaagcgagagtctgtctcaaaaaaaaataaaaaaataaagatgtttgtcatctttttgctaaataaataattaaaaacctaatgtattttgtgctgcaaattgacaacagcaagaaggtgaaaaggctttacccacaagatgggagaaacatttgcacatcatatatccaataaaggacttgtatccagcatgtataaagaactcttataattaaaaatgagcaaatgtcttttagttattcagccataaaaagaaatgaaatattaacaaatgccacagtccttgaaaccattctgttaaagttaacctcctttgatttctgcgggtgttgtaatgaactcctcagtacctcaacattcaatttatgttttgtctacttggcttagcttaccataaaagttttgtcattgatgctctctataagcttagctttaaattctaaaattcagccttatcctgaaacagcaaggaaaagccatcttaggattcatccctagcac

SEQ ID NO: 284237 - DNA, 4201 bp, Homo sapiens
tgacccaccggccttgaggaaagcgcaaacgtaaaaaaagattgaaaccggagaggcgaatgcatctgtttacgctaggaccacgctcgacgtcggagaaaagcccacacactcacagtttccagacctggctgcttgccgaaactcagattctcggcacctccagcagctggcttcgccaacggcgttgaacaagggtcgcagctcaatgacgtcatatctccctacctacctccagggttccgcctcacgctctatgtcgcgcgcgcgcactacgtcctatgggcttgcgcgtgcggcggctgggcaccgccattttggccggtggccgtgagaacacgctgtgtggctgaaaagtgaaggcaagagctgatttggcctctgtgctcccctccgcaaggggatcgttttctccagaagagctggatattctttcgcccagttatggcagacaagttaacgagaattgctattgtcaaccatgacaaatgtaaacctaagaaatgtcgacaggaatgcaaaaagagttgtcctgtagttcgaatgggaaaattatgcatagaggttacaccccagagcaaaatagcatggatttccgaaactctttgtattggttgtggtatctgtattaagaaatgcccctttggcgccttatcaattgtcaatctaccaagcaacttggaaaaagaaaccacacatcgatattgtgccaatgccttcaaacttcacaggttgcctatccctcgtccaggtgaagttttgggattagttggaactaatggtattggaaagtcaactgctttaaaaattttagcaggaaaacaaaagccaaaccttggaaagtacgatgatcctcctgactggcaggagattttgacttatttccgtggatctgaattacaaaattactttacaaagattctagaagatgacctaaaagccatcatcaaacctcaatatgtagaccagattcctaaggctgcaaaggggacagtgggatctattttggaccgaaaagatgaaacaaagacacaggcaattgtatgtcagcagcttgatttaacccacctaaaagaacgaaatgttgaagatctttcaggaggagagttgcagagatttgcttgtgctgtcgtttgcatacagaaagctgatattttcatgtttgatgagccttctagttacctagatgtcaagcagcgtttaaaggctgctattactatacgatctctaataaatccagatagatatatcattgtggtggaacatgatctaagtgtattagactatctctccgacttcatctgctgtttatatggtgtaccaagcgcctatggagttgtcactatgccttttagtgtaagagaaggcataaacatttttttggatggctatgttccaacagaaaacttgagattcagagatgcatcacttgtttttaaagtggctgagacagcaaatgaagaagaagttaaaaagatgtgtatgtataaatatccaggaatgaagaaaaaaatgggagaatttgagctagcaattgtagctggagagtttacagattctgaaattatggtgatgctgggggaaaatggaacgggtaaaacgacatttatcagaatgcttgctggaagacttaaacctgatgaaggaggagaagtaccagttctaaatgtcagttataagccacagaaaattagtcccaaatcaactggaagtgttcgccagttactacatgaaaagataagagatgcttatactcacccacaatttgtgaccgatgtaatgaagcctctgcaaattgaaaacatcattgatcaagaggtgcagacattatctggtggtgaactacagcgagtagctttagccctttgcttgggcaaacctgctgatgtctatttaattgatgaaccatctgcatatttggattctgagcaaagactgatggcagctcgagttgtcaaacgtttcatactccatgcaaaaaagacagcctttgttgtggaacatgacttcatcatggccacctatctagcggatcgcgtcatcgtttttgatggtgttccatctaagaacacagttgcaaacagtcctcaaacccttttggctggcatgaataaatttttgtctcagcttgaaattacattcagaagagatccaaacaactataggccacgaataaacaaacttaattcaattaaggatgtagaacaaaagaagagtggaaactactttttcttggatgattagactgactctgagaatattgataagccatttattaaaaggagtatttactagaattttttgtcatataaaacttgaatcaggattttatgccccacatactctggaacttgaagtataatatacttaatataacataaaaagccagttgggttctaaattgtagttgaaacacagaaaatgccacttttctgttcctgaagaggctcttttgtgcataatattctaaaatgaagacatttcaagctatacaaattacttccaagttttcatgatgtatgggaagattttcagtaggtgtattatattcacggtaccaaatgctgaccagtgttgctccattttttaaatcttgaaaagggtttctgtacttacctggtttgccaagtatgccagtgtaatgaaactgcccttattttaaaagccagtcaaagattccactgattgacatttgataaataaacatcaggattatgtttattgtttgttttcagtctttgcactatattaccagtatatggtttccgaggaagattatctactgcaaaacaccactgttggaaaaataggtatttttaaattgtttttaatcttttttggtgcttttaaacatgtttagcaaaaaccaattcagttccattccccgcaaaaaacccctaactttactctgaactttttttgtttttgcattccatgaggttctgtattcagtcattctctaggtaatgtcatttttgtacacatatatttatataatcactgattgagatttaggaaaaagcatttctaaagaatatttgcttcccttagaactacagactcgaaatctttaaagatggtgcctaagcatctatgtattttttttaagttccacagatttttctgttgggcagccaaggattataaaccacttccctaaaggcaacattaatgcaaaagtccccagatggcaatacaaagtatcccctggtaccacatatattcatttgtgagtttggatatagagcacattatctaaaccattttgtagttccaaaaacccatctaaatttcttgagttcctgaattttgaacaggattacctggagcctggagccactttaagttgtacttctgactaaactggaattatgagtgaggaagagtgtttactaaataaatgactggggcaagcaaaattgaggaggaaattagaaactgtttgacaaactttaagagctacttgaaataacagaagtcttgattaatatgcaaataatggctagaaagtatggtttaactggaccctattatgccttttaaaaataatttcagtaacccataaatacatgttgtaaaaaattcaaatatacagaatggaataaaaaaatgatctccctttattaccctcccaaaggttaccagcgtttgaatttaataatgtatattctttcatgcttttttctgtgcacttacctaagtgtgaatatgtaaagggtttgttttgtatacaaatgggattatactaaaataagtaatgcctatttttaaggataggttaaatttgtgaatgatcatttcaaatatattgaataaaataagcaaaagctattgttatttactgatcctggattgtcttaaagaaagtacttgtgatataagagcacagttctacttactgctaatgacagaatatgtattaaacgtattttcatgtaaatgaaatctttaaaatatgtatcttaaaattttacatagcaacagaaaggcctacaattgctaacacaagaaaaatacttataaaatcagtataaaatcaatgcagatgttagcaaaagaatgagactacttcatatgtcctaattggaaaaagtctcaaatacttaaaaaaacaaaaaactggaacagtttattatactaccatttttgtgaaaatatacaaaatattgaaataaaggaatactcaagaaacagaaaactt

SEQ ID NO: 284238 - DNA, 4128 bp, Homo sapiens
tgacccaccggccttgaggaaagcgcaaacgtaaaaaaagattgaaaccggagaggcgaatgcatctgtttacgctaggaccacgctcgacgtcggagaaaagcccacacactcacagtttccagacctggctgcttgccgaaactcagattctcggcacctccagcagctggcttcgccaacggcgttgaacaagggtcgcagctcaatgacgtcatatctccctacctacctccagggttccgcctcacgctctatgtcgcgcgcgcgcactacgtcctatgggcttgcgcgtgcggcggctgggcaccgccattttggccggtggccgtgagaacacgctgtgtggctgaaaagtgaaggcaagagctgatttggcctctgtgctcccctccgcaaggggatcgttttctccagaagagctggatattctttcgcccagttatggcagacaagttaacgagaattgctattgtcaaccatgacaaatgtaaacctaagaaatgtcgacaggaatgcaaaaagagttgtcctgtagttcgaatgggaaaattatgcatagaggttacaccccagagcaaaatagcatggatttccgaaactctttgtattggttgtggtatctgtattaagaaatgcccctttggcgccttatcaattgtcaatctaccaagcaacttggaaaaagaaaccacacatcgatattgtgccaatgccttcaaacttcacaggttgcctatccctcgtccaggtgaagttttgggattagttggaactaatggtattggaaagtcaactgctttaaaaattttagcaggaaaacaaaagccaaaccttggaaagtacgatgatcctcctgactggcaggagattttgacttatttccgtggatctgaattacaaaattactttacaaagattctagaagatgacctaaaagccatcatcaaacctcaatatgtagaccagattcctaaggctgcaaaggggacagtgggatctattttggaccgaaaagatgaaacaaagacacaggcaattgtatgtcagcagcttgatttaacccacctaaaagaacgaaatgttgaagatctttcaggaggagagttgcagagatttgcttgtgctgtcgtttgcatacagaaagctgatattttcatgtttgatgagccttctagttacctagatgtcaagcagcgtttaaaggctgctattactatacgatctctaataaatccagatagatatatcattgtggtggaacatgatctaagtgtattagactatctctccgacttcatctgctgtttatatggtgtaccaagcgcctatggagttgtcactatgccttttagtgtaagagaaggcataaacatttttttggatggctatgttccaacagaaaacttgagattcagagatgcatcacttgtttttaaagtggctgagacagcaaatgaagaagaagttaaaaagatgtgtatgtataaatatccaggaatgaagaaaaaaatgggagaatttgagctagcaattgtagctggagagtttacagattctgaaattatggtgatgctgggggaaaatggaacgggtaaaacgacatttatcagaatgcttgctggaagacttaaacctgatgaaggaggagaagtaccagttctaaatgtcagttataagccacagaaaattagtcccaaatcaactggaagtgttcgccagttactacatgaaaagataagagatgcttatactcacccacaatttgtgaccgatgtaatgaagcctctgcaaattgaaaacatcattgatcaagaggtgcagacattatctggtggtgaactacagcgagtagctttagccctttgcttgggcaaacctgctgatgtctatttaattgatgaaccatctgcatatttggattctgagcaaagactgatggcagctcgagttgtcaaacgtttcatactccatgcaaaaaagacagcctttgttgtggaacatgacttcatcatggccacctatctagcggatcgcgtcatcgtttttgatggtgttccatctaagaacacagttgcaaacagtcctcaaacccttttggctggcatgaataaatttttgtctcagcttgaaattacattcagaagagatccaaacaactataggccacgaataaacaaacttaattcaattaaggatgtagaacaaaagaagagtggaaactactttttcttggatgattagactgactctgagaatattgataagccatttattaaaaggagtatttactagaattttttgtcatataaaacttgaatcaggattttatgccccacatactctggaacttgaagtataatatacttaatataacataaaaagccagttgggttctaaattgtagttgaaacacagaaaatgccacttttctgttcctgaagaggctcttttgtgcataatattctaaaatgaagacatttcaagctatacaaattacttccaagttttcatgatgtatgggaagattttcagtaggtgtattatattcacggtaccaaatgctgaccagtgttgctccattttttaaatcttgaaaagggtttctgtacttacctggtttgccaagtatgccagtgtaatgaaactgcccttattttaaaagccagtcaaagattccactgattgacatttgataaataaacatcaggattatgtttattgtttgttttcagtctttgcactatattaccagtatatggtttccgaggaagattatctactgcaaaacaccactgttggaaaaataggtatttttaaattgtttttaatcttttttggtgcttttaaacatgtttagcaaaaaccaattcagttccattccccgcaaaaaacccctaactttactctgaactttttttgtttttgcattccatgaggttctgtattcagtcattctctaggtaatgtcatttttgtacacatatatttatataatcactgattgagatttaggaaaaagcatttctaaagaatatttgcttcccttagaactacagactcgaaatctttaaagatggtgcctaagcatctatgtattttttttaagttccacagatttttctgttgggcagccaaggattataaaccacttccctaaaggcaacattaatgcaaaagtccccagatggcaatacaaagtatcccctggtaccacatatattcatttgtgagtttggatatagagcacattatctaaaccattttgtagttccaaaaacccatctaaatttcttgagttcctgaattttgaacaggattacctggagcctggagccactttaagttgtacttctgactaaactggaattatgagtgaggaagagtgtttactaaataaatgactggggcaagcaaaattgaggaggaaattagaaactgtttgacaaactttaagagctacttgaaataacagaagtcttgattaatatgcaaataatggctagaaagtatggtttaactggaccctattatgccttttaaaaataatttcagtaacccataaatacatgttgtaaaaaattcaaatatacagaatggaataaaaaaatgatctccctttattaccctcccaaaggttaccagcgtttgaatttaataatgtatattctttcatgcttttttctgtgcacttacctaagtgtgaatatgtaaagggtttgttttgtatacaaatgggattatactaaaataagtaatgcctatttttaaggataggttaaatttgtgaatgatcatttcaaatatattgaataaaataagcaaaagctattgttatttaaaaaaaaaaaaaaaaaaaaaaaaaaaaaaaaaaaaaaaaaaaaaaaaaaaaaacaaaaaaaaagaatcgcaccccaccaaccaagaaaaaaataaacctccacagaaggacacaccaacatttaagcaaggaacacaccgctccaagcgaagcaaaccgggaccccatcaacaagccccatgactaacaacacagaaacacacggccacacttaacacagctcgcatcggcgtcacatcctcccgtaccctcctagaacgaatccaacgtgggatgaaaacaagtga

SEQ ID NO: 284239 - DNA, 4108 bp, Homo sapiens
tgacccaccggccttgaggaaagcgcaaacgtaaaaaaagattgaaaccggagaggcgaatgcatctgtttacgctaggaccacgctcgacgtcggagaaaagcccacacactcacagtttccagacctggctgcttgccgaaactcagattctcggcacctccagcagctggcttcgccaacggcgttgaacaagggtcgcagctcaatgacgtcatatctccctacctacctccagggttccgcctcacgctctatgtcgcgcgcgcgcactacgtcctatgggcttgcgcgtgcggcggctgggcaccgccattttggccggtggccgtgagaacacgctgtgtggctgaaaagtgaaggcaagagctgatttggcctctgtgctcccctccgcaaggggatcgttttctccagaagagctggatattctttcgcccagttatggcagacaagttaacgagaattgctattgtcaaccatgacaaatgtaaacctaagaaatgtcgacaggaatgcaaaaagagttgtcctgtagttcgaatgggaaaattatgcatagaggttacaccccagagcaaaatagcatggatttccgaaactctttgtattggttgtggtatctgtattaagaaatgcccctttggcgccttatcaattgtcaatctaccaagcaacttggaaaaagaaaccacacatcgatattgtgccaatgccttcaaacttcacaggttgcctatccctcgtccaggtgaagttttgggattagttggaactaatggtattggaaagtcaactgctttaaaaattttagcaggaaaacaaaagccaaaccttggaaagtacgatgatcctcctgactggcaggagattttgacttatttccgtggatctgaattacaaaattactttacaaagattctagaagatgacctaaaagccatcatcaaacctcaatatgtagaccagattcctaaggctgcaaaggggacagtgggatctattttggaccgaaaagatgaaacaaagacacaggcaattgtatgtcagcagcttgatttaacccacctaaaagaacgaaatgttgaagatctttcaggaggagagttgcagagatttgcttgtgctgtcgtttgcatacagaaagctgatattttcatgtttgatgagccttctagttacctagatgtcaagcagcgtttaaaggctgctattactatacgatctctaataaatccagatagatatatcattgtggtggaacatgatctaagtgtattagactatctctccgacttcatctgctgtttatatggtgtaccaagcgcctatggagttgtcactatgccttttagtgtaagagaaggcataaacatttttttggatggctatgttccaacagaaaacttgagattcagagatgcatcacttgtttttaaagtggctgagacagcaaatgaagaagaagttaaaaagatgtgtatgtataaatatccaggaatgaagaaaaaaatgggagaatttgagctagcaattgtagctggagagtttacagattctgaaattatggtgatgctgggggaaaatggaacgggtaaaacgacatttatcagaatgcttgctggaagacttaaacctgatgaaggaggagaagtaccagttctaaatgtcagttataagccacagaaaattagtcccaaatcaactggaagtgttcgccagttactacatgaaaagataagagatgcttatactcacccacaatttgtgaccgatgtaatgaagcctctgcaaattgaaaacatcattgatcaagaggtgcagacattatctggtggtgaactacagcgagtagctttagccctttgcttgggcaaacctgctgatgtctatttaattgatgaaccatctgcatatttggattctgagcaaagactgatggcagctcgagttgtcaaacgtttcatactccatgcaaaaaagacagcctttgttgtggaacatgacttcatcatggccacctatctagcggatcgcgtcatcgtttttgatggtgttccatctaagaacacagttgcaaacagtcctcaaacccttttggctggcatgaataaatttttgtctcagcttgaaattacattcagaagagatccaaacaactataggccacgaataaacaaacttaattcaattaaggatgtagaacaaaagaagagtggaaactactttttcttggatgattagactgactctgagaatattgataagccatttattaaaaggagtatttactagaattttttgtcatataaaacttgaatcaggattttatgccccacatactctggaacttgaagtataatatacttaatataacataaaaagccagttgggttctaaattgtagttgaaacacagaaaatgccacttttctgttcctgaagaggctcttttgtgcataatattctaaaatgaagacatttcaagctatacaaattacttccaagttttcatgatgtatgggaagattttcagtaggtgtattatattcacggtaccaaatgctgaccagtgttgctccattttttaaatcttgaaaagggtttctgtacttacctggtttgccaagtatgccagtgtaatgaaactgcccttattttaaaagccagtcaaagattccactgattgacatttgataaataaacatcaggattatgtttattgtttgttttcagtctttgcactatattaccagtatatggtttccgaggaagattatctactgcaaaacaccactgttggaaaaataggtatttttaaattgtttttaatcttttttggtgcttttaaacatgtttagcaaaaaccaattcagttccattccccgcaaaaaacccctaactttactctgaactttttttgtttttgcattccatgaggttctgtattcagtcattctctaggtaatgtcatttttgtacacatatatttatataatcactgattgagatttaggaaaaagcatttctaaagaatatttgcttcccttagaactacagactcgaaatctttaaagatggtgcctaagcatctatgtattttttttaagttccacagatttttctgttgggcagccaaggattataaaccacttccctaaaggcaacattaatgcaaaagtccccagatggcaatacaaagtatcccctggtaccacatatattcatttgtgagtttggatatagagcacattatctaaaccattttgtagttccaaaaacccatctaaatttcttgagttcctgaattttgaacaggattacctggagcctggagccactttaagttgtacttctgactaaactggaattatgagtgaggaagagtgtttactaaataaatgactggggcaagcaaaattgaggaggaaattagaaactgtttgacaaactttaagagctacttgaaataacagaagtcttgattaatatgcaaataatggctagaaagtatggtttaactggaccctattatgccttttaaaaataatttcagtaacccataaatacatgttgtaaaaaattcaaatatacagaatggaataaaaaaatgatctccctttattaccctcccaaaggttaccagcgtttgaatttaataatgtatattctttcatgcttttttctgtgcacttacctaagtgtgaatatgtaaagggtttgttttgtatacaaatgggattatactaaaataagtaatgcctatttttaaggataggttaaatttgtgaatgatcatttcaaatatattgaataaaataaaaaaaaaaaaaaaaaaaaaaaaaaaaaaaaaaaaaaaaaaaaaaaaaaaaaaacaaaaaaaaagaatcgcaccccaccaaccaagaaaaaaataaacctccacagaaggacacaccaacatttaagcaaggaacacaccgctccaagcgaagcaaaccgggaccccatcaacaagccccatgactaacaacacagaaacacacggccacacttaacacagctcgcatcggcgtcacatcctcccgtaccctcctagaacgaatccaacgtgggatgaaaacaagtga

SEQ ID NO: 284240 - DNA, 3613 bp, Homo sapiens
tgacccaccggccttgaggaaagcgcaaacgtaaaaaaagattgaaaccggagaggcgaatgcatctgtttacgctaggaccacgctcgacgtcggagaaaagcccacacactcacagtttccagacctggctgcttgccgaaactcagattctcggcacctccagcagctggcttcgccaacggcgttgaacaagggtcgcagctcaatgacgtcatatctccctacctacctccagggttccgcctcacgctctatgtcgcgcgcgcgcactacgtcctatgggcttgcgcgtgcggcggctgggcaccgccattttggccggtggccgtgagaacacgctgtgtggctgaaaagtgaaggcaagagctgatttggcctctgtgctcccctccgcaaggggatcgttttctccagaagagctggatattctttcgcccagttatggcagacaagttaacgagaattgctattgtcaaccatgacaaatgtaaacctaagaaatgtcgacaggaatgcaaaaagagttgtcctgtagttcgaatgggaaaattatgcatagaggttacaccccagagcaaaatagcatggatttccgaaactctttgtattggttgtggtatctgtattaagaaatgcccctttggcgccttatcaattgtcaatctaccaagcaacttggaaaaagaaaccacacatcgatattgtgccaatgccttcaaacttcacaggttgcctatccctcgtccaggtgaagttttgggattagttggaactaatggtattggaaagtcaactgctttaaaaattttagcaggaaaacaaaagccaaaccttggaaagtacgatgatcctcctgactggcaggagattttgacttatttccgtggatctgaattacaaaattactttacaaagattctagaagatgacctaaaagccatcatcaaacctcaatatgtagaccagattcctaaggctgcaaaggggacagtgggatctattttggaccgaaaagatgaaacaaagacacaggcaattgtatgtcagcagcttgatttaacccacctaaaagaacgaaatgttgaagatctttcaggaggagagttgcagagatttgcttgtgctgtcgtttgcatacagaaagctgatattttcatgtttgatgagccttctagttacctagatgtcaagcagcgtttaaaggctgctattactatacgatctctaataaatccagatagatatatcattgtggtggaacatgatctaagtgtattagactatctctccgacttcatctgctgtttatatggtgtaccaagcgcctatggagttgtcactatgccttttagtgtaagagaaggcataaacatttttttggatggctatgttccaacagaaaacttgagattcagagatgcatcacttgtttttaaagtggctgagacagcaaatgaagaagaagttaaaaagatgtgtatgtataaatatccaggaatgaagaaaaaaatgggagaatttgagctagcaattgtagctggagagtttacagattctgaaattatggtgatgctgggggaaaatggaacgggtaaaacgacatttatcagaatgcttgctggaagacttaaacctgatgaaggaggagaagtaccagttctaaatgtcagttataagccacagaaaattagtcccaaatcaactggaagtgttcgccagttactacatgaaaagataagagatgcttatactcacccacaatttgtgaccgatgtaatgaagcctctgcaaattgaaaacatcattgatcaagaggtgcagacattatctggtggtgaactacagcgagtagctttagccctttgcttgggcaaacctgctgatgtctatttaattgatgaaccatctgcatatttggattctgagcaaagactgatggcagctcgagttgtcaaacgtttcatactccatgcaaaaaagacagcctttgttgtggaacatgacttcatcatggccacctatctagcggatcgcgtcatcgtttttgatggtgttccatctaagaacacagttgcaaacagtcctcaaacccttttggctggcatgaataaatttttgtctcagcttgaaattacattcagaagagatccaaacaactataggccacgaataaacaaacttaattcaattaaggatgtagaacaaaagaagagtggaaactactttttcttggatgattagactgactctgagaatattgataagccatttattaaaaggagtatttactagaattttttgtcatataaaacttgaatcaggattttatgccccacatactctggaacttgaagtataatatacttaatataacataaaaagccagttgggttctaaattgtagttgaaacacagaaaatgccacttttctgttcctgaagaggctcttttgtgcataatattctaaaatgaagacatttcaagctatacaaattacttccaagttttcatgatgtatgggaagattttcagtaggtgtattatattcacggtaccaaatgctgaccagtgttgctccattttttaaatcttgaaaagggtttctgtacttacctggtttgccaagtatgccagtgtaatgaaactgcccttattttaaaagccagtcaaagattccactgattgacatttgataaataaacatcaggattatgtttattgtttgttttcagtctttgcactatattaccagtatatggtttccgaggaagattatctactgcaaaacaccactgttggaaaaataggtatttttaaattgtttttaatcttttttggtgcttttaaacatgtttagcaaaaaccaattcagttccattccccgcaaaaaacccctaactttactctgaactttttttgtttttgcattccatgaggttctgtattcagtcattctctaggtaatgtcatttttgtacacatatatttatataatcactgattgagatttaggaaaaagcatttctaaagaatatttgcttcccttagaactacagactcgaaatctttaaagatggtgcctaagcatctatgtattttttttaagttccacagatttttctgttgggcagccaaggattataaaccacttccctaaaggcaacattaatgcaaaagtccccagatggcaatacaaagtatcccctggtaccacatatattcatttgtgagtttggatatagagcacattatctaaaccattttgtagttccaaaaacccatctaaatttcttgagttcctgaattttgaacaggattacctggagcctggagccactttaagttgtacttctgactaaactggaattatgagtgaggaagagtgtttactaaataaatgactggggcaagcaaaattgaggaggaaattagaaactgtttgacaaactttaagagctacttgaaataacagaagtcttgattaatatgcaaataatggctagaaagtatggtttaactggaccctattatgccttttaaaaataatttcagtaacccataaatacatgttgcctttcggagaagaggggatcctctaggtcgactagac

SEQ ID NO: 284241 - DNA, 3382 bp, Homo sapiens
tgacccaccggccttgaggaaagcgcaaacgtaaaaaaagattgaaaccggagaggcgaatgcatctgtttacgctaggaccacgctcgacgtcggagaaaagcccacacactcacagtttccagacctggctgcttgccgaaactcagattctcggcacctccagcagctggcttcgccaacggcgttgaacaagggtcgcagctcaatgacgtcatatctccctacctacctccagggttccgcctcacgctctatgtcgcgcgcgcgcactacgtcctatgggcttgcgcgtgcggcggctgggcaccgccattttggccggtggccgtgagaacacgctgtgtggctgaaaagtgaaggcaagagctgatttggcctctgtgctcccctccgcaaggggatcgttttctccagaagagctggatattctttcgcccagttatggcagacaagttaacgagaattgctattgtcaaccatgacaaatgtaaacctaagaaatgtcgacaggaatgcaaaaagagttgtcctgtagttcgaatgggcataaacatttttttggatggctatgttccaacagaaaacttgagattcagagatgcatcacttgtttttaaagtggctgagacagcaaatgaagaagaagttaaaaagatgtgtatgtataaatatccaggaatgaagaaaaaaatgggagaatttgagctagcaattgtagctggagagtttacagattctgaaattatggtgatgctgggggaaaatggaacgggtaaaacgacatttatcagaatgcttgctggaagacttaaacctgatgaaggaggagaagtaccagttctaaatgtcagttataagccacagaaaattagtcccaaatcaactggaagtgttcgccagttactacatgaaaagataagagatgcttatactcacccacaatttgtgaccgatgtaatgaagcctctgcaaattgaaaacatcattgatcaagaggtgcagacattatctggtggtgaactacagcgagtagctttagccctttgcttgggcaaacctgctgatgtctatttaattgatgaaccatctgcatatttggattctgagcaaagactgatggcagctcgagttgtcaaacgtttcatactccatgcaaaaaagacagcctttgttgtggaacatgacttcatcatggccacctatctagcggatcgcgtcatcgtttttgatggtgttccatctaagaacacagttgcaaacagtcctcaaacccttttggctggcatgaataaatttttgtctcagcttgaaattacattcagaagagatccaaacaactataggccacgaataaacaaacttaattcaattaaggatgtagaacaaaagaagagtggaaactactttttcttggatgattagactgactctgagaatattgataagccatttattaaaaggagtatttactagaattttttgtcatataaaacttgaatcaggattttatgccccacatactctggaacttgaagtataatatacttaatataacataaaaagccagttgggttctaaattgtagttgaaacacagaaaatgccacttttctgttcctgaagaggctcttttgtgcataatattctaaaatgaagacatttcaagctatacaaattacttccaagttttcatgatgtatgggaagattttcagtaggtgtattatattcacggtaccaaatgctgaccagtgttgctccattttttaaatcttgaaaagggtttctgtacttacctggtttgccaagtatgccagtgtaatgaaactgcccttattttaaaagccagtcaaagattccactgattgacatttgataaataaacatcaggattatgtttattgtttgttttcagtctttgcactatattaccagtatatggtttccgaggaagattatctactgcaaaacaccactgttggaaaaataggtatttttaaattgtttttaatcttttttggtgcttttaaacatgtttagcaaaaaccaattcagttccattccccgcaaaaaacccctaactttactctgaactttttttgtttttgcattccatgaggttctgtattcagtcattctctaggtaatgtcatttttgtacacatatatttatataatcactgattgagatttaggaaaaagcatttctaaagaatatttgcttcccttagaactacagactcgaaatctttaaagatggtgcctaagcatctatgtattttttttaagttccacagatttttctgttgggcagccaaggattataaaccacttccctaaaggcaacattaatgcaaaagtccccagatggcaatacaaagtatcccctggtaccacatatattcatttgtgagtttggatatagagcacattatctaaaccattttgtagttccaaaaacccatctaaatttcttgagttcctgaattttgaacaggattacctggagcctggagccactttaagttgtacttctgactaaactggaattatgagtgaggaagagtgtttactaaataaatgactggggcaagcaaaattgaggaggaaattagaaactgtttgacaaactttaagagctacttgaaataacagaagtcttgattaatatgcaaataatggctagaaagtatggtttaactggaccctattatgccttttaaaaataatttcagtaacccataaatacatgttgtaaaaaattcaaatatacagaatggaataaaaaaatgatctccctttattaccctcccaaaggttaccagcgtttgaatttaataatgtatattctttcatgcttttttctgtgcacttacctaagtgtgaatatgtaaagggtttgttttgtatacaaatgggattatactaaaataagtaatgcctatttttaaggataggttaaatttgtgaatgatcatttcaaatatattgaataaaataagcaaaagctattgttatttactgatcctggattgtcttaaagaaagtacttgtgatataagagcacagttctacttactgctaatgacagaatatgtattaaacgtattttcatgtaaatgaaatctttaaaatatgtatcttaaaattttacatagcaacagaaaggcctacaattgctaacacaagaaaaatacttataaaatcagtataaaatcaatgcagatgttagcaaaagaatgagactacttcatatgtcctaattggaaaaagtctcaaatacttaaaaaaacaaaaaactggaacagtttattatactaccatttttgtgaaaatatacaaaatattgaaataaaggaatactcaagaaacagaaaactt

SEQ ID NO: 284242 - DNA, 2829 bp, Homo sapiens
aagcagtggtatcaacgcagagtcgccattacggccggggattcagagatgcatcacttgtttttaaagtggctgagacagcaaatgaagaagaagttaaaaagatgtgtatgtataaatatccaggaatgaagaaaaaaatgggagaatttgagctagcaattgtagctggagagtttacagattctgaaattatggtgatgctgggggaaaatggaacgggtaaaacgacatttatcagaatgcttgctggaagacttaaacctgatgaaggaggagaagtaccagttctaaatgtcagttataagccacagaaaattagtcccaaatcaactggaagtgttcgccagttactacatgaaaagataagagatgcttatactcacccacaatttgtgaccgatgtaatgaagcctctgcaaattgaaaacatcattgatcaagaggtgcagacattatctggtggtgaactacagcgagtagctttagccctttgcttgggcaaacctgctgatgtctatttaattgatgaaccatctgcatatttggattctgagcaaagactgatggcagctcgagttgtcaaacgtttcatactccatgcaaaaaagacagcctttgttgtggaacatgacttcatcatggccacctatctagcggatcgcgtcatcgtttttgatggtgttccatctaagaacacagttgcaaacagtcctcaaacccttttggctggcatgaataaatttttgtctcagcttgaaattacattcagaagagatccaaacaactataggccacgaataaacaaacttaattcaattaaggatgtagaacaaaagaagagtggaaactactttttcttggatgattagactgactctgagaatattgataagccatttattaaaaggagtatttactagaattttttgtcatataaaacttgaatcaggattttatgccccacatactctggaacttgaagtataatatacttaatataacataaaaagccagttgggttctaaattgtagttgaaacacagaaaatgccacttttctgttcctgaagaggctcttttgtgcataatattctaaaatgaagacatttcaagctatacaaattacttccaagttttcatgatgtatgggaagattttcagtaggtgtattatattcacggtaccaaatgctgaccagtgttgctccattttttaaatcttgaaaagggtttctgtacttacctggtttgccaagtatgccagtgtaatgaaactgcccttattttaaaagccagtcaaagattccactgattgacatttgataaataaacatcaggattatgtttattgtttgttttcagtctttgcactatattaccagtatatggtttccgaggaagattatctactgcaaaacaccactgttggaaaaataggtatttttaaattgtttttaatcttttttggtgcttttaaacatgtttagcaaaaaccaattcagttccattccccgcaaaaaacccctaactttactctgaactttttttgtttttgcattccatgaggttctgtattcagtcattctctaggtaatgtcatttttgtacacatatatttatataatcactgattgagatttaggaaaaagcatttctaaagaatatttgcttcccttagaactacagactcgaaatctttaaagatggtgcctaagcatctatgtattttttttaagttccacagatttttctgttgggcagccaaggattataaaccacttccctaaaggcaacattaatgcaaaagtccccagatggcaatacaaagtatcccctggtaccacatatattcatttgtgagtttggatatagagcacattatctaaaccattttgtagttccaaaaacccatctaaatttcttgagttcctgaattttgaacaggattacctggagcctggagccactttaagttgtacttctgactaaactggaattatgagtgaggaagagtgtttactaaataaatgactggggcaagcaaaattgaggaggaaattagaaactgtttgacaaactttaagagctacttgaaataacagaagtcttgattaatatgcaaataatggctagaaagtatggtttaactggaccctattatgccttttaaaaataatttcagtaacccataaatacatgttgtaaaaaattcaaatatacagaatggaataaaaaaatgatctccctttattaccctcccaaaggttaccagcgtttgaatttaataatgtatattctttcatgcttttttctgtgcacttacctaagtgtgaatatgtaaagggtttgttttgtatacaaatgggattatactaaaataagtaatgcctatttttaaggataggttaaatttgtgaatgatcatttcaaatatattgaataaaataagcaaaagctattgttatttactgatcctggattgtcttaaagaaagtacttgtgatataagagcacagttctacttactgctaatgacagaatatgtattaaacgtattttcatgtaaatgaaatctttaaaatatgtatcttaaaattttacatagcaacagaaaggcctacaattgctaacacaagaaaaatacttataaaatcagtataaaatcaatgcagatgttagcaaaagaatgagactacttcatatgtcctaattggaaaaagtctcaaatacttaaaaaaacaaaaaactggaacagtttattatactaccatttttgtgaaaatatacaaaatattgaaataaaggaatactcaagaaacagaaaactt

SEQ ID NO: 284243 - DNA, 2646 bp, Homo sapiens
aaaacatgtcatagatggtggatacacattgatatctgttggtggcaaattgatatacttttattctgaagcttaactttgtcaagattcataaatagaagagttctatagtgaaagtttatcatttaaatacttttttatattaaaaacagggaagtgttcgccagttactacatgaaaagataagagatgcttatactcacccacaatttgtgaccgatgtaatgaagcctctgcaaattgaaaacatcattgatcaagaggtgcagacattatctggtggtgaactacagcgagtagctttagccctttgcttgggcaaacctgctgatgtctatttaattgatgaaccatctgcatatttggattctgagcaaagactgatggcagctcgagttgtcaaacgtttcatactccatgcaaaaaagacagcctttgttgtggaacatgacttcatcatggccacctatctagcggatcgcgtcatcgtttttgatggtgttccatctaagaacacagttgcaaacagtcctcaaacccttttggctggcatgaataaatttttgtctcagcttgaaattacattcagaagagatccaaacaactataggccacgaataaacaaacttaattcaattaaggatgtagaacaaaagaagagtggaaactactttttcttggatgattagactgactctgagaatattgataagccatttattaaaaggagtatttactagaattttttgtcatataaaacttgaatcaggattttatgccccacatactctggaacttgaagtataatatacttaatataacataaaaagccagttgggttctaaattgtagttgaaacacagaaaatgccacttttctgttcctgaagaggctcttttgtgcataatattctaaaatgaagacatttcaagctatacaaattacttccaagttttcatgatgtatgggaagattttcagtaggtgtattatattcacggtaccaaatgctgaccagtgttgctccattttttaaatcttgaaaagggtttctgtacttacctggtttgccaagtatgccagtgtaatgaaactgcccttattttaaaagccagtcaaagattccactgattgacatttgataaataaacatcaggattatgtttattgtttgttttcagtctttgcactatattaccagtatatggtttccgaggaagattatctactgcaaaacaccactgttggaaaaataggtatttttaaattgtttttaatcttttttggtgcttttaaacatgtttagcaaaaaccaattcagttccattccccgcaaaaaacccctaactttactctgaactttttttgtttttgcattccatgaggttctgtattcagtcattctctaggtaatgtcatttttgtacacatatatttatataatcactgattgagatttaggaaaaagcatttctaaagaatatttgcttcccttagaactacagactcgaaatctttaaagatggtgcctaagcatctatgtattttttttaagttccacagatttttctgttgggcagccaaggattataaaccacttccctaaaggcaacattaatgcaaaagtccccagatggcaatacaaagtatcccctggtaccacatatattcatttgtgagtttggatatagagcacattatctaaaccattttgtagttccaaaaacccatctaaatttcttgagttcctgaattttgaacaggattacctggagcctggagccactttaagttgtacttctgactaaactggaattatgagtgaggaagagtgtttactaaataaatgactggggcaagcaaaattgaggaggaaattagaaactgtttgacaaactttaagagctacttgaaataacagaagtcttgattaatatgcaaataatggctagaaagtatggtttaactggaccctattatgccttttaaaaataatttcagtaacccataaatacatgttgtaaaaaattcaaatatacagaatggaataaaaaaatgatctccctttattaccctcccaaaggttaccagcgtttgaatttaataatgtatattctttcatgcttttttctgtgcacttacctaagtgtgaatatgtaaagggtttgttttgtatacaaatgggattatactaaaataagtaatgcctatttttaaggataggttaaatttgtgaatgatcatttcaaatatattgaataaaataagcaaaagctattgttatttactgatcctggattgtcttaaagaaagtacttgtgatataagagcacagttctacttactgctaatgacagaatatgtattaaacgtattttcatgtaaatgaaatctttaaaatatgtatcttaaaattttacatagcaacagaaaggcctacaattgctaacacaagaaaaatacttataaaatcagtataaaatcaatgcagatgttagcaaaagaatgagactacttcatatgtcctaattggaaaaagtctcaaatacttaaaaaaacaaaaaactggaacagtttattatactaccatttttgtgaaaatatacaaaatattgaaataaaggaatactcaagaaacagaaaactt

SEQ ID NO: 284244 - DNA, 2583 bp, Homo sapiens
tagccgagcgtggtggcagcgcctgtagtcccagctactcaggaggctgaggcaggagaatggcgtgaacctgggaggcagagcttgcaggaagtgttcgccagttactacatgaaaagataagagatgcttatactcacccacaatttgtgaccgatgtaatgaagcctctgcaaattgaaaacatcattgatcaagaggtgcagacattatctggtggtgaactacagcgagtagctttagccctttgcttgggcaaacctgctgatgtctatttaattgatgaaccatctgcatatttggattctgagcaaagactgatggcagctcgagttgtcaaacgtttcatactccatgcaaaaaagacagcctttgttgtggaacatgacttcatcatggccacctatctagcggatcgcgtcatcgtttttgatggtgttccatctaagaacacagttgcaaacagtcctcaaacccttttggctggcatgaataaatttttgtctcagcttgaaattacattcagaagagatccaaacaactataggccacgaataaacaaacttaattcaattaaggatgtagaacaaaagaagagtggaaactactttttcttggatgattagactgactctgagaatattgataagccatttattaaaaggagtatttactagaattttttgtcatataaaacttgaatcaggattttatgccccacatactctggaacttgaagtataatatacttaatataacataaaaagccagttgggttctaaattgtagttgaaacacagaaaatgccacttttctgttcctgaagaggctcttttgtgcataatattctaaaatgaagacatttcaagctatacaaattacttccaagttttcatgatgtatgggaagattttcagtaggtgtattatattcacggtaccaaatgctgaccagtgttgctccattttttaaatcttgaaaagggtttctgtacttacctggtttgccaagtatgccagtgtaatgaaactgcccttattttaaaagccagtcaaagattccactgattgacatttgataaataaacatcaggattatgtttattgtttgttttcagtctttgcactatattaccagtatatggtttccgaggaagattatctactgcaaaacaccactgttggaaaaataggtatttttaaattgtttttaatcttttttggtgcttttaaacatgtttagcaaaaaccaattcagttccattccccgcaaaaaacccctaactttactctgaactttttttgtttttgcattccatgaggttctgtattcagtcattctctaggtaatgtcatttttgtacacatatatttatataatcactgattgagatttaggaaaaagcatttctaaagaatatttgcttcccttagaactacagactcgaaatctttaaagatggtgcctaagcatctatgtattttttttaagttccacagatttttctgttgggcagccaaggattataaaccacttccctaaaggcaacattaatgcaaaagtccccagatggcaatacaaagtatcccctggtaccacatatattcatttgtgagtttggatatagagcacattatctaaaccattttgtagttccaaaaacccatctaaatttcttgagttcctgaattttgaacaggattacctggagcctggagccactttaagttgtacttctgactaaactggaattatgagtgaggaagagtgtttactaaataaatgactggggcaagcaaaattgaggaggaaattagaaactgtttgacaaactttaagagctacttgaaataacagaagtcttgattaatatgcaaataatggctagaaagtatggtttaactggaccctattatgccttttaaaaataatttcagtaacccataaatacatgttgtaaaaaattcaaatatacagaatggaataaaaaaatgatctccctttattaccctcccaaaggttaccagcgtttgaatttaataatgtatattctttcatgcttttttctgtgcacttacctaagtgtgaatatgtaaagggtttgttttgtatacaaatgggattatactaaaataagtaatgcctatttttaaggataggttaaatttgtgaatgatcatttcaaatatattgaataaaataagcaaaagctattgttatttactgatcctggattgtcttaaagaaagtacttgtgatataagagcacagttctacttactgctaatgacagaatatgtattaaacgtattttcatgtaaatgaaatctttaaaatatgtatcttaaaattttacatagcaacagaaaggcctacaattgctaacacaagaaaaatacttataaaatcagtataaaatcaatgcagatgttagcaaaagaatgagactacttcatatgtcctaattggaaaaagtctcaaatacttaaaaaaacaaaaaactggaacagtttattatactaccatttttgtgaaaatatacaaaatattgaaataaaggaatactcaagaaacagaaaactt

SEQ ID NO: 284245 - DNA, 2571 bp, Homo sapiens
tgacccaccggccttgaggaaagcgcaaacgtaaaaaaagattgaaaccggagaggcgaatgcatctgtttacgctaggaccacgctcgacgtcggagaaaagcccacacactcacagtttccagacctggctgcttgccgaaactcagattctcggcacctccagcagctggcttcgccaacggcgttgaacaagggtcgcagctcaatgacgtcatatctccctacctacctccagggttccgcctcacgctctatgtcgcgcgcgcgcactacgtcctatgggcttgcgcgtgcggcggctgggcaccgccattttggccggtggccgtgagaacacgctgtgtggctgaaaagtgaaggcaagagctgatttggcctctgtgctcccctccgcaaggggatcgttttctccagaagagctggatattctttcgcccagttatggcagacaagttaacgagaattgctattgtcaaccatgacaaatgtaaacctaagaaatgtcgacaggaatgcaaaaagagttgtcctgtagttcgaatgggaaaattatgcatagaggttacaccccagagcaaaatagcatggatttccgaaactctttgtattggttgtggtatctgtattaagaaatgcccctttggcgccttatcaattgtcaatctaccaagcaacttggaaaaagaaaccacacatcgatattgtgccaatgccttcaaacttcacaggttgcctatccctcgtccaggtgaagttttgggattagttggaactaatggtattggaaagtcaactgctttaaaaattttagcaggaaaacaaaagccaaaccttggaaagtacgatgatcctcctgactggcaggagattttgacttatttccgtggatctgaattacaaaattactttacaaagattctagaagatgacctaaaagccatcatcaaacctcaatatgtagaccagattcctaaggctgcaaaggggacagtgggatctattttggaccgaaaagatgaaacaaagacacaggcaattgtatgtcagcagcttgatttaacccacctaaaagaacgaaatgttgaagatctttcaggaggagagttgcagagatttgcttgtgctgtcgtttgcatacagaaagctgatattttcatgtttgatgagccttctagttacctagatgtcaagcagcgtttaaaggctgctattactatacgatctctaataaatccagatagatatatcattgtggtggaacatgatctaagtgtattagactatctctccgacttcatctgctgtttatatggtgtaccaagcgcctatggagttgtcactatgccttttagtgtaagagaaggcataaacatttttttggatggctatgttccaacagaaaacttgagattcagagatgcatcacttgtttttaaagtggctgagacagcaaatgaagaagaagttaaaaagatgtgtatgtataaatatccaggaatgaagaaaaaaatgggagaatttgagctagcaattgtagctggagagtttacagattctgaaattatggtgatgctgggggaaaatggaacgggtaaaacgacatttatcagaatgcttgctggaagacttaaacctgatgaaggaggagaagtaccagttctaaatgtcagttataagccacagaaaattagtcccaaatcaactggaagtgttcgccagttactacatgaaaagataagagatgcttatactcacccacaatttgtgaccgatgtaatgaagcctctgcaaattgaaaacatcattgatcaagaggtgcagacattatctggtggtgaactacagcgagtagctttagccctttgcttgggcaaacctgctgatgtctatttaattgatgaaccatctgcatatttggattctgagcaaagactgatggcagctcgagttgtcaaacgtttcatactccatgcaaaaaagacagcctttgttgtggaacatgacttcatcatggccacctatctagcggatcgcgtcatcgtttttgatggtgttccatctaagaacacagttgcaaacagtcctcaaacccttttggctggcatgaataaatttttgtctcagcttgaaattacattcagaagagatccaaacaactataggccacgaataaacaaacttaattcaattaaggtatgtagaaaagttgtcttaaatcatggattactgatctcagtataaacacttgaaaggctatttaaaaatcaataacatatggctgggcacagtggctcacacctgtgattcaagcacttttgggaggccaaggcaggcagatcacttgaggtcacgagtttgagaccagcctggccaacatggtgcaaccccatctctactaaaaatgcaaaaattagccgagtctggtggcaggtatctgtaatcccagctacttaggagtctgaggcaggagaatcacttgaacctggaaggtggaggttgtagtgagctgagatcatcccactgtactccagcctgggcaaaagagtgagactctgtctaaaaaaataa

SEQ ID NO: 284246 - DNA, 1594 bp, Homo sapiens
tggatcaccataaaaaacgatgacgcgatccgctagataggtggcatgatgaagtcatgttccacaacaaaggctgtcttttttgcatggagtatgaaacgtttgacaactcgagctgccatcagtctttgctcagaatccaaatatgtatatggtttccgaggaagattatctactgcaaaacaccactgttggaaaaataggtatttttaaattgtttttaatcttttttggtgcttttaaacatgtttagcaaaaaccaattcagttccattccccgcaaaaaacccctaactttactctgaactttttttgtttttgcattccatgaggttctgtattcagtcattctctaggtaatgtcatttttgtacacatatatttatataatcactgattgagatttaggaaaaagcatttctaaagaatatttgcttcccttagaactacagactcgaaatctttaaagatggtgcctaagcatctatgtattttttttaagttccacagatttttctgttgggcagccaaggattataaaccacttccctaaaggcaacattaatgcaaaagtccccagatggcaatacaaagtatcccctggtaccacatatattcatttgtgagtttggatatagagcacattatctaaaccattttgtagttccaaaaacccatctaaatttcttgagttcctgaattttgaacaggattacctggagcctggagccactttaagttgtacttctgactaaactggaattatgagtgaggaagagtgtttactaaataaatgactggggcaagcaaaattgaggaggaaattagaaactgtttgacaaactttaagagctacttgaaataacagaagtcttgattaatatgcaaataatggctagaaagtatggtttaactggaccctattatgccttttaaaaataatttcagtaacccataaatacatgttgtaaaaaattcaaatatacagaatggaataaaaaaatgatctccctttattaccctcccaaaggttaccagcgtttgaatttaataatgtatattctttcatgcttttttctgtgcacttacctaagtgtgaatatgtaaagggtttgttttgtatacaaatgggattatactaaaataagtaatgcctatttttaaggataggttaaatttgtgaatgatcatttcaaatatattgaataaaataagcaaaagctattgttatttactgatcctggattgtcttaaagaaagtacttgtgatataagagcacagttctacttactgctaatgacagaatatgtattaaacgtattttcatgtaaatgaaatctttaaaatatgtatcttaaaattttacatagcaacagaaaggcctacaattgctaacacaagaaaaatacttataaaatcagtataaaatcaatgcagatgttagcaaaagaatgagactacttcatatgtcctaattggaaaaagtctcaaatacttaaaaaaacaaaaaactggaacagtttattatactaccatttttgtgaaaatatacaaaatattgaaataaaggaatactcaagaaacagaaaactt

SEQ ID NO: 284247 - DNA, 1049 bp, Homo sapiens
cgactctacaggatctcctccaccgctctccccagatggcaatacaaagtatcccctggtaccacatatattcatttgtgagtttggatatagagcacattatctaaaccattttgtagttccaaaaacccatctaaatttcttgagttcctgaattttgaacaggattacctggagcctggagccactttaagttgtacttctgactaaactggaattatgagtgaggaagagtgtttactaaataaatgactggggcaagcaaaattgaggaggaaattagaaactgtttgacaaactttaagagctacttgaaataacagaagtcttgattaatatgcaaataatggctagaaagtatggtttaactggaccctattatgccttttaaaaataatttcagtaacccataaatacatgttgtaaaaaattcaaatatacagaatggaataaaaaaatgatctccctttattaccctcccaaaggttaccagcgtttgaatttaataatgtatattctttcatgcttttttctgtgcacttacctaagtgtgaatatgtaaagggtttgttttgtatacaaatgggattatactaaaataagtaatgcctatttttaaggataggttaaatttgtgaatgatcatttcaaatatattgaataaaataagcaaaagctattgttatttactgatcctggattgtcttaaagaaagtacttgtgatataagagcacagttctacttactgctaatgacagaatatgtattaaacgtattttcatgtaaatgaaatctttaaaatatgtatcttaaaattttacatagcaacagaaaggcctacaattgctaacacaagaaaaatacttataaaatcagtataaaatcaatgcagatgttagcaaaagaatgagactacttcatatgtcctaattggaaaaagtctcaaatacttaaaaaaacaaaaaactggaacagtttattatactaccatttttgtgaaaatatacaaaatattgaaataaaggaatactcaagaaacagaaaactt

SEQ ID NO: 284248 - DNA, 231 bp, Homo sapiens
tttgcttgtgctgtcgtttgcatacagaaagctgatatgtaggttactttacaatttttgtttatcttcatccgtattgtagagttttcagttgtgatgctgctaatagaggaatggttttgagagaaattaatagaaatagtatctaagttcctaatttcgaggtaagatgttgaagcagttgtgtatccactactcattttccctgttatattcacaggggaaaatatt

SEQ ID NO: 284249 - DNA, 190 bp, Homo sapiens
gatcctcctgactggcaggagattttgacttatttccgtggatctgaattacaaaattactttacaaagattctagaagatgacctaaaagccatcatcaaacctcaatatgtagaccagattcctaaggctgcaaaggtcggtttttgatagagggaacttaacggatattagtagaagtataaaagat

SEQ ID NO: 284250 - DNA, 418 bp, Homo sapiens
tttcatgtttgatgagccttctagttacctagatgtcaagcagcgtttaaaggctgctattactatacgatctctaataaatccagataggtaagtagagatctggcatattactgtgttgttttgtttggagatttttacagatttctaaggattaaacactgggactgtcaatgtgatgtacatattttttatcttggttgtttatagctgccacctaaatttacctttctttacctagaacagaggttctcaatgcaagattcatttattaacacccccgcttccagggagcttaggaatattctgaaattatatgcaaattccgtagctttataggaagcagacccttagcttttaccagctatctttttctctctctctgtctctcattttcacacacacaacacacgcacgc

SEQ ID NO: 284251 - DNA, 324 bp, Homo sapiens
atatatcattgtggtggaacatgatctaagtgtattagactatctctccgacttcatctgctgtttatatggtgtaccaagcgcctatggagttgtcactatgccttttagtgtaagagaaggtaacttgaaaaacttttttcacatatgctgtattctcttctactctaatgcttataaactacattattgatattaagtagttttacattggtctgatatcatccaaaactctagttccttggaatttaatcactgagcatataaggttatatatatcagttgttatacaaaatatatttttttcattttggagaattttct

SEQ ID NO: 284252 - DNA, 1134 bp, Homo sapiens
  misc_feature (25)..(25): n is a, c, g, or t
caaaaagactggtcaactggatttncattcccagaaaccaggaaatttctgaaactgagttttaaacctggcaactcttttaccatccctttgtatttttgcagttcctccctataccagcttccttacagctgttctgatttcctgtcgtaagattttttcttttcattttctccagggagggtaaatcaatataacctcttctctagagaggaggtggttaggttggtcttaagcagtgttagaagatctattttttttcaaaccaggtgtctgagctgggtgaattccagcctggggagaggactttgatcaccagatgtttttttggtgtgcgtgctgtcttatggttgcgtggcgagtttctgcttcagatgcagagcactgtccagagcttcctccagtggacaatagcatatttgtcgcaaaggaggtggaaggacagattctggggacttacgtttgtatcaagggctaccacctggtaggaaagaagacccttttttgcaatgcctctaaggagtgggataacaccactactgagtgccgcttgggccactgtcctgatcctgtgctggtgaatggagagttcagttcttcagggcctgtgaatgtaagtgacaaaatcacgtttatgtgcaatgaccactacatcctcaagggcagcaatcggagccagtgtctagaggaccacacctgggcacctccctttcccatctgcaaaagtagggactgtgaccctcctgggaatccagttcatggctattttgaaggaaataacttcaccttaggatccaccattagttattactgtgaagacaggtactacttagtgggcgtgcaggagcagcaatgcgttgatggggagtggagcagtgcacttccagtctgcaagttgatccaggaagctcccaaaccagagtgtgagaaggcacttcttgcctttcaggagagtaagaacctctgcgaagccatggagaactttatgcaacaattaaaggaaagtggcatgacaatggaggagctaaaatattctctggagctgaagaaagctgagttgaaggcaaaattgttgtaacactacagctgagcagatgtaatagaaataaacctatgaataaattttcttcttgg

SEQ ID NO: 284253 - DNA, 1149 bp, Homo sapiens
attctgtctttcacatacattgagaccaaaaagaccaagtacctataagaggaccaacccagacgggctgtgacaattacgctgttgcttctgagtgagaagttacaggcccaagaaagggtaatgacagccttagagatacataaaagagacaagcaatttccaaaacaaaaagcaaaggcaaaaagaaaaataaaaaagcaggcctttggagctctcagctttggagtcagttaagaccagttccttgctgggaagccctaactctggagggacagagacaggtgtctgagctgggtgaattccagcctggggagaggactttgatcaccagatgtttttttggtgtgcgtgctgtcttatggttgcgtggcgagtttctgcttcagatgcagagcactgtccagagcttcctccagtggacaatagcatatttgtcgcaaaggaggtggaaggacagattctggggacttacgtttgtatcaagggctaccacctggtaggaaagaagacccttttttgcaatgcctctaaggagtgggataacaccactactgagtgccgcttgggccactgtcctgatcctgtgctggtgaatggagagttcagttcttcagggcctgtgaatgtaagtgacaaaatcacgtttatgtgcaatgaccactacatcctcaagggcagcaatcggagccagtgtctagaggaccacacctgggcacctccctttcccatctgcaaaagtagggactgtgaccctcctgggaatccagttcatggctattttgaaggaaataacttcaccttaggatccaccattagttattactgtgaagacaggtactacttagtgggcgtgcaggagcagcaatgcgttgatggggagtggagcagtgcacttccagtctgcaagttgatccaggaagctcccaaaccagagtgtgagaaggcacttcttgcctttcaggagagtaagaacctctgcgaagccatggagaactttatgcaacaattaaaggaaagtggcatgacaatggaggagctaaaatattctctggagctgaagaaagctgagttgaaggcaaaattgttgtaacactacagctgagcagatgtaatagaaataaacctatgaataaattttcttcttgg

SEQ ID NO: 284254 - DNA, 1247 bp, Homo sapiens
tgttgttgttatttttgagacagtgtctccctctgtcacccaggctggagtgcagtggtgtactcatagctcactgcaacctctgcctcctaggctcacgagatcctcccacctcagcctctctaatagctgggactacaggcatgggtcaccacgcttggctaattttttaaggttttgtagagacagggtctccctatgttgctcaggctggtcttgaactcctgagctcaagtgatcctcccaccttggtttcccaaagtcctggaaagtgctggaattacaaacatgaatcactgtgcctggcctaaaatgtatgtttttctaaaaaaaaaaaaaaaaaaaaatcagagaatataaatactaaaaaacaaacatagaagtgcagaaatataaagacttagtgtatagacccttaaagccccctaattaactcagagtcatgtggcctcactggcatttcgatctcgttatataccttcaatgcactttgcaggcaactctcatatttttctgatgaaaagcaattgctcctttttagccccttcgctaagatttatttgcaggtgtctctcattttctactcctttttagagcttagatgccagatgcctttttaggttattgaatgataaagtgcttctatcactctccccacccaaaacctgggtgtgtaaacacctgattcagaatttctcacttctctatgttttatgggttgactcatcacttgggtcctctcctacctccaggaaaatggttttactttgaactgctttgtaataccgagataacttaagcatgcattgaggctcaagggcagggaggtggattccatcacagcatgaaatactgaaatacaactacacaaaaccagtctccattacccaattcagaaagtggaaaagctaagccttgttctaatttctgttcaggtactacttagtgggcgtgcaggagcagcaatgcgttgatggggagtggagcagtgcacttccagtctgcaagttgatccaggaagctcccaaaccagagtgtgagaaggcacttcttgcctttcaggagagtaagaacctctgcgaagccatggagaactttatgcaacaattaaaggaaagtggcatgacaatggaggagctaaaatattctctggagctgaagaaagctgagttgaaggcaaaattgttgtaacactacagctgagcagatgtaatagaaataaacctatgaataaattttcttcttgg

SEQ ID NO: 284255 - DNA, 781 bp, Homo sapiens
  misc_feature (25)..(25): n is a, c, g, or t
caaaaagactggtcaactggatttncattcccagaaaccaggaaatttctgaaactgagttttaaacctggcaactcttttaccatccctttgtatttttgcagttcctccctataccagcttccttacagctgttctgatttcctgtcgtgtctgagctgggtgaattccagcctggggagaggactttgatcaccagatgtttttttggtgtgcgtgctgtcttatggttgcgtggcgagtttctgcttcagatgcagagcactgtccagagcttcctccagtggacaatagcatatttgtcgcaaaggaggtggaaggacagattctggggacttacgtttgtatcaagggctaccacctggtaggaaagaagacccttttttgcaatgcctctaaggagtgggataacaccactactgagtgccgcttgggccactgtcctgatcctgtgctggtgaatggagagttcagttcttcagggcctgtgaatgtaagtgacaaaatcacgtttatgtgcaatgaccactacatcctcaagggcagcaatcggagccagtgtctagaggaccacacctgggcacctccctttcccatctgcaaaagtaattttgcatagtagggactgtcgatccttctgggaattcacttcattggctatttctgcacgttataactttaccctacgatcccccattcgcttttactgtgactaaggttctaccttatggcgtcccggaccactcctctttactgggtactgccccttcgcccttccccg

SEQ ID NO: 284256 - DNA, 382 bp, Homo sapiens
  misc_feature (25)..(25): n is a, c, g, or t
  misc_feature (287)..(287): n is a, c, g, or t
  misc_feature (289)..(289): n is a, c, g, or t
  misc_feature (373)..(373): n is a, c, g, or t
caaaaagactggtcaactggatttncattcccagaaaccaggaaatttctgaaactgagttttaaacctggcaactcttttaccatccctttgtatttttgcagttcctccctataccagcttccttacagctgttctgatttcctgtcgtgtctgagctgggtgaattccagcctggggagaggactttgatcctccactccagagcacctgagaaggccgggcccagaggccctgtgtgatgtgtactccgcagctgtttggggtgggacatttctgtacttctngntttgcttatggctcagcattacctgtgtcagtccatgattctgttgtaacagttttaagggtaaataaataaaggctgcctgantgtccccaa

SEQ ID NO: 284257 - DNA, 1356 bp, Homo sapiens
tgttgttgttatttttgagacagtgtctccctctgtcacccaggctggagtgcagtggtgtactcatagctcactgcaacctctgcctcctaggctcacgagatcctcccacctcagcctctctaatagctgggactacaggcatgggtcaccacgcttggctaattttttaaggttttgtagagacagggtctccctatgttgctcaggctggtcttgaactcctgagctcaagtgatcctcccaccttggtttcccaaagtcctggaaagtgctggaattacaaacatgaatcactgtgcctggcctaaaatgtatgtttttctaaaaaaaaaaaaaaaaaaaaatcagagaatataaatactaaaaaacaaacatagaagtgcagaaatataaagacttagtgtatagacccttaaagccccctaattaactcagagtcatgtggcctcactggcatttcgatctcgttatataccttcaatgcactttgcaggcaactctcatatttttctgatgaaaagcaattgctcctttttagccccttcgctaagatttatttgcaggtgtctctcattttctactcctttttagagcttagatgccagatgcctttttaggttattgaatgataaagtgcttctatcactctccccacccaaaacctgggtgtgtaaacacctgattcagaatttctcacttctctatgttttatgggttgactcatcacttgggtcctctcctacctccaggaaaatggttttactttgaactgctttgtaataccgagataacttaagcatgcattgaggctcaagggcagggaggtggattccatcacagcatgaaatactgaaatacaactacacaaaaccagtctccattacccaattcagaaagtgggagcagcaatgcgttgatggggagtggagcagtgcacttccagtctgcaagttgatccaggaagctcccaaaccagagtgtgagaaggcacttgtaagtaggaggctcatatctgtcttgttcacagctggatctccagggcctggcatcactcctggcatatgctcagtatatatctgtttaatgtgggacattttgcttttgaatgggttggccttggcctggctgtagaagggactcataaactattaactcacatttttataaatggaagttggaagttcccattcactaccatcatcacaaatacctcatgagaccctgttggtagaagttgttgtctcatgtgccttatagagcagtggttcccaacctttttggcaccagggatgggtatcatggaagatgacttttccacggatgggggtggggagagtggggatggtttgggga

SEQ ID NO: 284258 - DNA, 972 bp, Homo sapiens
gcaagcgagaacaatgtgtcacagcaggcctttggagctctcagctttggagtcagttaagaccagttccttgctgggaagccctaactctggagggacagagacaggtgtctgagctgggtgaattccagcctggggagaggactttgatcaccagatgtttttttggtgtgcgtgctgtcttatggttgcgtggcgagtttctgcttcagatgcagagcactgtccagagcttcctccagtggacaatagcatatttgtcgcaaaggaggtggaaggacagattctggggacttacgtttgtatcaagggctaccacctggtaggaaagaagacccttttttgcaatgcctctaaggagtgggataacaccactactgagtgccgcttgggccactgtcctgatcctgtgctggtgaatggagagttcagttcttcagggcctgtgaatgtaagtgacaaaatcacgtttatgtgcaatgaccactacatcctcaagggcagcaatcggagccagtgtctagaggaccacacctgggcacctccctttcccatctgcaaaagtagggactgtgaccctcctgggaatccagttcatggctattttgaaggaaataacttcaccttaggatccaccattagttattactgtgaagacaggtactacttagtgggcgtgcaggagcagcaatgcgttgatggggagtggagcagtgcacttccagtctgcaagttgatccaggaagctcccaaaccagagtgtgagaaggcacttcttgcctttcaggagagtaagaacctctgcgaagccatggagaactttatgcaacaattaaaggaaagtggcatgacaatggaggagctaaaatattctctggagctgaagaaagctgagttgaaggcaaaattgttgtaacactacagctgagcagatgtaatagaaataaacctatgaataaattttcttcttgg

SEQ ID NO: 284259 - DNA, 1083 bp, Homo sapiens
gtactgtcctcatgacagcgagtgagttctcatgagatctggttgtttaaaagtgtgtaacgcctcctccctctctcgttcctgcacctgttatgtgagatgcctccctccccctttgccttctgccatgattgtaagttttccgaggcctccccagaagccgagcagatgccagcaccatgtttcctgtacagcctgcagaactgtgagccaattaaacctcttttctttataaattacccagtctcaggtatttctgtatcacaatgtgagatggactaatacactcatgtttcacaactcttatccacaggggatgtcagcttccacttgagctcacacgcttcatctcctctctcagggagttatttcttcagccttcacctatggcccaatttttcttttcttgtacattaacaattagcttctctacaacttactcagaagatgggctgggggaaagctctttcccatggacaaatatgatttagaagagaaggaaatgaatgaagaacaggtttccagatcccgcaggtgttgctgtgaggatgtcaggtgctggcgcaggtgttgctctgaggctgtcaggtgctggcataaacagctgcaattaggggtgctgttcattgagcgtgcctggccctcataactatgacttctatactcgtctctctcaggggactgtgaccctcctgggaatccagttcatggctattttgaaggaaataacttcaccttaggatccaccattagttattactgtgaagacaggtactacttagtgggcgtgcaggagcagcaatgcgttgatggggagtggagcagtgcacttccagtctgcaagttgatccaggaagctcccaaaccagagtgtgagaaggcacttcttgcctttcaggagagtaagaacctctgcgaagccatggagaactttatgcaacaattaaaggaaagtggcatgacaatggaggagctaaaatattctctggagctgaagaaagctgagttgaaggcaaaattgttgtaacactacagctgagcagatgtaatagaaataaacctatgaataaattttcttcttgg

SEQ ID NO: 284260 - DNA, 969 bp, Homo sapiens
  misc_feature (25)..(25): n is a, c, g, or t
caaaaagactggtcaactggatttncattcccagaaaccaggaaatttctgaaactgagttttaaacctggcaactcttttaccatccctttgtatttttgcagttcctccctataccagcttccttacagctgttctgatttcctgtcgtgtctgagctgggtgaattccagcctggggagaggactttgatcaccagatgtttttttggtgtgcgtgctgtcttatggttgcgtggcgagtttctgcttcagatgcagagcactgtccagagcttcctccagtggacaatagcatatttgtcgcaaaggaggtggaaggacagattctggggacttacgtttgtatcaagggctaccacctggtaggaaagaagacccttttttgcaatgcctctaaggagtgggataacaccactactgagtgccgcttgggccactgtcctgatcctgtgctggtgaatggagagttcagttcttcagggcctgtgaatgtaagtgacaaaatcacgtttatgtgcaatgaccactacatcctcaagggcagcaatcggagccagtgtctagaggaccacacctgggcacctccctttcccatctgcaaaagtagaaataacttcaccttaggatccaccattagttattactgtgaagacaggtactacttagtgggcgtgcaggagcagcaatgcgttgatggggagtggagcagtgcacttccagtctgcaagttgatccaggaagctcccaaaccagagtgtgagaaggcacttcttgcctttcaggagagtaagaacctctgcgaagccatggagaactttatgcaacaattaaaggaaagtggcatgacaatggaggagctaaaatattctctggagctgaagaaagctgagttgaaggcaaaattgttgtaacactacagctgagcagatgtaatagaaataaacctatgaataaattttcttcttgg

SEQ ID NO: 284261 - DNA, 959 bp, Homo sapiens
gtactgtcctcatgacagcgagtgagttctcatgagatctggttgtttaaaagtgtgtaacgcctcctccctctctcgttcctgcacctgttatgtgagatgcctccctccccctttgccttctgccatgattgtaagttttccgaggcctccccagaagccgagcagatgccagcaccatgtttcctgtacagcctgcagaactgtgagccaattaaacctcttttctttataaattacccagtctcaggtatttctgtatcacaatgtgagatggactaatacactcatgtttcacaactcttatccacaggggatgtcagcttccacttgagctcacacgcttcatctcctctctcagggagttatttcttcagccttcacctatggcccaatttttcttttcttgtacattaacaattagcttctctacaacttactcagaagatgggctgggggaaagctctttcccatggacaaatatgatttagaagagaaggaaatgaatgaagaacaggtttccagatcccgcaggtgttgctgtgaggatgtcaggtgctggcgcaggtgttgctctgaggctgtcaggtgctggcataaacagctgcaattaggggtgctgttcattgagcgtgcctggccctcataactatgacttctatactcgtctctctcaggggactgtgaccctcctgggaatccagttcatggctattttgaaggaaataacttcaccttaggatccaccattagttattactgtgaagacaggtaagtgaacacagcctgtcaaatgccagatcttgccccttggcagcattgttttggggaataacccagtctgtgtccacctggtcatctgatttcctactgctgcaggattctaagctcattctgattttgagagctgctttggccctctgctagctctcctcaatccctagaagacagactgatcc

SEQ ID NO: 284262 - DNA, 690 bp, Homo sapiens
ctgtatcacaatgtgagatggactaatacactcatgtttcacaactcttatccacaggggatgtcagcttccacttgagctcacacgcttcatctcctctctcagggagttatttcttcagccttcacctatggcccaatttttcttttcttgtacattaacaattagcttctctacaacttaaaatttctttccttgagctcctgctgtcagataatactcccaaatccctactaactcagaagatgggctgggggaaagctctttcccatggacaaatatgatttagaagagaaggaaatgaatgaagaacaggtttccagatcccgcaggtgttgctgtgaggatgtcaggtgctggcgcaggtgttgctctgaggctgtcaggtgctggcataaacagctgcaattaggggtgctgttcattgagcgtgcctggccctcataactatgacttctatactcgtctctctcaggggactgtgaccctcctgggaatccagttcatggctattttgaaggaaataacttcaccttaggatccaccattagttattactgtgaagacaggtaagtgaacacagcctgtcaaatgccagatcttgccccttggcagcattgttttggggaataacccagtctgtgtccacctggtcatctgatttcctactgctgcaggattctaagctca

SEQ ID NO: 284263 - DNA, 1014 bp, Homo sapiens
  misc_feature (25)..(25): n is a, c, g, or t
caaaaagactggtcaactggatttncattcccagaaaccaggaaatttctgaaactgagttttaaacctggcaactcttttaccatccctttgtatttttgcagttcctccctataccagcttccttacagctgttctgatttcctgtcgtgtctgagctgggtgaattccagcctggggagaggactttgatcaccagatgtttttttggtgtgcgtgctgtcttatggttgcgtggcgagtttctgcttcagatgcagagcactgtccagagcttcctccagtggacaatagcatatttgtcgcaaaggaggtggaaggacagattctggggacttacgtttgtatcaagggctaccacctggtaggaaagaagacccttttttgcaatgcctctaaggagtgggataacaccactactgagtgccgcttgggccactgtcctgatcctgtgctggtgaatggagagttcagttcttcagggcctgtgaatgtaagtgacaaaatcacgtttatgtgcaatgaccactacatcctcaagggcagcaatcggagccagtgtctagaggaccacacctgggcacctccctttcccatctgcaaaagtagggactgtgaccctcctgggaatccagttcatggctattttgaaggaaataacttcaccttaggatccaccattagttattactgtgaagacaggtactacttagtgggcgtgcaggagcagcaatgcgttgatggggagtggagcagtgcacttccagtctgcaagttgatccaggaagctcccaaaccagagtgtgagaaggcacttcttgcctttcaggagagtaagaacctctgcgaagccatggagaactttatgcaacaattaaaggaaagtggcatgacaatggaggagctaaaatattctctggagctgaagaaagctgagttgaaggcaaaattgttgtaacactacagctgagcagatgtaatagaaataaacctatgaataaattttcttcttgg

SEQ ID NO: 284264 - DNA, 391 bp, Homo sapiens
atgagtagtcctgccccgactggcccatcctttccaggtgcagtcccccttactgtgtctgccaagggtgccagcacagccgccccactccaggggaagaggagtgccagcccttacccacctgagtgggcacagtgtagcatttattcattagcccccacactggcctgaccatctcccctgtgggctgcatgacaaggagagagaacaggctgagagtctcactatgttgaccaggctggcctggaacttctgagctcaagtgatcctcctgccttcgcctcccaaagtgcagagattataggtgtaaactatcacgcctggcctgtttacatagtttaataatgtaaatcttcaataccgatctaataaaaattgaaatatgcctttt

SEQ ID NO: 284265 - DNA, 1889 bp, Homo sapiens
tatttaatgaactagaatggcagtgatattactctcataacccggctcctgctgaatgactccctctaggatattttctagggttttatgccaatgaagtttttggttttatttgttgtaaatagcaagacttccattgttttaccaaaaaattttcagatcactcattttcactaaatttgtaaaataaaaacatatagggcatgttttagtacaatattttgattaaattaattttctatattaaaaatgcttggtttccaccttctagcaattaatattcgaagaaacaaaacattcgttctactagaatcagatgctgtgagttgattttggtagctatttgctgctctgcagacctaatttcaggctgctgtggttctcagcagcaatttgattttgtgaatattatcttttgtattctgaatcacattgctaagcagggtggtgttgtaaaaataaaaacataaggttctcttgtctgagtctgtgtgggagtcagcgatgcttatttctagcacgaaacattatctgtatggtgaatttcccgaatgctgtttgaccttggagttgttcatttaatgaaaaaaacttcaatgcctactatgtgcccagacctcttctaggtagagacgatacaagagtggtacagaagtgaacaacacaggtaagtggtctggcctacaaggatttcgcattctgggtattggagactgattttagcaggaacttaaaaagataatttcaggctgtgattagagctctggagtaaataacaaagagatatgataaaatgtaacctggggagtcaggcagtggctgaatggaggagggaggagacaacttcagagcatgagagggaagacttttctgaggccatgcctttaaggtgaggaacataagtaatcttttggagagctgggaaagttgttctggtacagggtaatatcaagtgcaaaggccctggggcagtgggcttgttgtatttgagaaacagcaggtgggtgtggccaaagcctaccaagagatgacactggagaagacaggagggtcctgtagtgtatgatacacaagcagccatttttacaaacaataactaaggcacctttccttttcagatggtggaattgcacgacttagagtattcggtactggacaaaaagactggactgcaactgaccccaaagaacctgcagacctagtggccatcgcttttgggggtgtctgtgtaggatttagtaatgctaagtttgggcacccaaacaatataataggagttggcggggcaaagtctatggcggatggttgggaaactgcaagaaggctggaccggccaccaatattagaaaatgatgagaatggcattctcttggttccgggttgtgaatgggcagttttccgattggcacatcctggagtaataactcgaattgaaattgacacaaaatattttgaaggcaatgctcctgacagctgtaaagtggatgggtgcatcctgacaactcaggaagaagccgtgatcaggcaaaagtggattctcccggcccacaagtggaaaccactgcttccagtgaccaagttgtctcccaaccaaagtcatctgttcgatagcctgaccctagagctccaagatgtcatcactcacgccaggctcaccatcgtccccgacgggggagtgagccgccttcggctccggggcttccccagctccatctgcctcctgaggccccgggagaagcccatgttgaagttctcggtgagcttcaaagcaaacccttaacacacacaaagccccggtgtcggacacacagcagtaatttcccagtcatagtcttcttttcaaatgttttgaacacctggtgatttaataaagtggtcgtctcacaaaa

SEQ ID NO: 284266 - DNA, 1419 bp, Homo sapiens
caagcaccgtgggaccttggctggcttctggggagcaagagatccatttatgaatacttgatttctgactgctgggaagcacggctgatgctccgaaggagggaagactgacccggtttctggacttcacccagctgatggacatggcatctgaatccgtaggaggaaaaattttatttgcaacagatgacttttttgctcctgcagaaaacctcataaagagtgacagcccgtgcttcaaagagcatgaatatacggagtttgggaaatggatggatggctgggagaccaggaggaaaaggattccaggtcacgactggtgtgtcctcaggctggggatccaaggagtcatccggggcttcgacgtggacgtttcttacttcacgggagattacgctcctcgagtgtccattcaagcagcaaacttggaagaagataaactaccagaaatcccagaaagaggaatcaggacaggagctgcagccactcctgaggagtttgaagccattgctgagctaaaatccgacgactggagttacttggttcccatgactgagcttaagccaggaaaccctgcttccggccacaactattttcttgtcaattcccagcagagatggactcatatcagactcaacattttcccagatggtggaattgcacgacttagagtattcggtactggacaaaaagactggactgcaactgaccccaaagaacctgcagacctagtggccatcgcttttgggggtgtctgtgtaggatttagtaatgctaagtttgggcacccaaacaatataataggagttggcggggcaaagtctatggcggatggttgggaaactgcaagaaggctggaccggccaccaatattagaaaatgatgagaatggcattctcttggttccgggttgtgaatgggcagttttccgattggcacatcctggagtaataactcgaattgaaattgacacaaaatattttgaaggcaatgctcctgacagctgtaaagtggatgggtgcatcctgacaactcaggaagaagccgtgatcaggcaaaagtggattctcccggcccacaagtggaaaccactgcttccagtgaccaagttgtctcccaaccaaagtcatctgttcgatagcctgaccctagagctccaagatgtcatcactcacgccaggctcaccatcgtccccgacgggggagtgagccgccttcggctccggggcttccccagctccatctgcctcctgaggccccgggagaagcccatgttgaagttctcggtgagcttcaaagcaaacccttaacacacacaaagccccggtgtcggacacacagcagtaatttcccagtcatagtcttcttttcaaatgttttgaacacctggtgatttaataaagtggtcgtctcacaaaa

SEQ ID NO: 284267 - DNA, 909 bp, Homo sapiens
aggctagacaaggagggctctgcaaacatatggcgtggcctggggctgtcagacagtagtgtcgctgcaggacacggaggagactggcagcgaggcagcagggtcggcaggagcccataaaggttctgatgacgcattcctcaggcccaatccgtagagcaggaggaatctaactggtgtccgagaagatgtgtttgacctatggtgccagccttcagtttctcagaagacatatgggacccagataaatcagacattgaatgcgctgacgagagtcgctgaggacccaagagaaaaggcttttttggtttggatttcatctgtatttcaccacttgaaaattcactattggcatcgggcatgtatagactcccatcaaggcacactgaccctgaaaaatggctgagctaaaataaaagctggcctcgttggcctcataacgctgaaacgaaatactgagttctaaatctggtgatttatcttttgacagctacaaagtgcgacacatcaacattacattgccagatttaatttctcatcttccatttcattgataattgtaaggtttaaaatccataacaatttatatgaagttctagttggtcaatactgtgatccagtcctcatactgaaacaatgttaacttacttaaaatccaccacaaaatattcaattatttgacagatgtttaacagaaagaataagggatcattaatgattccatttaaaaaatatttcatcacgagtgctacttttacttcagattcatgcaaatatggtgcttaaaactggatcatatttcaatccaaaaaccaacgcccgaagtatacggataatttccaagaacagaaaaaccataaataagatataaactcccccaaattcaaaataaattacataacttactct

SEQ ID NO: 284268 - DNA, 479 bp, Homo sapiens
aggctagacaaggagggctctgcaaacatatggcgtggcctggggctgtcagacagtagtgtcgctgcaggacacggaggagactggcagcgaggcagcagggtcggcaggagcccataaaggttctgatgacgcattcctcaggcccaatccgtagagcaggaggaatctaactggtgtccgagaagatgtgtttgacctatggtgccagccttcagtttctcagaagacatatgggacccagataaatcagacattgaatgcgctgacgagagtcgctgaggacccaagagaaaaggcttttttggtttggatttcatctgtatttcaccacttgaaaattcactattggcatcgggcatgtatagactcccatcaaggcacactgaccctgaaaaatggctgagctaaaataaaccccgatgcggccggaagtttttatctgcggcccccaaataaacggggtggcgggggtgggg

SEQ ID NO: 284269 - DNA, 1034 bp, Homo sapiens
aggctagacaaggagggctctgcaaacatatggcgtggcctggggctgtcagacagtagtgtcgctgcaggacacggaggagactggcagcgaggcagcagggtcggcaggagcccataaaggttctgatgacgcattcctcaggcccaatccgtagagcaggaggaatctaactggtgtccgagaagatgtgtttgacctatggtgccagccttcagtttctcagaagacatatgggacccagataaatcagacattgaatgcgctgacgagagtcgctgaggacccaagagaaaaggcttttttggtttggatttcatctgtatttcaccacttgaaaattcactattggcatcgggcataaccaacccagacatcctctaaaggaggagatacagaagttctcttcccaggcccactcaaagggttctggctcagaccctttttccccattccttaagagagaaaaaagacatatattttcaaggtatagactcccatcaaggcacactgaccctgaaaaatggctgagctaaaataaaagctggcctcgttggcctcataacgctgaaacgaaatactgagttctaaatctggtgatttatcttttgacagctacaaagtgcgacacatcaacattacattgccagatttaatttctcatcttccatttcattgataattgtaaggtttaaaatccataacaatttatatgaagttctagttggtcaatactgtgatccagtcctcatactgaaacaatgttaacttacttaaaatccaccacaaaatattcaattatttgacagatgtttaacagaaagaataagggatcattaatgattccatttaaaaaatatttcatcacgagtgctacttttacttcagattcatgcaaatatggtgcttaaaactggatcatatttcaatccaaaaaccaacgcccgaagtatacggataatttccaagaacagaaaaaccataaataagatataaactcccccaaattcaaaataaattacataacttactct

SEQ ID NO: 284270 - DNA, 261 bp, Homo sapiens
aaatctgatctggttgaggttacgttttcccggaatgcactatggtgaaagggatggctacttaaaagaacagtaaacttctatattatgcttatctaattagtgaattagaaataagaatgttcaagatcaaggtatatgtctgaatcattctgaatacaacggtcaggtgtcttttctcctgcttttgcaacaaggcagatggaaaataaaacacactaaaatgtttgaaagtgattactgcatacctggtgttcttta

SEQ ID NO: 284271 - DNA, 635 bp, Homo sapiens
tggtctggtgctgtataaatatattttctttttaattttgttttaacttcttccttgccctccttcacccaaatcccagccctccctgccctcccacactccccaaccccacctgccctgccccacctcttccttcccccacccacactctcttgtcctctctctctctctctctacatatataaatatatatataaatcttttcttcttttgtcattcaatcaaattccaacaacccaaccagggccagtcaaatccaccacagtctcgcgctgagctaggaataaagttcacgtaatcacatgagagtggagaaaagtcccccatccgtaagttcaaatcaactcaaagttcacagtgtgacatgatggcgtcatgtaacaaggctaagaatcggttgcatgacaattgccgtcaagtttcgtggaggtgctgtgattggagcgtttttcttggatgttgtatcagttgatgattggccagtcatgatcacacgtgcattttcttgacttttgtgctgccacaatcttttttgctgtgctcattttcgtttcgttcttggtgcttgcagtggttttactttctgttgtttggtttttcttgttcagcgtttttttcctcgtgccgagatgtca

SEQ ID NO: 284272 - DNA, 3343 bp, Homo sapiens
  misc_feature (19)..(19): n is a, c, g, or t
  misc_feature (21)..(21): n is a, c, g, or t
  misc_feature (23)..(24): n is a, c, g, or t
  misc_feature (26)..(26): n is a, c, g, or t
tacggtaggtagcgagcgngngnngnggagaaagagagagagcagagagcgagcggagagcgaggtgtagagaaaccgagggggagagaacccgagtgtgtgtatgcgtgtgcgtgtgtgagcgcgagcgagcgagcgagagagaggagcgagagagtgtgagcgagaaagaataaaaggaaagaagattttctctatgtatataaagatggccacgttagcaaacggacaggctgacaacgcaagcctcagtaccaacgggctcggcagcagcccgggcagtgccgggcacatgaacggattaagccacagcccggggaacccgtcgaccattcccatgaaggaccacgatgccatcaagctgttcattgggcagatcccccgcaacctggatgagaaggacctcaagcccctcttcgaggagtttggcaaaatctacgagcttacggttctgaaggacaggttcacaggcatgcacaaaggctgcgccttcctcacctactgcgagcgtgagtcagcgctgaaggcccagagcgcgctgcacgagcagaagactctgcccgggatgaaccggccgatccaggtgaagcctgcggacagcgagagccgaggaggtagtagctgcctgcgccagcccccttcacaagatagaaaactcttcgtgggcatgctcaacaagcaacagtccgaggacgacgtgcgccgccttttcgaggcctttgggaacatcgaggagtgcaccatcctgcgcgggcccgacggcaacagcaaggggtgcgcctttgtgaagtactcctcccacgccgaggcgcaggccgccatcaacgcgctacacggcagccagaccatgccgggagcctcgtccagtctggtggtcaagttcgccgacaccgacaaggagcgcacgatgcggcgaatgcagcagatggctggccagatgggcatgttcaaccccatggccatccctttcggggcctacggcgcctacgctcaggcactgatgcagcagcaagcggccctgatggcatcagtcgcgcagggcggctacctgaaccccatggctgccttcgctgccgcccagatgcagcagatggcggccctcaacatgaatggcctggcggccgcacctatgaccccaacctcaggtggcagcacccctccgggcatcactgcaccagccgtgcctagcatcccatcccccattggggtgaatggcttcaccggcctccccccacaggccaatgggcaacctgctgcggaagctgtgttcgccaatggcatccacccctacccagcacagagccccaccgccgcggaccccctgcagcaggcctacgccggagtgcagcagtatgcaggtccagctgcctaccctgctgcctatggtcagataagccaggcctttcctcagccgcctccaatgatcccccagcagcagagagaagggcccgagggctgtaacctgttcatctaccatctgccccaggagtttggggacgctgagctgatgcagatgttcctccctttcggcttcgtgagcttcgacaacccggccagcgcgcagaccgccatccaggccatgaacggcttccagatcggcatgaagaggctcaaggtgcagctgaagcggcccaaagacgccaatcgcccgtactgagcgccggcgggagcgtcccccgggggagaccaggactcgcacagggcaggatgctgaacgggctacattaaaaaacaaacctctctctatatatatttataaatgagaactgttggatgacacctttgacatatcagccaatatcaatcaagctgaagactccagacactgtctgtgtgactgtaacatttcttcaaggaaagtatagcgtctatggagttcagagggcacgtgtttgggggaaaatatatatgacatgaagaagaagatgaagaaaaatgagaaaaaaacacacaaaaggcaactttaaaacaaaatatcacgagcagacggggaggctgaagggctgggagctgggaggagacgctgcttaccgatcccggggcttttccagcccacgggcgcctgacgcaggctggggcaagtggtgcgtggggcctggtccccaaggggcggctgagaggccgccactgagcatctctatctgtcattcctttagctatttagggaccaaaggaccaaactttttattgcagatgtgtagctctatgtcaaatagagggggaatggaggaccccctccttcctgcctcatggctgttcttgaaacagcttagagcgattctatgaaaaaatgtaataaaaaattaaaaaaaaaacaaaaaacaaaaaaaacaacaaaaaaaggaaaaataacgcttcaatgcttttaaaacagcaagataatagttctttgatactttgagaggcgctttgatgaccctcatccaagtctatgacactttcctatggttttctgtattctatgtctggatggagctgttaaaagatgaacaaattggtggatatttggggaaagcaacacaaatcttaaaactcacccgtgaagtgtgagaaaacaaggaggggaacaaatgggacttaccaagcaaggtcattgttgtgaaaagtctgtaaatgcttctaactcttccccctcttaaaatcataatagttgtacagaattttaaaaaggaaaagtttaaaatacctatataatagaagaaaaattagaggaaagcaaaaaataaaaaaaaaaaaataaaaaaggaaaaaaaaaacctatagaagttagcattactgctaaaatcccagatgttgtaggactgtacttttgtagagtttagacagagcatcaatcccttctccccgcgagtgcagtcggatgccgttgtccccaagggccaggccgaactcgccccacacctgcgggcgcctggctgccgacgccggtggaggccacgccgtcggtcgggaacggtcgcgtcgcccgggtcgccgccgccgccgccgccgtcatcctcgcctctcgcttccctctgggagctgcgcgcgcttcactcaccttccgcttcactcgccttccacgcttgctccagagactttccgggcaagggagaactgggaactttcatcttaaaacaactagacaacacacacacacacaaaaccttaaaaaagagagagaaaaataaacaatctttgaagaatttctgaaactgtttacaaggaattttgaaaaacagggatgtttaaatgatgccggctctgtttttctgtaaataaatttgcatattttgtaggacttttaattgtaatgatagagaaaaaaacaaggaaaactatttaatgaaagcacgatatttat

SEQ ID NO: 284273 - DNA, 3285 bp, Homo sapiens
  misc_feature (19)..(19): n is a, c, g, or t
  misc_feature (21)..(21): n is a, c, g, or t
  misc_feature (23)..(24): n is a, c, g, or t
  misc_feature (26)..(26): n is a, c, g, or t
tacggtaggtagcgagcgngngnngnggagaaagagagagagcagagagcgagcggagagcgaggtgtagagaaaccgagggggagagaacccgagtgtgtgtatgcgtgtgcgtgtgtgagcgcgagcgagcgagcgagagagaggagcgagagagtgtgagcgagaaagaataaaaggaaagaagattttctctatgtatataaagatggccacgttagcaaacggacaggctgacaacgcaagcctcagtaccaacgggctcggcagcagcccgggcagtgccgggcacatgaacggattaagccacagcccggggaacccgtcgaccattcccatgaaggaccacgatgccatcaagctgttcattgggcagatcccccgcaacctggatgagaaggacctcaagcccctcttcgaggagtttggcaaaatctacgagcttacggttctgaaggacaggttcacaggcatgcacaaaggctgcgccttcctcacctactgcgagcgtgagtcagcgctgaaggcccagagcgcgctgcacgagcagaagactctgcccgggatgaaccggccgatccaggtgaagcctgcggacagcgagagccgaggaggtagtagctgcctgcgccagcccccttcacaagatagaaaactcttcgtgggcatgctcaacaagcaacagtccgaggacgacgtgcgccgccttttcgaggcctttgggaacatcgaggagtgcaccatcctgcgcgggcccgacggcaacagcaaggggtgcgcctttgtgaagtactcctcccacgccgaggcgcaggccgccatcaacgcgctacacggcagccagaccatgccgggagcctcgtccagtctggtggtcaagttcgccgacaccgacaaggagcgcacgatgcggcgaatgcagcagatggctggccagatgggcatgttcaaccccatggccatccctttcggggcctacggcgcctacgctcaggcactgatgcagcagcaagcggccctgatggcatcagtcgcgcagggcggctacctgaaccccatggctgccttcgctgccgcccagatgcagcagatggcggccctcaacatgaatggcctggcggccgcacctatgaccccaacctcaggtggcagcacccctccgggcatcactgcaccagccgtgcctagcatcccatcccccattggggtgaatggcttcaccggcctccccccacaggccaatgggcaacctgctgcggaagctgtgttcgccaatggcatccacccctacccagcacagagccccaccgccgcggaccccctgcagcaggcctacgccggagtgcagcagtatgcaggtccagctgcctaccctgctgcctatggtcagataagccaggcctttcctcagccgcctccaatgatcccccagcagcagagagaagggcccgagggctgtaacctgttcatctaccatctgccccaggagtttggggacgctgagctgatgcagatgttcctccctttcggcttcgtgagcttcgacaacccggccagcgcgcagaccgccatccaggccatgaacggcttccagatcggcatgaagaggctcaaggtgcagctgaagcggcccaaagacgccaatcgcccgtactgagcgccggcgggagcgtcccccgggggagaccaggactcgcacagggcaggatgctgaacgggctacattaaaaaacaaacctctctctatatatatttataaatgagaactgttggatgacacctttgacatatcagccaatatcaatcaagctgaagactccagacactgtctgtgtgactgtaacatttcttcaaggaaagtatagcgtctatggagttcagagggcacgtgtttgggggaaaatatatatgacatgaagaagaagatgaagaaaaatgagaaaaaaacacacaaaaggcaactttaaaacaaaatatcacgagcagacggggaggctgaagggctgggagctgggaggagacgctgcttaccgatcccggggcttttccagcccacgggcgcctgacgcaggctggggcaagtggtgcgtggggcctggtccccaaggggcggctgagaggccgccactgagcatctctatctgtcattcctttagctatttagggaccaaaggaccaaactttttattgcagatgtgtagctctatgtcaaatagagggggaatggaggaccccctccttcctgcctcatggctgttcttgaaacagcttagagcgattctatgaaaaaatgtaataaaaaattaaaaaaaaaacaaaaaacaaaaaaaacaacaaaaaaaggaaaaataacgcttcaatgcttttaaaacagcaagataatagttctttgatactttgagaggcgctttgatgaccctcatccaagtctatgacactttcctatggttttctgtattctatgtctggatggagctgttaaaagatgaacaaattggtggatatttggggaaagcaacacaaatcttaaaactcacccgtgaagtgtgagaaaacaaggaggggaacaaatgggacttaccaagcaaggtcattgttgtgaaaagtctgtaaatgcttctaactcttccccctcttaaaatcataatagttgtacagaattttaaaaaggaaaagtttaaaatacctatataatagaagaaaaattagaggaaagcaaaaaataaaaaaaaaaaaataaaaaaggaaattttgtagagtttagacagagcatcaatcccttctccccgcgagtgcagtcggatgccgttgtccccaagggccaggccgaactcgccccacacctgcgggcgcctggctgccgacgccggtggaggccacgccgtcggtcgggaacggtcgcgtcgcccgggtcgccgccgccgccgccgccgtcatcctcgcctctcgcttccctctgggagctgcgcgcgcttcactcaccttccgcttcactcgccttccacgcttgctccagagactttccgggcaagggagaactgggaactttcatcttaaaacaactagacaacacacacacacacaaaaccttaaaaaagagagagaaaaataaacaatctttgaagaatttctgaaactgtttacaaggaattttgaaaaacagggatgtttaaatgatgccggctctgtttttctgtaaataaatttgcatattttgtaggacttttaattgtaatgatagagaaaaaaacaaggaaaactatttaatgaaagcacgatatttat

SEQ ID NO: 284274 - DNA, 2718 bp, Homo sapiens
  misc_feature (19)..(19): n is a, c, g, or t
  misc_feature (21)..(21): n is a, c, g, or t
  misc_feature (23)..(24): n is a, c, g, or t
  misc_feature (26)..(26): n is a, c, g, or t
tacggtaggtagcgagcgngngnngnggagaaagagagagagcagagagcgagcggagagcgaggtgtagagaaaccgagggggagagaacccgagtgtgtgtatgcgtgtgcgtgtgtgagcgcgagcgagcgagcgagagagaggagcgagagagtgtgagcgagaaagaataaaaggaaagaagattttctctatgtatataaagatggccacgttagcaaacggacaggctgacaacgcaagcctcagtaccaacgggctcggcagcagcccgggcagtgccgggcacatgaacggattaagccacagcccggggaacccgtcgaccattcccatgaaggaccacgatgccatcaagctgttcattgggcagatcccccgcaacctggatgagaaggacctcaagcccctcttcgaggagtttggcaaaatctacgagcttacggttctgaaggacaggttcacaggcatgcacaaaggctgcgccttcctcacctactgcgagcgtgagtcagcgctgaaggcccagagcgcgctgcacgagcagaagactctgcccgggatgaaccggccgatccaggtgaagcctgcggacagcgagagccgaggaggtagtagctgcctgcgccagcccccttcacaagatagaaaactcttcgtgggcatgctcaacaagcaacagtccgaggacgacgtgcgccgccttttcgaggcctttgggaacatcgaggagtgcaccatcctgcgcgggcccgacggcaacagcaaggggtgcgcctttgtgaagtactcctcccacgccgaggcgcaggccgccatcaacgcgctacacggcagccagaccatgccgggagcctcgtccagtctggtggtcaagttcgccgacaccgacaaggagcgcacgatgcggcgaatgcagcagatggctggccagatgggcatgttcaaccccatggccatccctttcggggcctacggcgcctacgctcaggcactgatgcagcagcaagcggccctgatggcatcagtcgcgcagggcggctacctgaaccccatggctgccttcgctgccgcccagatgcagcagatggcggccctcaacatgaatggcctggcggccgcacctatgaccccaacctcaggtggcagcacccctccgggcatcactgcaccagccgtgcctagcatcccatcccccattggggtgaatggcttcaccggcctccccccacaggccaatgggcaacctgctgcggaagctgtgttcgccaatggcatccacccctacccagcacagagccccaccgccgcggaccccctgcagcaggcctacgccggagtgcagcagtatgcaggtccagctgcctaccctgctgcctatggtcagataagccaggcctttcctcagccgcctccaatgatcccccagcagcagagagaagggcccgagggctgtaacctgttcatctaccatctgccccaggagtttggggacgctgagctgatgcagatgttcctccctttcggcttcgtgagcttcgacaacccggccagcgcgcagaccgccatccaggccatgaacggcttccagatcggcatgaagaggctcaaggtgcagctgaagcggcccaaagacgccaatcgcccgtactgagcgccggcgggagcgtcccccgggggagaccaggactcgcacagggcaggatgctgaacgggctacattaaaaaacaaacctctctctatatatatttataaatgagaactgttggatgacacctttgacatatcagccaatatcaatcaagctgaagactccagacactgtctgtgtgactgtaacatttcttcaaggaaagtatagcgtctatggagttcagagggcacgtgtttgggggaaaatatatatgacatgaagaagaagatgaagaaaaatgagaaaaaaacacacaaaaggcaactttaaaacaaaatatcacgagcagacggggaggctgaagggctgggagctgggaggagacgctgcttaccgatcccggggcttttccagcccacgggcgcctgacgcaggctggggcaagtggtgcgtggggcctggtccccaaggggcggctgagaggccgccactgagcatctctatctgtcattcctttagctatttagggaccaaaggaccaaactttttattgcagatgtgtagctctatgtcaaatagagggggaatggaggaccccctccttcctgcctcatggctgttcttgaaacagcttagagcgattctatgaaaaaatgtaataaaaaattaaaaaaaaaacaaaaaacaaaaaaaacaacaaaaaaaggaaaaataacgcttcaatgcttttaaaacagcaagataatagttctttgatactttgagaggcgctttgatgaccctcatccaagtctatgacactttcctatggttttctgtattctatgtctggatggagctgttaaaagatgaacaaattggtggatatttggggaaagcaacacaaatcttaaaactcacccgtgaagtgtgagaaaacaaggaggggaacaaatgggacttaccaagcaaggtcattgttgtgaaaagtctgtaaatgcttctaactcttccccctcttaaaatcataatagttgtacagaattttaaaaaggaaaagtttaaaatacctatataatagaagaaaaattagaggaaagca

SEQ ID NO: 284275 - DNA, 3315 bp, Homo sapiens
  misc_feature (19)..(19): n is a, c, g, or t
  misc_feature (21)..(21): n is a, c, g, or t
  misc_feature (23)..(24): n is a, c, g, or t
  misc_feature (26)..(26): n is a, c, g, or t
tacggtaggtagcgagcgngngnngnggagaaagagagagagcagagagcgagcggagagcgaggtgtagagaaaccgagggggagagaacccgagtgtgtgtatgcgtgtgcgtgtgtgagcgcgagcgagcgagcgagagagaggagcgagagagtgtgagcgagaaagaataaaaggaaagaagattttctctatgtatataaagatggccacgttagcaaacggacaggctgacaacgcaagcctcagtaccaacgggctcggcagcagcccgggcagtgccgggcacatgaacggattaagccacagcccggggaacccgtcgaccattcccatgaaggaccacgatgccatcaagctgttcattgggcagatcccccgcaacctggatgagaaggacctcaagcccctcttcgaggagtttggcaaaatctacgagcttacggttctgaaggacaggttcacaggcatgcacaaaggctgcgccttcctcacctactgcgagcgtgagtcagcgctgaaggcccagagcgcgctgcacgagcagaagactctgcccgggatgaaccggccgatccaggtgaagcctgcggacagcgagagccgaggaggtaagatagaaaactcttcgtgggcatgctcaacaagcaacagtccgaggacgacgtgcgccgccttttcgaggcctttgggaacatcgaggagtgcaccatcctgcgcgggcccgacggcaacagcaaggggtgcgcctttgtgaagtactcctcccacgccgaggcgcaggccgccatcaacgcgctacacggcagccagaccatgccgggagcctcgtccagtctggtggtcaagttcgccgacaccgacaaggagcgcacgatgcggcgaatgcagcagatggctggccagatgggcatgttcaaccccatggccatccctttcggggcctacggcgcctacgctcaggcactgatgcagcagcaagcggccctgatggcatcagtcgcgcagggcggctacctgaaccccatggctgccttcgctgccgcccagatgcagcagatggcggccctcaacatgaatggcctggcggccgcacctatgaccccaacctcaggtggcagcacccctccgggcatcactgcaccagccgtgcctagcatcccatcccccattggggtgaatggcttcaccggcctccccccacaggccaatgggcaacctgctgcggaagctgtgttcgccaatggcatccacccctacccagcacagagccccaccgccgcggaccccctgcagcaggcctacgccggagtgcagcagtatgcaggtccagctgcctaccctgctgcctatggtcagataagccaggcctttcctcagccgcctccaatgatcccccagcagcagagagaagggcccgagggctgtaacctgttcatctaccatctgccccaggagtttggggacgctgagctgatgcagatgttcctccctttcggcttcgtgagcttcgacaacccggccagcgcgcagaccgccatccaggccatgaacggcttccagatcggcatgaagaggctcaaggtgcagctgaagcggcccaaagacgccaatcgcccgtactgagcgccggcgggagcgtcccccgggggagaccaggactcgcacagggcaggatgctgaacgggctacattaaaaaacaaacctctctctatatatatttataaatgagaactgttggatgacacctttgacatatcagccaatatcaatcaagctgaagactccagacactgtctgtgtgactgtaacatttcttcaaggaaagtatagcgtctatggagttcagagggcacgtgtttgggggaaaatatatatgacatgaagaagaagatgaagaaaaatgagaaaaaaacacacaaaaggcaactttaaaacaaaatatcacgagcagacggggaggctgaagggctgggagctgggaggagacgctgcttaccgatcccggggcttttccagcccacgggcgcctgacgcaggctggggcaagtggtgcgtggggcctggtccccaaggggcggctgagaggccgccactgagcatctctatctgtcattcctttagctatttagggaccaaaggaccaaactttttattgcagatgtgtagctctatgtcaaatagagggggaatggaggaccccctccttcctgcctcatggctgttcttgaaacagcttagagcgattctatgaaaaaatgtaataaaaaattaaaaaaaaaacaaaaaacaaaaaaaacaacaaaaaaaggaaaaataacgcttcaatgcttttaaaacagcaagataatagttctttgatactttgagaggcgctttgatgaccctcatccaagtctatgacactttcctatggttttctgtattctatgtctggatggagctgttaaaagatgaacaaattggtggatatttggggaaagcaacacaaatcttaaaactcacccgtgaagtgtgagaaaacaaggaggggaacaaatgggacttaccaagcaaggtcattgttgtgaaaagtctgtaaatgcttctaactcttccccctcttaaaatcataatagttgtacagaattttaaaaaggaaaagtttaaaatacctatataatagaagaaaaattagaggaaagcaaaaaataaaaaaaaaaaaataaaaaaggaaaaaaaaaacctatagaagttagcattactgctaaaatcccagatgttgtaggactgtacttttgtagagtttagacagagcatcaatcccttctccccgcgagtgcagtcggatgccgttgtccccaagggccaggccgaactcgccccacacctgcgggcgcctggctgccgacgccggtggaggccacgccgtcggtcgggaacggtcgcgtcgcccgggtcgccgccgccgccgccgccgtcatcctcgcctctcgcttccctctgggagctgcgcgcgcttcactcaccttccgcttcactcgccttccacgcttgctccagagactttccgggcaagggagaactgggaactttcatcttaaaacaactagacaacacacacacacacaaaaccttaaaaaagagagagaaaaataaacaatctttgaagaatttctgaaactgtttacaaggaattttgaaaaacagggatgtttaaatgatgccggctctgtttttctgtaaataaatttgcatattttgtaggacttttaattgtaatgatagagaaaaaaacaaggaaaactatttaatgaaagcacgatatttat

SEQ ID NO: 284276 - DNA, 3231 bp, Homo sapiens
  misc_feature (19)..(19): n is a, c, g, or t
  misc_feature (21)..(21): n is a, c, g, or t
  misc_feature (23)..(24): n is a, c, g, or t
  misc_feature (26)..(26): n is a, c, g, or t
tacggtaggtagcgagcgngngnngnggagaaagagagagagcagagagcgagcggagagcgaggtgtagagaaaccgagggggagagaacccgagtgtgtgtatgcgtgtgcgtgtgtgagcgcgagcgagcgagcgagagagaggagcgagagagtgtgagcgagaaagaataaaaggaaagaagattttctctatgtatataaagatggccacgttagcaaacggacaggctgacaacgcaagcctcagtaccaacgggctcggcagcagcccgggcagtgccgggcacatgaacggattaagccacagcccggggaacccgtcgaccattcccatgaaggaccacgatgccatcaagctgttcattgggcagatcccccgcaacctggatgagaaggacctcaagcccctcttcgaggagtttggcaaaatctacgagcttacggttctgaaggacaggttcacaggcatgcacaaaggctgcgccttcctcacctactgcgagcgtgagtcagcgctgaaggcccagagcgcgctgcacgagcagaagactctgcccgggatgaaccggccgatccaggtgaagcctgcggacagcgagagccgaggaggtaagatagaaaactcttcgtgggcatgctcaacaagcaacagtccgaggacgacgtgcgccgccttttcgaggcctttgggaacatcgaggagtgcaccatcctgcgcgggcccgacggcaacagcaaggggtgcgcctttgtgaagtactcctcccacgccgaggcgcaggccgccatcaacgcgctacacggcagccagaccatgccgggagcctcgtccagtctggtggtcaagttcgccgacaccgacaaggagcgcacgatgcggcgaatgcagcagatggctggccagatgggcatgttcaaccccatggccatccctttcggggcctacggcgcctacgctcaggcactgatgcagcagcaagcggccctgatggcatcagtcgcgcagggcggctacctgaaccccatggctgccttcgctgccgcccagatgcagcagatggcggccctcaacatgaatggcctggcggccgcacctatgaccccaacctcaggtggcagcacccctccgggcatcactgcaccagccgtgcctagcatcccatcccccattggggtgaatggcttcaccggcctccccccacaggccaatgggcaacctgctgcggaagctgtgttcgccaatggcatccacccctacccagcacagagccccaccgccgcggaccccctgcagcaggcctacgccggagtgcagcagtatgcaggtccagctgcctaccctgctgcctatggtcagataagccaggcctttcctcagccgcctccaatgatcccccagcagcagagagaaggcttcgtgagcttcgacaacccggccagcgcgcagaccgccatccaggccatgaacggcttccagatcggcatgaagaggctcaaggtgcagctgaagcggcccaaagacgccaatcgcccgtactgagcgccggcgggagcgtcccccgggggagaccaggactcgcacagggcaggatgctgaacgggctacattaaaaaacaaacctctctctatatatatttataaatgagaactgttggatgacacctttgacatatcagccaatatcaatcaagctgaagactccagacactgtctgtgtgactgtaacatttcttcaaggaaagtatagcgtctatggagttcagagggcacgtgtttgggggaaaatatatatgacatgaagaagaagatgaagaaaaatgagaaaaaaacacacaaaaggcaactttaaaacaaaatatcacgagcagacggggaggctgaagggctgggagctgggaggagacgctgcttaccgatcccggggcttttccagcccacgggcgcctgacgcaggctggggcaagtggtgcgtggggcctggtccccaaggggcggctgagaggccgccactgagcatctctatctgtcattcctttagctatttagggaccaaaggaccaaactttttattgcagatgtgtagctctatgtcaaatagagggggaatggaggaccccctccttcctgcctcatggctgttcttgaaacagcttagagcgattctatgaaaaaatgtaataaaaaattaaaaaaaaaacaaaaaacaaaaaaaacaacaaaaaaaggaaaaataacgcttcaatgcttttaaaacagcaagataatagttctttgatactttgagaggcgctttgatgaccctcatccaagtctatgacactttcctatggttttctgtattctatgtctggatggagctgttaaaagatgaacaaattggtggatatttggggaaagcaacacaaatcttaaaactcacccgtgaagtgtgagaaaacaaggaggggaacaaatgggacttaccaagcaaggtcattgttgtgaaaagtctgtaaatgcttctaactcttccccctcttaaaatcataatagttgtacagaattttaaaaaggaaaagtttaaaatacctatataatagaagaaaaattagaggaaagcaaaaaataaaaaaaaaaaaataaaaaaggaaaaaaaaaacctatagaagttagcattactgctaaaatcccagatgttgtaggactgtacttttgtagagtttagacagagcatcaatcccttctccccgcgagtgcagtcggatgccgttgtccccaagggccaggccgaactcgccccacacctgcgggcgcctggctgccgacgccggtggaggccacgccgtcggtcgggaacggtcgcgtcgcccgggtcgccgccgccgccgccgccgtcatcctcgcctctcgcttccctctgggagctgcgcgcgcttcactcaccttccgcttcactcgccttccacgcttgctccagagactttccgggcaagggagaactgggaactttcatcttaaaacaactagacaacacacacacacacaaaaccttaaaaaagagagagaaaaataaacaatctttgaagaatttctgaaactgtttacaaggaattttgaaaaacagggatgtttaaatgatgccggctctgtttttctgtaaataaatttgcatattttgtaggacttttaattgtaatgatagagaaaaaaacaaggaaaactatttaatgaaagcacgatatttat

SEQ ID NO: 284277 - DNA, 2225 bp, Homo sapiens
  misc_feature (19)..(19): n is a, c, g, or t
  misc_feature (21)..(21): n is a, c, g, or t
  misc_feature (23)..(24): n is a, c, g, or t
  misc_feature (26)..(26): n is a, c, g, or t
tacggtaggtagcgagcgngngnngnggagaaagagagagagcagagagcgagcggagagcgaggtgtagagaaaccgagggggagagaacccgagtgtgtgtatgcgtgtgcgtgtgtgagcgcgagcgagcgagcgagagagaggagcgagagagtgtgagcgagaaagaataaaaggaaagaagattttctctatgtatataaagatggccacgttagcaaacggacaggctgacaacgcaagcctcagtaccaacgggctcggcagcagcccgggcagtgccgggcacatgaacggattaagccacagcccggggaacccgtcgaccattcccatgaaggaccacgatgccatcaagctgttcattgggcagatcccccgcaacctggatgagaaggacctcaagcccctcttcgaggagtttggcaaaatctacgagcttacggttctgaaggacaggttcacaggcatgcacaaaggctgcgccttcctcacctactgcgagcgtgagtcagcgctgaaggcccagagcgcgctgcacgagcagaagactctgcccgggatgaaccggccgatccaggtgaagcctgcggacagcgagagccgaggaggtagtagctgcctgcgccagcccccttcacaagatagaaaactcttcgtgggcatgctcaacaagcaacagtccgaggacgacgtgcgccgccttttcgaggcctttgggaacatcgaggagtgcaccatcctgcgcgggcccgacggcaacagcaaggggtgcgcctttgtgaagtactcctcccacgccgaggcgcaggccgccatcaacgcgctacacggcagccagaccatgccgggagcctcgtccagtctggtggtcaagttcgccgacaccgacaaggagcgcacgatgcggcgaatgcagcagatggctggccagatgggcatgttcaaccccatggccatccctttcggggcctacggcgcctacgctcaggcactgatgcagcagcaagcggccctgatggcatcagtcgcgcagggcggctacctgaaccccatggctgccttcgctgccgcccagatgcagcagatggcggccctcaacatgaatggcctggcggccgcacctatgaccccaacctcaggtggcagcacccctccgggcatcactgcaccagccgtgcctagcatcccatcccccattggggtgaatggcttcaccggcctccccccacaggccaatgggcaacctgctgcggaagctgtgttcgccaatggcatccacccctacccagcacagagccccaccgccgcggaccccctgcagcaggcctacgccggagtgcagcagtatgcaggtccagctgcctaccctgctgcctatggtcagataagccaggcctttcctcagccgcctccaatgatcccccagcagcagagagaagggcccgagggctgtaacctgttcatctaccatctgccccaggagtttggggacgctgagctgatgcagatgttcctccctttcggcttcgtgagcttcgacaacccggccagcgcgcagaccgccatccaggccatgaacggcttccagatcggcatgaagaggctcaaggtgcagctgaagcggcccaaagacgccaatcgcccgtactgagcgccggcgggagcgtcccccgggggagaccaggactcgcacagggcaggatgctgaacgggctacattaaaaaacaaacctctctctatatatatttataaatgagaactgttggatgacacctttgacatatcagccaatatcaatcaagctgaagactccagacactgtctgtgtgactgtaacatttcttcaaggaaagtatagcgtctatggagttcagagggcacgtgtttgggggaaaatatatatgacatgaagaagaagatgaagaaaaatgagaaaaaaacacacaaaaggcaactttaaaacaaaatatcacgagcagacggggaggctgaagggctgggagctgggaggagagctccaggctcaggtggaaaacaatcagtgcatcagtctcctgaaccgtgggcaaaaggagaggcttcgcgagcaggaggagaggcttcaggagcagcaggagaggcttcgggaacaggagaagaggcttcagcagctggccgagccacagagtgacttggaggagctgaagccgagaacaagagcgcactgcagttggagtcg

SEQ ID NO: 284278 - DNA, 3316 bp, Homo sapiens
  misc_feature (19)..(19): n is a, c, g, or t
  misc_feature (21)..(21): n is a, c, g, or t
  misc_feature (23)..(24): n is a, c, g, or t
  misc_feature (26)..(26): n is a, c, g, or t
tacggtaggtagcgagcgngngnngnggagaaagagagagagcagagagcgagcggagagcgaggtgtagagaaaccgagggggagagaacccgagtgtgtgtatgcgtgtgcgtgtgtgagcgcgagcgagcgagcgagagagaggagcgagagagtgtgagcgagaaagaataaaaggaaagaagattttctctatgtatataaagatggccacgttagcaaacggacaggctgacaacgcaagcctcagtaccaacgggctcggcagcagcccgggcagtgccgggcacatgaacggattaagccacagcccggggaacccgtcgaccattcccatgaaggaccacgatgccatcaagctgttcattgggcagatcccccgcaacctggatgagaaggacctcaagcccctcttcgaggagtttggcaaaatctacgagcttacggttctgaaggacaggttcacaggcatgcacaaaggctgcgccttcctcacctactgcgagcgtgagtcagcgctgaaggcccagagcgcgctgcacgagcagaagactctgcccgggatgaaccggccgatccaggtgaagcctgcggacagcgagagccgaggaggtaagatagaaaactcttcgtgggcatgctcaacaagcaacagtccgaggacgacgtgcgccgccttttcgaggcctttgggaacatcgaggagtgcaccatcctgcgcgggcccgacggcaacagcaaggggtgcgcctttgtgaagtactcctcccacgccgaggcgcaggccgccatcaacgcgctacacggcagccagaccatgccgggagcctcgtccagtctggtggtcaagttcgccgacaccgacaaggagcgcacgatgcggcgaatgcagcagatggctggccagatgggcatgttcaaccccatggccatccctttcggggcctacggcgcctacgctcaggcactgatgcagcagcaagcggccctgatggcatcagtcgcgcagggcggctacctgaaccccatggctgccttcgctgccgcccagatgcagcagatggcggccctcaacatgaatggcctggcggccgcacctatgaccccaacctcaggtggcagcacccctccgggcatcactgcaccagccgtgcctagcatcccatcccccattggggtgaatggcttcaccggcctccccccacaggccaatgggcaacctgctgcggaagctgtgttcgccaatggcatccacccctacccagcacagagccccaccgccgcggaccccctgcagcaggcctacgccggagtgcagcagtatgcaggtccagctgcctaccctgctgcctatggtcagataagccaggcctttcctcagccgcctccaatgatcccccagcagcagagagaaggcttcgtgagcttcgacaacccggccagcgcgcagaccgccatccaggccatgaacggcttccagatcggcatgaagaggctcaaggtgcagctgaagcggcccaaagacgccaatcgcccgtactgagcgccggcgggagcgtcccccgggggagaccaggactcgcacagggccagtcaaatccaccacagtctcgcgctgagctaggaataaagttcacgtaatcacatgagagtggagaaaagtcccccatccggcaggatgctgaacgggctacattaaaaaacaaacctctctctatatatatttataaatgagaactgttggatgacacctttgacatatcagccaatatcaatcaagctgaagactccagacactgtctgtgtgactgtaacatttcttcaaggaaagtatagcgtctatggagttcagagggcacgtgtttgggggaaaatatatatgacatgaagaagaagatgaagaaaaatgagaaaaaaacacacaaaaggcaactttaaaacaaaatatcacgagcagacggggaggctgaagggctgggagctgggaggagacgctgcttaccgatcccggggcttttccagcccacgggcgcctgacgcaggctggggcaagtggtgcgtggggcctggtccccaaggggcggctgagaggccgccactgagcatctctatctgtcattcctttagctatttagggaccaaaggaccaaactttttattgcagatgtgtagctctatgtcaaatagagggggaatggaggaccccctccttcctgcctcatggctgttcttgaaacagcttagagcgattctatgaaaaaatgtaataaaaaattaaaaaaaaaacaaaaaacaaaaaaaacaacaaaaaaaggaaaaataacgcttcaatgcttttaaaacagcaagataatagttctttgatactttgagaggcgctttgatgaccctcatccaagtctatgacactttcctatggttttctgtattctatgtctggatggagctgttaaaagatgaacaaattggtggatatttggggaaagcaacacaaatcttaaaactcacccgtgaagtgtgagaaaacaaggaggggaacaaatgggacttaccaagcaaggtcattgttgtgaaaagtctgtaaatgcttctaactcttccccctcttaaaatcataatagttgtacagaattttaaaaaggaaaagtttaaaatacctatataatagaagaaaaattagaggaaagcaaaaaataaaaaaaaaaaaataaaaaaggaaaaaaaaaacctatagaagttagcattactgctaaaatcccagatgttgtaggactgtacttttgtagagtttagacagagcatcaatcccttctccccgcgagtgcagtcggatgccgttgtccccaagggccaggccgaactcgccccacacctgcgggcgcctggctgccgacgccggtggaggccacgccgtcggtcgggaacggtcgcgtcgcccgggtcgccgccgccgccgccgccgtcatcctcgcctctcgcttccctctgggagctgcgcgcgcttcactcaccttccgcttcactcgccttccacgcttgctccagagactttccgggcaagggagaactgggaactttcatcttaaaacaactagacaacacacacacacacaaaaccttaaaaaagagagagaaaaataaacaatctttgaagaatttctgaaactgtttacaaggaattttgaaaaacagggatgtttaaatgatgccggctctgtttttctgtaaataaatttgcatattttgtaggacttttaattgtaatgatagagaaaaaaacaaggaaaactatttaatgaaagcacgatatttat

SEQ ID NO: 284279 - DNA, 3147 bp, Homo sapiens
  misc_feature (19)..(19): n is a, c, g, or t
  misc_feature (21)..(21): n is a, c, g, or t
  misc_feature (23)..(24): n is a, c, g, or t
  misc_feature (26)..(26): n is a, c, g, or t
tacggtaggtagcgagcgngngnngnggagaaagagagagagcagagagcgagcggagagcgaggtgtagagaaaccgagggggagagaacccgagtgtgtgtatgcgtgtgcgtgtgtgagcgcgagcgagcgagcgagagagaggagcgagagagtgtgagcgagaaagaataaaaggaaagaagattttctctatgtatataaagatggccacgttagcaaacggacaggctgacaacgcaagcctcagtaccaacgggctcggcagcagcccgggcagtgccgggcacatgaacggattaagccacagcccggggaacccgtcgaccattcccatgaaggaccacgatgccatcaagctgttcattgggcagatcccccgcaacctggatgagaaggacctcaagcccctcttcgaggagtttggcaaaatctacgagcttacggttctgaaggacaggttcacaggcatgcacaaaggctgcgccttcctcacctactgcgagcgtgagtcagcgctgaaggcccagagcgcgctgcacgagcagaagactctgcccgggatgaaccggccgatccaggtgaagcctgcggacagcgagagccgaggaggtaagatagaaaactcttcgtgggcatgctcaacaagcaacagtccgaggacgacgtgcgccgccttttcgaggcctttgggaacatcgaggagtgcaccatcctgcgcgggcccgacggcaacagcaaggggtgcgcctttgtgaagtactcctcccacgccgaggcgcaggccgccatcaacgcgctacacggcagccagaccatgccgggagcctcgtccagtctggtggtcaagttcgccgacaccgacaaggagcgcacgatgcggcgaatgcagcagatggctggccagatgggcatgttcaaccccatggccatccctttcggggcctacggcgcctacgctcaggcactgatgcagcagcaagcggccctgatggcatcagtcgcgcagggcggctacctgaaccccatggctgccttcgctgccgcccagatgcagcagatggcggccctcaacatgaatggcctggcggccgcacctatgaccccaacctcaggtggcagcacccctccgggcatcactgcaccagccgtgcctagcatcccatcccccattggggtgaatggcttcaccggcctccccccacaggccaatgggcaacctgctgcggaagctgtgttcgccaatggcatccacccctacccagcacagagccccaccgccgcggaccccctgcagcaggcctacgccggagtgcagcagtatgcaggtcgcttcgtgagcttcgacaacccggccagcgcgcagaccgccatccaggccatgaacggcttccagatcggcatgaagaggctcaaggtgcagctgaagcggcccaaagacgccaatcgcccgtactgagcgccggcgggagcgtcccccgggggagaccaggactcgcacagggcaggatgctgaacgggctacattaaaaaacaaacctctctctatatatatttataaatgagaactgttggatgacacctttgacatatcagccaatatcaatcaagctgaagactccagacactgtctgtgtgactgtaacatttcttcaaggaaagtatagcgtctatggagttcagagggcacgtgtttgggggaaaatatatatgacatgaagaagaagatgaagaaaaatgagaaaaaaacacacaaaaggcaactttaaaacaaaatatcacgagcagacggggaggctgaagggctgggagctgggaggagacgctgcttaccgatcccggggcttttccagcccacgggcgcctgacgcaggctggggcaagtggtgcgtggggcctggtccccaaggggcggctgagaggccgccactgagcatctctatctgtcattcctttagctatttagggaccaaaggaccaaactttttattgcagatgtgtagctctatgtcaaatagagggggaatggaggaccccctccttcctgcctcatggctgttcttgaaacagcttagagcgattctatgaaaaaatgtaataaaaaattaaaaaaaaaacaaaaaacaaaaaaaacaacaaaaaaaggaaaaataacgcttcaatgcttttaaaacagcaagataatagttctttgatactttgagaggcgctttgatgaccctcatccaagtctatgacactttcctatggttttctgtattctatgtctggatggagctgttaaaagatgaacaaattggtggatatttggggaaagcaacacaaatcttaaaactcacccgtgaagtgtgagaaaacaaggaggggaacaaatgggacttaccaagcaaggtcattgttgtgaaaagtctgtaaatgcttctaactcttccccctcttaaaatcataatagttgtacagaattttaaaaaggaaaagtttaaaatacctatataatagaagaaaaattagaggaaagcaaaaaataaaaaaaaaaaaataaaaaaggaaaaaaaaaacctatagaagttagcattactgctaaaatcccagatgttgtaggactgtacttttgtagagtttagacagagcatcaatcccttctccccgcgagtgcagtcggatgccgttgtccccaagggccaggccgaactcgccccacacctgcgggcgcctggctgccgacgccggtggaggccacgccgtcggtcgggaacggtcgcgtcgcccgggtcgccgccgccgccgccgccgtcatcctcgcctctcgcttccctctgggagctgcgcgcgcttcactcaccttccgcttcactcgccttccacgcttgctccagagactttccgggcaagggagaactgggaactttcatcttaaaacaactagacaacacacacacacacaaaaccttaaaaaagagagagaaaaataaacaatctttgaagaatttctgaaactgtttacaaggaattttgaaaaacagggatgtttaaatgatgccggctctgtttttctgtaaataaatttgcatattttgtaggacttttaattgtaatgatagagaaaaaaacaaggaaaactatttaatgaaagcacgatatttat

SEQ ID NO: 284280 - DNA, 3375 bp, Homo sapiens
  misc_feature (19)..(19): n is a, c, g, or t
  misc_feature (21)..(21): n is a, c, g, or t
  misc_feature (23)..(24): n is a, c, g, or t
  misc_feature (26)..(26): n is a, c, g, or t
tacggtaggtagcgagcgngngnngnggagaaagagagagagcagagagcgagcggagagcgaggtgtagagaaaccgagggggagagaacccgagtgtgtgtatgcgtgtgcgtgtgtgagcgcgagcgagcgagcgagagagaggagcgagagagtgtgagcgagaaagaataaaaggaaagaagattttctctatgtatataaagatggccacgttagcaaacggacaggctgacaacgcaagcctcagtaccaacgggctcggcagcagcccgggcagtgccgggcacatgaacggattaagccacagcccggggaacccgtcgaccattcccatgaaggaccacgatgccatcaagctgttcattgggcagatcccccgcaacctggatgagaaggacctcaagcccctcttcgaggagtttggcaaaatctacgagcttacggttctgaaggacaggttcacaggcatgcacaaaggctgcgccttcctcacctactgcgagcgtgagtcagcgctgaaggcccagagcgcgctgcacgagcagaagactctgcccgggatgaaccggccgatccaggtgaagcctgcggacagcgagagccgaggaggtaagatagaaaactcttcgtgggcatgctcaacaagcaacagtccgaggacgacgtgcgccgccttttcgaggcctttgggaacatcgaggagtgcaccatcctgcgcgggcccgacggcaacagcaaggggtgcgcctttgtgaagtactcctcccacgccgaggcgcaggccgccatcaacgcgctacacggcagccagaccatgccgggagcctcgtccagtctggtggtcaagttcgccgacaccgacaaggagcgcacgatgcggcgaatgcagcagatggctggccagatgggcatgttcaaccccatggccatccctttcggggcctacggcgcctacgctcaggcactgatgcagcagcaagcggccctgatggcatcagtcgcgcagggcggctacctgaaccccatggctgccttcgctgccgcccagatgcagcagatggcggccctcaacatgaatggcctggcggccgcacctatgaccccaacctcaggtggcagcacccctccgggcatcactgcaccagccgtgcctagcatcccatcccccattggggtgaatggcttcaccggcctccccccacaggccaatgggcaacctgctgcggaagctgtgttcgccaatggcatccacccctacccagcacagagccccaccgccgcggaccccctgcagcaggcctacgccggagtgcagcagtatgcaggtccagctgcctaccctgctgcctatggtcagataagccaggcctttcctcagccgcctccaatgatcccccagcagcagagagaagggcccgagggctgtaacctgttcatctaccatctgccccaggagtttggggacgctgagctgatgcagatgttcctccctttcggtaatgtcatctcctcgaaagtgtttgtggatcgggcgactaaccaaagtaaatgctttggcttcgtgagcttcgacaacccggccagcgcgcagaccgccatccaggccatgaacggcttccagatcggcatgaagaggctcaaggtgcagctgaagcggcccaaagacgccaatcgcccgtactgagcgccggcgggagcgtcccccgggggagaccaggactcgcacagggcaggatgctgaacgggctacattaaaaaacaaacctctctctatatatatttataaatgagaactgttggatgacacctttgacatatcagccaatatcaatcaagctgaagactccagacactgtctgtgtgactgtaacatttcttcaaggaaagtatagcgtctatggagttcagagggcacgtgtttgggggaaaatatatatgacatgaagaagaagatgaagaaaaatgagaaaaaaacacacaaaaggcaactttaaaacaaaatatcacgagcagacggggaggctgaagggctgggagctgggaggagacgctgcttaccgatcccggggcttttccagcccacgggcgcctgacgcaggctggggcaagtggtgcgtggggcctggtccccaaggggcggctgagaggccgccactgagcatctctatctgtcattcctttagctatttagggaccaaaggaccaaactttttattgcagatgtgtagctctatgtcaaatagagggggaatggaggaccccctccttcctgcctcatggctgttcttgaaacagcttagagcgattctatgaaaaaatgtaataaaaaattaaaaaaaaaacaaaaaacaaaaaaaacaacaaaaaaaggaaaaataacgcttcaatgcttttaaaacagcaagataatagttctttgatactttgagaggcgctttgatgaccctcatccaagtctatgacactttcctatggttttctgtattctatgtctggatggagctgttaaaagatgaacaaattggtggatatttggggaaagcaacacaaatcttaaaactcacccgtgaagtgtgagaaaacaaggaggggaacaaatgggacttaccaagcaaggtcattgttgtgaaaagtctgtaaatgcttctaactcttccccctcttaaaatcataatagttgtacagaattttaaaaaggaaaagtttaaaatacctatataatagaagaaaaattagaggaaagcaaaaaataaaaaaaaaaaaataaaaaaggaaaaaaaaaacctatagaagttagcattactgctaaaatcccagatgttgtaggactgtacttttgtagagtttagacagagcatcaatcccttctccccgcgagtgcagtcggatgccgttgtccccaagggccaggccgaactcgccccacacctgcgggcgcctggctgccgacgccggtggaggccacgccgtcggtcgggaacggtcgcgtcgcccgggtcgccgccgccgccgccgccgtcatcctcgcctctcgcttccctctgggagctgcgcgcgcttcactcaccttccgcttcactcgccttccacgcttgctccagagactttccgggcaagggagaactgggaactttcatcttaaaacaactagacaacacacacacacacaaaaccttaaaaaagagagagaaaaataaacaatctttgaagaatttctgaaactgtttacaaggaattttgaaaaacagggatgtttaaatgatgccggctctgtttttctgtaaataaatttgcatattttgtaggacttttaattgtaatgatagagaaaaaaacaaggaaaactatttaatgaaagcacgatatttat

SEQ ID NO: 284281 - DNA, 2968 bp, Homo sapiens
ggggggaagatgcagggtggggagactccgcggagggagcaaaatagaaaagcaaagggaggtacgagaggcagacagccgggaacaccgagaggcagagaagctccgagaacagtgcacgggagagaaagagaggctgcgccttcctcacctactgcgagcgtgagtcagcgctgaaggcccagagcgcgctgcacgagcagaagactctgcccgggatgaaccggccgatccaggtgaagcctgcggacagcgagagccgaggaggtaagatagaaaactcttcgtgggcatgctcaacaagcaacagtccgaggacgacgtgcgccgccttttcgaggcctttgggaacatcgaggagtgcaccatcctgcgcgggcccgacggcaacagcaaggggtgcgcctttgtgaagtactcctcccacgccgaggcgcaggccgccatcaacgcgctacacggcagccagaccatgccgggagcctcgtccagtctggtggtcaagttcgccgacaccgacaaggagcgcacgatgcggcgaatgcagcagatggctggccagatgggcatgttcaaccccatggccatccctttcggggcctacggcgcctacgctcaggcactgatgcagcagcaagcggccctgatggcatcagtcgcgcagggcggctacctgaaccccatggctgccttcgctgccgcccagatgcagcagatggcggccctcaacatgaatggcctggcggccgcacctatgaccccaacctcaggtggcagcacccctccgggcatcactgcaccagccgtgcctagcatcccatcccccattggggtgaatggcttcaccggcctccccccacaggccaatgggcaacctgctgcggaagctgtgttcgccaatggcatccacccctacccagcacagagccccaccgccgcggaccccctgcagcaggcctacgccggagtgcagcagtatgcaggtccagctgcctaccctgctgcctatggtcagataagccaggcctttcctcagccgcctccaatgatcccccagcagcagagagaagggcccgagggctgtaacctgttcatctaccatctgccccaggagtttggggacgctgagctgatgcagatgttcctccctttcggcttcgtgagcttcgacaacccggccagcgcgcagaccgccatccaggccatgaacggcttccagatcggcatgaagaggctcaaggtgcagctgaagcggcccaaagacgccaatcgcccgtactgagcgccggcgggagcgtcccccgggggagaccaggactcgcacagggcaggatgctgaacgggctacattaaaaaacaaacctctctctatatatatttataaatgagaactgttggatgacacctttgacatatcagccaatatcaatcaagctgaagactccagacactgtctgtgtgactgtaacatttcttcaaggaaagtatagcgtctatggagttcagagggcacgtgtttgggggaaaatatatatgacatgaagaagaagatgaagaaaaatgagaaaaaaacacacaaaaggcaactttaaaacaaaatatcacgagcagacggggaggctgaagggctgggagctgggaggagacgctgcttaccgatcccggggcttttccagcccacgggcgcctgacgcaggctggggcaagtggtgcgtggggcctggtccccaaggggcggctgagaggccgccactgagcatctctatctgtcattcctttagctatttagggaccaaaggaccaaactttttattgcagatgtgtagctctatgtcaaatagagggggaatggaggaccccctccttcctgcctcatggctgttcttgaaacagcttagagcgattctatgaaaaaatgtaataaaaaattaaaaaaaaaacaaaaaacaaaaaaaacaacaaaaaaaggaaaaataacgcttcaatgcttttaaaacagcaagataatagttctttgatactttgagaggcgctttgatgaccctcatccaagtctatgacactttcctatggttttctgtattctatgtctggatggagctgttaaaagatgaacaaattggtggatatttggggaaagcaacacaaatcttaaaactcacccgtgaagtgtgagaaaacaaggaggggaacaaatgggacttaccaagcaaggtcattgttgtgaaaagtctgtaaatgcttctaactcttccccctcttaaaatcataatagttgtacagaattttaaaaaggaaaagtttaaaatacctatataatagaagaaaaattagaggaaagcaaaaaataaaaaaaaaaaaataaaaaaggaaaaaaaaaacctatagaagttagcattactgctaaaatcccagatgttgtaggactgtacttttgtagagtttagacagagcatcaatcccttctccccgcgagtgcagtcggatgccgttgtccccaagggccaggccgaactcgccccacacctgcgggcgcctggctgccgacgccggtggaggccacgccgtcggtcgggaacggtcgcgtcgcccgggtcgccgccgccgccgccgccgtcatcctcgcctctcgcttccctctgggagctgcgcgcgcttcactcaccttccgcttcactcgccttccacgcttgctccagagactttccgggcaagggagaactgggaactttcatcttaaaacaactagacaacacacacacacacaaaaccttaaaaaagagagagaaaaataaacaatctttgaagaatttctgaaactgtttacaaggaattttgaaaaacagggatgtttaaatgatgccggctctgtttttctgtaaataaatttgcatattttgtaggacttttaattgtaatgatagagaaaaaaacaaggaaaactatttaatgaaagcacgatatttat

SEQ ID NO: 284282 - DNA, 2879 bp, Homo sapiens
actcctaccggccagaaagacagcccatggtcaagtgtggctagaggctgcgccttcctcacctactgcgagcgtgagtcagcgctgaaggcccagagcgcgctgcacgagcagaagactctgcccgggatgaaccggccgatccaggtgaagcctgcggacagcgagagccgaggaggtaagatagaaaactcttcgtgggcatgctcaacaagcaacagtccgaggacgacgtgcgccgccttttcgaggcctttgggaacatcgaggagtgcaccatcctgcgcgggcccgacggcaacagcaaggggtgcgcctttgtgaagtactcctcccacgccgaggcgcaggccgccatcaacgcgctacacggcagccagaccatgccgggagcctcgtccagtctggtggtcaagttcgccgacaccgacaaggagcgcacgatgcggcgaatgcagcagatggctggccagatgggcatgttcaaccccatggccatccctttcggggcctacggcgcctacgctcaggcactgatgcagcagcaagcggccctgatggcatcagtcgcgcagggcggctacctgaaccccatggctgccttcgctgccgcccagatgcagcagatggcggccctcaacatgaatggcctggcggccgcacctatgaccccaacctcaggtggcagcacccctccgggcatcactgcaccagccgtgcctagcatcccatcccccattggggtgaatggcttcaccggcctccccccacaggccaatgggcaacctgctgcggaagctgtgttcgccaatggcatccacccctacccagcacagagccccaccgccgcggaccccctgcagcaggcctacgccggagtgcagcagtatgcaggtccagctgcctaccctgctgcctatggtcagataagccaggcctttcctcagccgcctccaatgatcccccagcagcagagagaagggcccgagggctgtaacctgttcatctaccatctgccccaggagtttggggacgctgagctgatgcagatgttcctccctttcggcttcgtgagcttcgacaacccggccagcgcgcagaccgccatccaggccatgaacggcttccagatcggcatgaagaggctcaaggtgcagctgaagcggcccaaagacgccaatcgcccgtactgagcgccggcgggagcgtcccccgggggagaccaggactcgcacagggcaggatgctgaacgggctacattaaaaaacaaacctctctctatatatatttataaatgagaactgttggatgacacctttgacatatcagccaatatcaatcaagctgaagactccagacactgtctgtgtgactgtaacatttcttcaaggaaagtatagcgtctatggagttcagagggcacgtgtttgggggaaaatatatatgacatgaagaagaagatgaagaaaaatgagaaaaaaacacacaaaaggcaactttaaaacaaaatatcacgagcagacggggaggctgaagggctgggagctgggaggagacgctgcttaccgatcccggggcttttccagcccacgggcgcctgacgcaggctggggcaagtggtgcgtggggcctggtccccaaggggcggctgagaggccgccactgagcatctctatctgtcattcctttagctatttagggaccaaaggaccaaactttttattgcagatgtgtagctctatgtcaaatagagggggaatggaggaccccctccttcctgcctcatggctgttcttgaaacagcttagagcgattctatgaaaaaatgtaataaaaaattaaaaaaaaaacaaaaaacaaaaaaaacaacaaaaaaaggaaaaataacgcttcaatgcttttaaaacagcaagataatagttctttgatactttgagaggcgctttgatgaccctcatccaagtctatgacactttcctatggttttctgtattctatgtctggatggagctgttaaaagatgaacaaattggtggatatttggggaaagcaacacaaatcttaaaactcacccgtgaagtgtgagaaaacaaggaggggaacaaatgggacttaccaagcaaggtcattgttgtgaaaagtctgtaaatgcttctaactcttccccctcttaaaatcataatagttgtacagaattttaaaaaggaaaagtttaaaatacctatataatagaagaaaaattagaggaaagcaaaaaataaaaaaaaaaaaataaaaaaggaaaaaaaaaacctatagaagttagcattactgctaaaatcccagatgttgtaggactgtacttttgtagagtttagacagagcatcaatcccttctccccgcgagtgcagtcggatgccgttgtccccaagggccaggccgaactcgccccacacctgcgggcgcctggctgccgacgccggtggaggccacgccgtcggtcgggaacggtcgcgtcgcccgggtcgccgccgccgccgccgccgtcatcctcgcctctcgcttccctctgggagctgcgcgcgcttcactcaccttccgcttcactcgccttccacgcttgctccagagactttccgggcaagggagaactgggaactttcatcttaaaacaactagacaacacacacacacacaaaaccttaaaaaagagagagaaaaataaacaatctttgaagaatttctgaaactgtttacaaggaattttgaaaaacagggatgtttaaatgatgccggctctgtttttctgtaaataaatttgcatattttgtaggacttttaattgtaatgatagagaaaaaaacaaggaaaactatttaatgaaagcacgatatttat

SEQ ID NO: 284283 - DNA, 1971 bp, Homo sapiens
tggtctggtgctgtataaatatattttctttttaattttgttttaacttcttccttgccctccttcacccaaatcccagccctccctgccctcccacactccccaaccccacctgccctgccccacctcttccttcccccacccacactctcttgtcctctctctctctctctctacatatataaatatatatataaatcttttcttcttttgtcattcaatcaaattccaacaacccaaccagggccagtcaaatccaccacagtctcgcgctgagctaggaataaagttcacgtaatcacatgagagtggagaaaagtcccccatccggcaggatgctgaacgggctacattaaaaaacaaacctctctctatatatatttataaatgagaactgttggatgacacctttgacatatcagccaatatcaatcaagctgaagactccagacactgtctgtgtgactgtaacatttcttcaaggaaagtatagcgtctatggagttcagagggcacgtgtttgggggaaaatatatatgacatgaagaagaagatgaagaaaaatgagaaaaaaacacacaaaaggcaactttaaaacaaaatatcacgagcagacggggaggctgaagggctgggagctgggaggagacgctgcttaccgatcccggggcttttccagcccacgggcgcctgacgcaggctggggcaagtggtgcgtggggcctggtccccaaggggcggctgagaggccgccactgagcatctctatctgtcattcctttagctatttagggaccaaaggaccaaactttttattgcagatgtgtagctctatgtcaaatagagggggaatggaggaccccctccttcctgcctcatggctgttcttgaaacagcttagagcgattctatgaaaaaatgtaataaaaaattaaaaaaaaaacaaaaaacaaaaaaaacaacaaaaaaaggaaaaataacgcttcaatgcttttaaaacagcaagataatagttctttgatactttgagaggcgctttgatgaccctcatccaagtctatgacactttcctatggttttctgtattctatgtctggatggagctgttaaaagatgaacaaattggtggatatttggggaaagcaacacaaatcttaaaactcacccgtgaagtgtgagaaaacaaggaggggaacaaatgggacttaccaagcaaggtcattgttgtgaaaagtctgtaaatgcttctaactcttccccctcttaaaatcataatagttgtacagaattttaaaaaggaaaagtttaaaatacctatataatagaagaaaaattagaggaaagcaaaaaataaaaaaaaaaaaataaaaaaggaaaaaaaaaacctatagaagttagcattactgctaaaatcccagatgttgtaggactgtacttttgtagagtttagacagagcatcaatcccttctccccgcgagtgcagtcggatgccgttgtccccaagggccaggccgaactcgccccacacctgcgggcgcctggctgccgacgccggtggaggccacgccgtcggtcgggaacggtcgcgtcgcccgggtcgccgccgccgccgccgccgtcatcctcgcctctcgcttccctctgggagctgcgcgcgcttcactcaccttccgcttcactcgccttccacgcttgctccagagactttccgggcaagggagaactgggaactttcatcttaaaacaactagacaacacacacacacacaaaaccttaaaaaagagagagaaaaataaacaatctttgaagaatttctgaaactgtttacaaggaattttgaaaaacagggatgtttaaatgatgccggctctgtttttctgtaaataaatttgcatattttgtaggacttttaattgtaatgatagagaaaaaaacaaggaaaactatttaatgaaagcacgatatttat

SEQ ID NO: 284284 - DNA, 535 bp, Homo sapiens
gcggccgcacctatgaccccaacctcaggtgagctggcaggtgccaacacgcggtctggcccggtgggagaacagctggccccaggctgggacctaatttcagctaccagcggaccattctgtggcaaaagcacatagtgtctgggcccgagaggacttgccttctggcagtttgtctcaaaaatgttctaatccatggggatccaagggaagatgagatatgggacccatgcagtctaccgtgtgatttcagggtggggtggatttctctcaagctgtttaaccttatcaggaaacaatgtatcttgatgtttaccaacaagagacctggaaagaaattgacatgaagacatctccctgtggtgtctatgatgagaagagccttggccattctgtggccttgttcagcccctggcccaagcacagaaggaacccatttgggtgtcgtcttttttttttttttttttttttcatttccctttaacccaatctagactcactggctttttctaagacaactatgcaacaagctaga

SEQ ID NO: 284285 - DNA, 5857 bp, Homo sapiens
cataatcaacctgaaagaagaaaataaatactgtatacttttaaattttatcgattcttaaaaactggacactcaaagctgcgcaaaccatgcaggatgatttactgatggacaaaagcaaaacccagccccagccccagcagcagcagcggcagcagcagcagccccaacctgagtccagcgtatccgaagccccgtccacgcccctctcctcagagacccccaagccggaggaaaacagcgcagtgccggccctcagcccagccgctgcccccccggcccccaacggcccggacaagatgcagatggaatcaccgctcctgccaggcttgagtttccatcagcctcctcagcagccgccgccgcctcaggagcccgcggcaccgggcgcgtcgctgtcgccgtccttcggcagcacctggtccacgggcaccaccaacgcggtagaggacagcttcttccaggggatcaccccagtcaacgggaccatgctcttccagaacttcccgcaccatgtcaacccagtcttcggaggcactttctccccgcagatcggcctggcgcagacccagcaccaccagcagccgccgccgcctgcgcccgcgccgcagccggcacagccagcgcagccaccacaggcgcagcccccgcagcagcgccgctcacccgccagccccagccaggcgccctacgcgcagaggagcgccgccgcggcgtacggccaccagcccatcatgaccagcaagccgtcctcgtcttcggcggttgcagccgctgctgccgcagccgccgcctcgtcggcctcgtccagctggaacacgcaccaaagcgtgaatgcagcctggagcgcaccgtccaacccctggggcggcctgcaggcgggccgggaccctcgccgggcggtcggtgtgggcgtgggtgtgggtgtcggggtgccttccccgctcaaccccatctcgccgctcaaaaagcccttctccagcaacgtgatcgcgccgcccaagttccctcgcgcggcccctctcacttccaagtcctggatggaggataacgctttccggaccgataatggtaacaatctgttgccatttcaggaccggagtaggccctatgatacttttaacttgcactcgttggagaactccttaatggatatgataaggactgatcatgaacctctgaaaggacgcatggggataaatttccatcatccaggaacagataatattatggcacttaacagtcgatcttctctctttccctttgaagatgccttcctggatgatagccatggtgatcaagccttgtcatctggcttaagttctcccactcgctgtcaaaatggggaacgagtagaacgctactctagaaaggtgtttgttggaggacttcctcctgatattgatgaagatgagatcactgccagctttcgcaggtttggacctctcgtagtagactggcctcacaaagctgaaagcaagtcttattttcctcctaaaggctatgcctttctgctgttccaagaggaaagctcagtacaagctttgatagatgcctgcctagaagaagatgggaaactctacctgtgtgtgtcaagccccaccatcaaggacaagccagtgcaaattcgaccatggaacctaagtgacagtgactttgtaatggatggttctcagcctttggaccccagaaaaactatctttgttgggggagttccacgaccccttcgagctgttgaactggcaatgatcatggaccgtttgtacggtggtgtctgctatgctggcattgatacggacccagagctgaagtaccccaaaggtgctggccgcgtggcattctccaatcagcagagttacattgcagccatcagcgctcgttttgtgcagcttcagcacaatgacattgacaaacgggttgaagtaaagccatatgtgctggatgatcagatgtgtgatgagtgccagggcacacgctgtggtgggaagtttgccccgttcttctgtgccaacgtcacctgtctgcagtattactgtgaatactgctgggcgagcatacattcccgagccgggcgggagttccacaaaccgctggtgaaggagggaggcgaccgccctcgtcacgtcccgttccgctggagctgagccacgggccgacccagccacaagtactggagtagataacaaggagggaaaagagagggcactgcctcagggcttacagtgttctggaaatctgtgcattcgttctcgatttttaaagaagaattgggtctttttattattattattattatttacagtcatattactgaactcagtgtccagtataatgcagaattgcagagtgtagaatggtactgatttgcactttgattcacacctttgtctgcttggtaccttaattttttatacctgatttgtcactcgtgacagtatgtagactgccattctcatcagcggccgtcaggctactgtctgtgattcttttgtttgttgttgtggtgttgttctgattgttttgaactggagcatgcacttattttcagaaacttagagagttgcccctaggacaagacttaccaaaggtaatactcgtgagtaggtggcagatgtagcaaaaacttcacaacaattcagcaatcattagctcgggtcacttagagtaaggataacccttcatgaaaataagcctttagttgctctctattttgacttgtaaggatacctcataagctggatcttttatttttccttcatgtttgatttttgttttgccgaggattttggttagatcttttagtattatgtaaatttatgctgcaatagcttttgctgctattaaaatggtattattaataccataatactctattcaggctaggatatcaattaaacacaaaaacccaacaacacacttttgtgattttagggatagagtcagctgccgaacggagatcagaatagacttcagaaagcttcggtggaaggtcactatttctgactgcatgtttacttaatcaggttgctgcatgcaataaattttatatccaatgtctagtataaaacgttcccacaatgcacaaattaagaatctatataagctataaaaatactcattttttaaaaaaagtttttttcattcaaagaattggtaattgaccggaggaaggcatgcctcaataaatggaatgctctgaatgggaagagcccataacagaatgacctatattacaaccgatataaaacctaggtgtaggatattcttcaagcaaatttgtggatggtagatgaagtactttgcggtgctctgttatatattgtgaaatttattttatatagtaaagtgattatgtctaactgtgatcaaacttaactgtttaaagcctctgtcagacattaatgaacttgacagttcataactgatatattataaactaacacatgagctcttagttacaatctcttagtgcttgcaccattttacatagcttcagaccttgtccagaaaaccaaagagctcatcttagcttacaaacactaagaatatatacaggatatagagataagttgtcagattgacaaactaggcacatttttaagaaagttgtgtaatggtgatgctaaagaaatgtctgtacaaaataagatggcctgggcagagttggttgtctgagtgagaaactaactacttaattccctggatttatcctgttaagcttgagtagaatgaaggcctgctagcactagcgtggtctagaatgaaggcctgctagcactagcgtggacatttttctagcattcacccttgggctgcagatagtaatatataaacacacacaatgattgcaagactatgtaaatctttttttaatcttcttcctatgttttggaattctggggacaatctgactggatatgacactgcagaatagatttaagtcgctgtgttttctgtgctgtgatgtccttgtactgtcttaagttagtgttgcttgtttttgttttgttctcccatgtttagttgcaattactggctctcaagctatagtttgttttcaaaaaggaaaaacaaaatagttttttactggattaaaaatgcttattttagaatcctcccctttttgaggctttttggtaataattgcttttttccagcccaggtgtggttttgtttgtttttttctatgtttgtgggttttttttcatctgtacaagaaattttgttatgcactactactttttgtattctagacagttttcaaaagttggcagattttttttttttgtttttaaggaaaaaggcatgctttctgactgacatgatcttttgcaatacctcaattttgaaatataggaaagaaaatgatattttctaagtaagtttattcagaaaaatatatattaatttaattctgcaagaaaatgatttaacagatgggtaactttatttttttcatgcttatttgtgttttttgaaaatgaagaagttagagctttataactataatattaaagatcatatctaacctacagaaatctacctaattatgtgaaagaagcaaaactttttgaagaagcacccctctttcatgtattaaaataacactgagatttttttaaaagctggaagattgtacagcataaagctaaagtgaaggcaaaaaacattgtcctgaagaataggttacaaaaaataaactccatttggtgctgaaagttgtgaatagatggtggaaactactttcccttaatttgtatatttctaatcaagtgttgattgtgcgcgactgaccaggattgtgaaagagttcttctgtttgtatttttttaaagagaacttttttagtttattaaattataacatgttcccttttgttttgtaaataaatgtgcccccaagttgttaatgttatattaaaagagagggtccttcaaaaaaattattttttaaaacacagaggtgttctgacctgcaacttgactgggaagcccctgggtaacacaggtcctgctgtggcctttccttggtgtgacacttgaactagtcgattttttgaaggctataacctaacctcgactatttgttgttatgtgcaatactgtttgtactgtttgtataaaaaatagaaaaaaaaaagaaaagaaaaaaggcataaatctttattgcagatttattttcattgcaaactttagacattgtgattcactgaaatcatttttctactgtcaaatatgtaccttttcttcatgctggtattttttcaatagtaatgtagcctttgtactgagacaaattttcattgttatttttagaaagattttttgctaagaaaaaaattaaacatatttacatatttttcattttatttcgtattttctttaaggagtgctttctcaatcattaatagagttgtttctgggagggactttcatatctggtcaatgtcataatattattttgtatttttattggaataaattaattttatgatgctaattctttaaaagtttatttttttcattttcagttatttttgaagctaaaacctttgtaatattgttactaaagtgtctagttttttgaaatgcaaagctttatgtattaacttgctgatgtggtttacaatagtgtgacaacgatgaaaatgcttggttatgtaaagtgattggaaatgtaatggataattgggtaataaaatgacagatgagcagaacatgtgagattttgagaagccttttcctttatcacagtggtttagtgtaagactagggatgtcacagtgcagttctctagggatgtcacggtggatttatacaacaccaggtgcagccaaacctgtggccctgagaatgaa

SEQ ID NO: 284286 - DNA, 432 bp, Homo sapiens
atgtagtcttcggaccggtctccactagaggctgcacagcccgcccggaccaacgcctccgcgcctgccgccgtctggccggcgccctcccgtttccttcctccagggggaaaaaatgtctttcgggccgctttccaggaagcagcaggatgcgccgctccactgtcggtagcaacaagcttgcttgtaagaggaagagaaaaagaccactcaggaatagaagggaacttcctcaacttgataaagtgcatctacaaaaaaatctgtagccaacatcttgcctgatggtgaaagactgaatgctttccccctatgatcaggaacaaggcaagaatatgtcctcttacatcctctattcaacgttgtactggaggttctagccaggtcaattagtcaagaaaaagaaataaaaggcagccatattggaaagga

SEQ ID NO: 284287 - DNA, 5904 bp, Homo sapiens
atgtagtcttcggaccggtctccactagaggctgcacagcccgcccggaccaacgcctccgcgcctgccgccgtctggccggcgccctcccgtttccttcctccagggggaaaaaatgtctttcgggccgctttccaggaagcagcaggatgcgccgctccactgtcggtagcaacaagctgcgcaaaccatgcaggatgatttactgatggacaaaagcaaaacccagccccagccccagcagcagcagcggcagcagcagcagccccaacctgagtccagcgtatccgaagccccgtccacgcccctctcctcagagacccccaagccggaggaaaacagcgcagtgccggccctcagcccagccgctgcccccccggcccccaacggcccggacaagatgcagatggaatcaccgctcctgccaggcttgagtttccatcagcctcctcagcagccgccgccgcctcaggagcccgcggcaccgggcgcgtcgctgtcgccgtccttcggcagcacctggtccacgggcaccaccaacgcggtagaggacagcttcttccaggggatcaccccagtcaacgggaccatgctcttccagaacttcccgcaccatgtcaacccagtcttcggaggcactttctccccgcagatcggcctggcgcagacccagcaccaccagcagccgccgccgcctgcgcccgcgccgcagccggcacagccagcgcagccaccacaggcgcagcccccgcagcagcgccgctcacccgccagccccagccaggcgccctacgcgcagaggagcgccgccgcggcgtacggccaccagcccatcatgaccagcaagccgtcctcgtcttcggcggttgcagccgctgctgccgcagccgccgcctcgtcggcctcgtccagctggaacacgcaccaaagcgtgaatgcagcctggagcgcaccgtccaacccctggggcggcctgcaggcgggccgggaccctcgccgggcggtcggtgtgggcgtgggtgtgggtgtcggggtgccttccccgctcaaccccatctcgccgctcaaaaagcccttctccagcaacgtgatcgcgccgcccaagttccctcgcgcggcccctctcacttccaagtcctggatggaggataacgctttccggaccgataatggtaacaatctgttgccatttcaggaccggagtaggccctatgatacttttaacttgcactcgttggagaactccttaatggatatgataaggactgatcatgaacctctgaaaggacgcatggggataaatttccatcatccaggaacagataatattatggcacttaacagtcgatcttctctctttccctttgaagatgccttcctggatgatagccatggtgatcaagccttgtcatctggcttaagttctcccactcgctgtcaaaatggggaacgagtagaacgctactctagaaaggtgtttgttggaggacttcctcctgatattgatgaagatgagatcactgccagctttcgcaggtttggacctctcgtagtagactggcctcacaaagctgaaagcaagtcttattttcctcctaaaggctatgcctttctgctgttccaagaggaaagctcagtacaagctttgatagatgcctgcctagaagaagatgggaaactctacctgtgtgtgtcaagccccaccatcaaggacaagccagtgcaaattcgaccatggaacctaagtgacagtgactttgtaatggatggttctcagcctttggaccccagaaaaactatctttgttgggggagttccacgaccccttcgagctgttgaactggcaatgatcatggaccgtttgtacggtggtgtctgctatgctggcattgatacggacccagagctgaagtaccccaaaggtgctggccgcgtggcattctccaatcagcagagttacattgcagccatcagcgctcgttttgtgcagcttcagcacaatgacattgacaaacgggttgaagtaaagccatatgtgctggatgatcagatgtgtgatgagtgccagggcacacgctgtggtgggaagtttgccccgttcttctgtgccaacgtcacctgtctgcagtattactgtgaatactgctgggcgagcatacattcccgagccgggcgggagttccacaaaccgctggtgaaggagggaggcgaccgccctcgtcacgtcccgttccgctggagctgagccacgggccgacccagccacaagtactggagtagataacaaggagggaaaagagagggcactgcctcagggcttacagtgttctggaaatctgtgcattcgttctcgatttttaaagaagaattgggtctttttattattattattattatttacagtcatattactgaactcagtgtccagtataatgcagaattgcagagtgtagaatggtactgatttgcactttgattcacacctttgtctgcttggtaccttaattttttatacctgatttgtcactcgtgacagtatgtagactgccattctcatcagcggccgtcaggctactgtctgtgattcttttgtttgttgttgtggtgttgttctgattgttttgaactggagcatgcacttattttcagaaacttagagagttgcccctaggacaagacttaccaaaggtaatactcgtgagtaggtggcagatgtagcaaaaacttcacaacaattcagcaatcattagctcgggtcacttagagtaaggataacccttcatgaaaataagcctttagttgctctctattttgacttgtaaggatacctcataagctggatcttttatttttccttcatgtttgatttttgttttgccgaggattttggttagatcttttagtattatgtaaatttatgctgcaatagcttttgctgctattaaaatggtattattaataccataatactctattcaggctaggatatcaattaaacacaaaatcagaatagacttcagaaagcttcggtggaaggtcactatttctgactgcatgtttacttaatcaggttgctgcatgcaataaattttatatccaatgtctagtataaaacgttcccacaatgcacaaattaagaatctatataagctataaaaatactcattttttaaaaaaagtttttttcattcaaagaattggtaattgaccggaggaaggcatgcctcaataaatggaatgctctgaatgggaagagcccataacagaatgacctatattacaaccgatataaaacctaggtgtaggatattcttcaagcaaatttgtggatggtagatgaagtactttgcggtgctctgttatatattgtgaaatttattttatatagtaaagtgattatgtctaactgtgatcaaacttaactgtttaaagcctctgtcagacattaatgaacttgacagttcataactgatatattataaactaacacatgagctcttagttacaatctcttagtgcttgcaccattttacatagcttcagaccttgtccagaaaaccaaagagctcatcttagcttacaaacactaagaatatatacaggatatagagataagttgtcagattgacaaactaggcacatttttaagaaagttgtgtaatggtgatgctaaagaaatgtctgtacaaaataagatggcctgggcagagttggttgtctgagtgagaaactaactacttaattccctggatttatcctgttaagcttgagtagaatgaaggcctgctagcactagcgtggtctagaatgaaggcctgctagcactagcgtggacatttttctagcattcacccttgggctgcagatagtaatatataaacacacacaatgattgcaagactatgtaaatctttttttaatcttcttcctatgttttggaattctggggacaatctgactggatatgacactgcagaatagatttaagtcgctgtgttttctgtgctgtgatgtccttgtactgtcttaagttagtgttgcttgtttttgttttgttctcccatgtttagttgcaattactggctctcaagctatagtttgttttcaaaaaggaaaaacaaaatagttttttactggattaaaaatgcttattttagaatcctcccctttttgaggctttttggtaataattgcttttttccagcccaggtgtggttttgtttgtttttttctatgtttgtgggttttttttcatctgtacaagaaattttgttatgcactactactttttgtattctagacagttttcaaaagttggcagattttttttttttgtttttaaggaaaaaggcatgctttctgactgacatgatcttttgcaatacctcaattttgaaatataggaaagaaaatgatattttctaagtaagtttattcagaaaaatatatattaatttaattctgcaagaaaatgatttaacagatgggtaactttatttttttcatgcttatttgtgttttttgaaaatgaagaagttagagctttataactataatattaaagatcatatctaacctacagaaatctacctaattatgtgaaagaagcaaaactttttgaagaagcacccctctttcatgtattaaaataacactgagatttttttaaaagctggaagattgtacagcataaagctaaagtgaaggcaaaaaacattgtcctgaagaataggttacaaaaaataaactccatttggtgctgaaagttgtgaatagatggtggaaactactttcccttaatttgtatatttctaatcaagtgttgattgtgcgcgactgaccaggattgtgaaagagttcttctgtttgtatttttttaaagagaacttttttagtttattaaattataacatgttcccttttgttttgtaaataaatgtgcccccaagttgttaatgttatattaaaagagagggtccttcaaaaaaattattttttaaaacacagaggtgttctgacctgcaacttgactgggaagcccctgggtaacacaggtcctgctgtggcctttccttggtgtgacacttgaactagtcgattttttgaaggctataacctaacctcgactatttgttgttatgtgcaatactgtttgtactgtttgtataaaaaatagaaaaaaaaaagaaaagaaaaaaggcataaatctttattgcagatttattttcattgcaaactttagacattgtgattcactgaaatcatttttctactgtcaaatatgtaccttttcttcatgctggtattttttcaatagtaatgtagcctttgtactgagacaaattttcattgttatttttagaaagattttttgctaagaaaaaaattaaacatatttacatatttttcattttatttcgtattttctttaaggagtgctttctcaatcattaatagagttgtttctgggagggactttcatatctggtcaatgtcataatattattttgtatttttattggaataaattaattttatgatgctaattctttaaaagtttatttttttcattttcagttatttttgaagctaaaacctttgtaatattgttactaaagtgtctagttttttgaaatgcaaagctttatgtattaacttgctgatgtggtttacaatagtgtgacaacgatgaaaatgcttggttatgtaaagtgattggaaatgtaatggataattgggtaataaaatgacagatgagcagaacatgtgagattttgagaagccttttcctttatcacagtggtttagtgtaagactagggatgtcacagtgcagttctctagggatgtcacggtggatttatacaacaccaggtgcagccaaacctgtggccctgagaatgaa

SEQ ID NO: 284288 - DNA, 396 bp, Homo sapiens
aacttgcactcgttggagaactccttaatggatatgataaggactgatcatgaacctctgaaaggtaaacactaccctcccagtggcccaccaatgagtttcgctgatataatgtggaggaatcattttgcaggttaggaatattcatatgtccatttcttgcttggtgttttaagcaaaaatcagctttttaataattttgatttttctggtttgttttttgtttgcttgtttttgttttgcttctgtaaagcattgtggaatgtatttaaagttgattttttttaacctgggttcagctacctataataatcaaggtggattgttatcagtcatgtctggcaggagcatgaattgggtagctgaggttagtcacattatgagttaatagcgtga

SEQ ID NO: 284289 - DNA, 498 bp, Homo sapiens
gaaaaacacagactgcagccattgtgagttacccagaactcaaacaaataggaatataatttactgaaaaataagaaaaatcaagcaacattttgggaacgtgtcagaaagcaagtattaaacattttgggccctgaagcaaaagccagggtgttcactgatctgttatttccaattgcagcttgcttgtaagaggaagagaaaaagaccactcaggaatagaagggaacttcctcaacttgataaagtgcatctacaaaaaaatctgtagccaacatcttgcctgatggtgaaagactgaatgctttccccctatgatcaggaacaaggcaagaatatgtcctcttacatcctctattcaacgttgtactggaggttctagccaggtcaattagtcaagaaaaagaaataaaaggcagccatattggaaaggaagaaataaaactatctctatttgtagatgaaatgatcttgtatttagaaaattccaagaataaa

SEQ ID NO: 284290 - DNA, 701 bp, Homo sapiens
ttttgaggttaatgtgctaagaggatatgagattgaagctgctggcacccagctctccctgccacagggcagagaatggggccaaggcataaagagaagcagagctctgagaaatggaatgagagagacctgatgacattgtttgagcccctgagatgagccttgcctgaggggttccccagccctggatctggcctgctccgccttgcgaaggccccacagcttgcttacctcagcaattcacagcggaagtgtgacaaacgttcataggcaaatgtcaggtcagatgtcaacttgttgctccacagcctttcggcaacagcccctgctctgggcctggaggaaaaggggcatgtgccagattgggccctgtattccctgcaaaggtgctggacatccacaggctgctacctcttgtctaggcaccctggactcactcaggccaaaggaagtgatcaataccttgttatgagccacagccaggttggatggctcccagagagttctacggctcagctccaccttcattaaaatgtgggtagcaatcccactctcttcctctctcaaagatatgggaataagaataaaccttaaagccatcattaaccacaatgacagtggcagcagcagaggtccttaaaatgtaaactttgcacacccaaccatacttggtaaggctgcagtgaaaacagcagagggaa

SEQ ID NO: 284291 - DNA, 2145 bp, Homo sapiens
cgcggcgcatgttcggcgtgtcggtcttcaggcgcctgatgagttcatagttgggcggtggtgtcagcggtttcgctggcgttcgtgggcctcccccggacccacacacggaaacacgcaaccattcggggatccagacgcccgtttacacgcaccacccctgggcgggctgtgcggctcaggccctcccccgggaccggcccgtgtcccgccccgtgtcccgccccgtatttgtgcggcgccagctggccccgcagcctgcggcgcagagaggctgggcttgcaggcgcagtagctccagaggtcgcgctgggctgagagtgcgggccggcagaggctggcggggagcagccggggttatgctgggcaaggattacatgctggccatcattctggtcaactgcgatgatgacttgtggggggaccacagtctggaggtggaggctggcctgcctcctggctggaggaagatccacgatgctgcaggtacttactactggcatgtacccagcggtagcacccagtggcagcgcccaacctgggaactaggagatgcagaggacccaggcacgggaacggaggggatctggggactgcggccccccaaagggagatccttctccagcctggagagttcactggaccggagtaactctctgtcctggtatggtggggaatcctacatccagagcatggagccaggggctaagtgctttgcagtccgctctctgggctgggtagaggtacctgaagaggacctggcaccggggaagagcagtattgcagtcaataactgtatccagcagctggcccagacccgcagccggagccagcctccagatggtgcctggggtgagggccagaacatgctgatgatcctgaagaaggatgccatgagcctagtgaatcccctggaccacagtctgatccactgccagcctctggtgcacatccgtgtgtggggcgtggggagctccaagggccgtacgggacttcgcttttgtggcaagtgacaaagatagctgtatgctcaagtgccatgtgtttcgctgtgatgtccctgccaaggccattgccagtgccctacatgggctttgtgcccagatcttgtcagagcgagtagaggtcagtggtgatgcctcttgctgctccccagaccccatctctcctgaagacctgccacggcaagtggagctgctggatgcggtaagccaagctgctcagaagtacgaggcactgtatatggggacactgccagtcaccaaggccatgggcatggatgtgctgaacgaggccattggtaccctcaccgccaggggggaccggaatgcctgggtccccaccatgctcagtgtgtctgactctctcatgactgcacatcccattcaggcagaggccagtacagaggaggagccattgtggcagtgccctgtgcgccttgtgacatttattggtgttggccgcgacccacacacctttggcctcatcgctgacctgggccgtcagagcttccagtgcgcagccttctggtgccagccccatgcagggggactctctgaagctgtgcaggctgcctgtatggttcagtaccagaagtgtcttgtggcctctgcagctcgaggcaaggcctggggtgcccaggcccgtgcccgcctgcggctcaagcggaccagctccatggattccccaggaggtcccctgcccctccccctgctcaaaggaggggttggcggtgcaggggcaacccctcgaaagcggggtgtcttctcttttcttgatgccttccggctgaaaccctctctgctccatatgccctaaacttatctgggaaggctggggaagtaggctctgggtccatgcctaactctgtaccgttttattcctcaaggcctatagcctgtcactccttgaagccttctctgcctgtccctccgatccttgtccaccgtctatttattgcccaatttattgtttatacggatgactgggaggcactgcaccacaacgtaggaccctggctcccctttccttgggtccttgtgttccttgcccctgtccaaccctggacagttggctctacctcagtaacactttatagcaaaatcagtgcaaataaaaatccctcagtgacctcaaaaaaaaaaa

SEQ ID NO: 284292 - DNA, 2307 bp, Homo sapiens
cgcggcgcatgttcggcgtgtcggtcttcaggcgcctgatgagttcatagttgggcggtggtgtcagcggtttcgctggcgttcgtgggcctcccccggacccacacacggaaacacgcaaccattcggggatccagacgcccgtttacacgcaccacccctgggcgggctgtgcggctcaggccctcccccgggaccggcccgtgtcccgccccgtgtcccgccccgtatttgtgcggcgccagctggccccgcagcctgcggcgcagagaggctgggcttgcaggcgcagtagctccagaggtcgcgctgggctgagagtgcgggccggcagaggctggcggggagcagccggggttatgctgggcaaggattacatgctggccatcattctggtcaactgcgatgatgacttgtggggggaccacagtctggaggtggaggctggcctgcctcctggctggaggaagatccacgatgctgcaggtacttactactggcatgtacccagcggtagcacccagtggcagcgcccaacctgggaactaggagatgcagaggacccaggcacgggaacggaggggatctggggactgcggccccccaaagggagatccttctccagcctggagagttcactggaccggagtaactctctgtcctggtatggtggggaatcctacatccagagcatggagccaggggctaagtgctttgcagtccgctctctgggctgggtagaggtacctgaagaggacctggcaccggggaagagcagtattgcagtcaataactgtatccagcagctggcccagacccgcagccggagccagcctccagatggtgcctggggtgagggccagaacatgctgatgatcctgaagaaggatgccatgagcctagtgaatcccctggaccacagtctgatccactgccagcctctggctgtgatccccactgatgctgatccccagtacttgaacccctggacacagatcctctgatgtggacccaggactgcttcccctgcctggtccagccctggttggggagggtgggcccagctcagcagggacagtttggggagagtccgagaggctgggctgattcccttctgtgctcccacatgcttccggaacagtgacagtacgggacttcgcttttgtggcaagtgacaaagatagctgtatgctcaagtgccatgtgtttcgctgtgatgtccctgccaaggccattgccagtgccctacatgggctttgtgcccagatcttgtcagagcgagtagaggtcagtggtgatgcctcttgctgctccccagaccccatctctcctgaagacctgccacggcaagtggagctgctggatgcggtaagccaagctgctcagaagtacgaggcactgtatatggggacactgccagtcaccaaggccatgggcatggatgtgctgaacgaggccattggtaccctcaccgccaggggggaccggaatgcctgggtccccaccatgctcagtgtgtctgactctctcatgactgcacatcccattcaggcagaggccagtacagaggaggagccattgtggcagtgccctgtgcgccttgtgacatttattggtgttggccgcgacccacacacctttggcctcatcgctgacctgggccgtcagagcttccagtgcgcagccttctggtgccagccccatgcagggggactctctgaagctgtgcaggctgcctgtatggttcagtaccagaagtgtcttgtggcctctgcagctcgaggcaaggcctggggtgcccaggcccgtgcccgcctgcggctcaagcggaccagctccatggattccccaggaggtcccctgcccctccccctgctcaaaggaggggttggcggtgcaggggcaacccctcgaaagcggggtgtcttctcttttcttgatgccttccggctgaaaccctctctgctccatatgccctaaacttatctgggaaggctggggaagtaggctctgggtccatgcctaactctgtaccgttttattcctcaaggcctatagcctgtcactccttgaagccttctctgcctgtccctccgatccttgtccaccgtctatttattgcccaatttattgtttatacggatgactgggaggcactgcaccacaacgtaggaccctggctcccctttccttgggtccttgtgttccttgcccctgtccaaccctggacagttggctctacctcagtaacactttatagcaaaatcagtgcaaataaaaatccctcagtgacctcaaaaaaaaaaa

SEQ ID NO: 284293 - DNA, 772 bp, Homo sapiens
ctttggggttctggtccacatattggaccctgttctattttgtgacttttattttttattttttgagatggagtctcactctgtcatccaggctggagtgcagtggcacgatcttggctcactgcaacctccgcctcccaggttcaagtcattctcctgcctcagcctcctgagtagctgaaactacaggcacatgccaccatgcccagctaatgtttgtatttttagtagatatggggtttcaccatgttggccaggatggtctcgatatcctgacctcatgatccacccgtctcagcctcccaaagtgttgggattacaggcgtgagccaccactgcacctagccttgtgacttttattctatgtcctgtgtctgggtcctatgtcctgaattttccctcaaattctgagtcacactttatgttacgttaatatgtcctgggctctaccctgctctggttttatatttctggtgctatattctgggtcttgcccctcatcctgtgcttatcaagttgtctaggcctcaccagtgtccctactgtaggaaatgtggtcctcttaacagctctgctctgtttcagtaactctctgtcctggtatggtggggaatcctacatccagagcatggagccaggggctaaggtagtgacttgggcctgagggcattgggaggtcccaagggaaagacaagggtgggattggactgaacagaggtgatcaagggtgaagacagggagtatgtattgtggcacctgccaccctactcca

SEQ ID NO: 284294 - DNA, 428 bp, Homo sapiens
cgcggcgcatgttcggcgtgtcggtcttcaggcgcctgatgagttcatagttgggcggtggtgtcagcggtttcgctggcgttcgtgggcctcccccggacccacacacggaaacacgcaaccattcggggatccagacgcccgtttacacgcaccacccctgggcgggctgtgcggctcaggccctcccccgggaccggcccgtgtcccgccccgtgtcccgccccgtatttgtgcggcgccagctggccccgcagcctgcggcgcagagaggctgggcttgcaggcgcagtagctccagaggtcgcgctgggctgagagtgcgggccggcagaggctggcggggagcagccggggttatgctgggcaaggattacatgctggccatcattctggtcaactgcgatggtgtgcacggaggggcccgg

SEQ ID NO: 284295 - DNA, 2173 bp, Homo sapiens
cgcggcgcatgttcggcgtgtcggtcttcaggcgcctgatgagttcatagttgggcggtggtgtcagcggtttcgctggcgttcgtgggcctcccccggacccacacacggaaacacgcaaccattcggggatccagacgcccgtttacacgcaccacccctgggcgggctgtgcggctcaggccctcccccgggaccggcccgtgtcccgccccgtgtcccgccccgtatttgtgcggcgccagctggccccgcagcctgcggcgcagagaggctgggcttgcaggcgcagtagctccagaggtcgcgctgggctgagagtgcgggccggcagaggctggcggggagcagccggggttatgctgggcaaggattacatgctggccatcattctggtcaactgcgatgatgacttgtggggggaccacagtctggaggtggaggctggcctgcctcctggctggaggaagatccacgatgctgcaggtacttactactggcatgtacccagcggtagcacccagtggcagcgcccaacctgggaactaggagatgcagaggacccaggcacgggaacggaggggatctggggactgcggccccccaaagggagatccttctccagcctggagagttcactggaccggagtaactctctgtcctggtatggtggggaatcctacatccagagcatggagccaggggctaagtgctttgcagtccgctctctgggctgggtagaggtacctgaagaggacctggcaccggggaagagcagtattgcagtcaataactgtatccagcagctggcccagacccgcagccggagccagcctccagatggtgcctggggtgagggccagaacatgctgatgatcctgaagaaggatgccatgagcctagtgaatcccctggaccacagtctgatccactgccagcctctggtgcacatccgtgtgtggggcgtggggagctccaagggccgtctaccccagccccatctctgcccctgctacgggacttcgcttttgtggcaagtgacaaagatagctgtatgctcaagtgccatgtgtttcgctgtgatgtccctgccaaggccattgccagtgccctacatgggctttgtgcccagatcttgtcagagcgagtagaggtcagtggtgatgcctcttgctgctccccagaccccatctctcctgaagacctgccacggcaagtggagctgctggatgcggtaagccaagctgctcagaagtacgaggcactgtatatggggacactgccagtcaccaaggccatgggcatggatgtgctgaacgaggccattggtaccctcaccgccaggggggaccggaatgcctgggtccccaccatgctcagtgtgtctgactctctcatgactgcacatcccattcaggcagaggccagtacagaggaggagccattgtggcagtgccctgtgcgccttgtgacatttattggtgttggccgcgacccacacacctttggcctcatcgctgacctgggccgtcagagcttccagtgcgcagccttctggtgccagccccatgcagggggactctctgaagctgtgcaggctgcctgtatggttcagtaccagaagtgtcttgtggcctctgcagctcgaggcaaggcctggggtgcccaggcccgtgcccgcctgcggctcaagcggaccagctccatggattccccaggaggtcccctgcccctccccctgctcaaaggaggggttggcggtgcaggggcaacccctcgaaagcggggtgtcttctcttttcttgatgccttccggctgaaaccctctctgctccatatgccctaaacttatctgggaaggctggggaagtaggctctgggtccatgcctaactctgtaccgttttattcctcaaggcctatagcctgtcactccttgaagccttctctgcctgtccctccgatccttgtccaccgtctatttattgcccaatttattgtttatacggatgactgggaggcactgcaccacaacgtaggaccctggctcccctttccttgggtccttgtgttccttgcccctgtccaaccctggacagttggctctacctcagtaacactttatagcaaaatcagtgcaaataaaaatccctcagtgacctcaaaaaaaaaaa

SEQ ID NO: 284296 - DNA, 2540 bp, Homo sapiens
cgcggcgcatgttcggcgtgtcggtcttcaggcgcctgatgagttcatagttgggcggtggtgtcagcggtttcgctggcgttcgtgggcctcccccggacccacacacggaaacacgcaaccattcggggatccagacgcccgtttacacgcaccacccctgggcgggctgtgcggctcaggccctcccccgggaccggcccgtgtcccgccccgtgtcccgccccgtatttgtgcggcgccagctggccccgcagcctgcggcgcagagaggctgggcttgcaggcgcagtagctccagaggtcgcgctgggctgagagtgcgggccggcagaggctggcggggagcagccggggttatgctgggcaaggattacatgctggccatcattctggtcaactgcgatgatgacttgtggggggaccacagtctggaggtggaggctggcctgcctcctggctggaggaagatccacgatgctgcaggtacttactactggcatgtacccagcggtagcacccagtggcagcgcccaacctgggaactaggagatgcagaggacccaggcacgggaacggaggggatctggggactgcggccccccaaagggagatccttctccagcctggagagttcactggaccggagtaactctctgtcctggtatggtggggaatcctacatccagagcatggagccaggggctaagtgctttgcagtccgctctctgggctgggtagaggtacctgaagaggacctggcaccggggaagagcagtattgcagtcaataactgtatccagcagctggcccagacccgcagccggagccagcctccagatggtgcctggggtgagggccagaacatgctgatgatcctgaagaaggatgccatgagcctagtgaatcccctggaccacagtctgatccactgccagcctctggtgcacatccgtgtgtggggcgtggggagctccaagggccggtgaggatgcctacatcccccaagcaagagctacttctccctcccggctgcaggctgtgatccccactgatgctgatccccagtacttgaacccctggacacagatcctctgatgtggacccaggactgcttcccctgcctggtccagccctggttggggagggtgggcccagctcagcagggacagtttggggagagtccgagaggctgggctgattcccttctgtgctcccacatgcttccggaacagtgacaggtgagtgaaaaccaggtatcctgagccccatccctgatgtccctactccatccctgctatatccctagcctgactttccagcctcctgcaggctcctgcctctaaccagcctctaccccagccccatctctgcccctgctacgggacttcgcttttgtggcaagtgacaaagatagctgtatgctcaagtgccatgtgtttcgctgtgatgtccctgccaaggccattgccagtgccctacatgggctttgtgcccagatcttgtcagagcgagtagaggtcagtggtgatgcctcttgctgctccccagaccccatctctcctgaagacctgccacggcaagtggagctgctggatgcggtaagccaagctgctcagaagtacgaggcactgtatatggggacactgccagtcaccaaggccatgggcatggatgtgctgaacgaggccattggtaccctcaccgccaggggggaccggaatgcctgggtccccaccatgctcagtgtgtctgactctctcatgactgcacatcccattcaggcagaggccagtacagaggaggagccattgtggcagtgccctgtgcgccttgtgacatttattggtgttggccgcgacccacacacctttggcctcatcgctgacctgggccgtcagagcttccagtgcgcagccttctggtgccagccccatgcagggggactctctgaagctgtgcaggctgcctgtatggttcagtaccagaagtgtcttgtggcctctgcagctcgaggcaaggcctggggtgcccaggcccgtgcccgcctgcggctcaagcggaccagctccatggattccccaggaggtcccctgcccctccccctgctcaaaggaggggttggcggtgcaggggcaacccctcgaaagcggggtgtcttctcttttcttgatgccttccggctgaaaccctctctgctccatatgccctaaacttatctgggaaggctggggaagtaggctctgggtccatgcctaactctgtaccgttttattcctcaaggcctatagcctgtcactccttgaagccttctctgcctgtccctccgatccttgtccaccgtctatttattgcccaatttattgtttatacggatgactgggaggcactgcaccacaacgtaggaccctggctcccctttccttgggtccttgtgttccttgcccctgtccaaccctggacagttggctctacctcagtaacactttatagcaaaatcagtgcaaataaaaatccctcagtgacctcaaaaaaaaaaa

SEQ ID NO: 284297 - DNA, 2367 bp, Homo sapiens
cgagggaatccgaaaggctactctggggctcaaagacggtgggggatacctctctgtgtagggaccagggggcgaatgaacccggtctttacatgtgatgtcttcaagattgaggagcctggatcttcagcctaagaactgacccattttggggatggagaggggattatgacagcatgttattctgaactcacaaatcatatgctccctcctctctaatccggtgttcctgtagatgacttgtggggggaccacagtctggaggtggaggctggcctgcctcctggctggaggaagatccacgatgctgcaggtacttactactggcatgtacccagcggtagcacccagtggcagcgcccaacctgggaactaggagatgcagaggacccaggcacgggaacggaggggatctggggactgcggccccccaaagggagatccttctccagcctggagagttcactggaccggagtaactctctgtcctggtatggtggggaatcctacatccagagcatggagccaggggctaagtgctttgcagtccgctctctgggctgggtagaggtacctgaagaggacctggcaccggggaagagcagtattgcagtcaataactgtatccagcagctggcccagacccgcagccggagccagcctccagatggtgcctggggtgagggccagaacatgctgatgatcctgaagaaggatgccatgagcctagtgaatcccctggaccacagtctgatccactgccagcctctggtgcacatccgtgtgtggggcgtggggagctccaagggccggtgaggatgcctacatcccccaagcaagagctacttctccctcccggctgcaggctgtgatccccactgatgctgatccccagtacttgaacccctggacacagatcctctgatgtggacccaggactgcttcccctgcctggtccagccctggttggggagggtgggcccagctcagcagggacagtttggggagagtccgagaggctgggctgattcccttctgtgctcccacatgcttccggaacagtgacaggtgagtgaaaaccaggtatcctgagccccatccctgatgtccctactccatccctgctatatccctagcctgactttccagcctcctgcaggctcctgcctctaaccagcctctaccccagccccatctctgcccctgctacgggacttcgcttttgtggcaagtgacaaagatagctgtatgctcaagtgccatgtgtttcgctgtgatgtccctgccaaggccattgccagtgccctacatgggctttgtgcccagatcttgtcagagcgagtagaggtcagtggtgatgcctcttgctgctccccagaccccatctctcctgaagacctgccacggcaagtggagctgctggatgcggtaagccaagctgctcagaagtacgaggcactgtatatggggacactgccagtcaccaaggccatgggcatggatgtgctgaacgaggccattggtaccctcaccgccaggggggaccggaatgcctgggtccccaccatgctcagtgtgtctgactctctcatgactgcacatcccattcaggcagaggccagtacagaggaggagccattgtggcagtgccctgtgcgccttgtgacatttattggtgttggccgcgacccacacacctttggcctcatcgctgacctgggccgtcagagcttccagtgcgcagccttctggtgccagccccatgcagggggactctctgaagctgtgcaggctgcctgtatggttcagtaccagaagtgtcttgtggcctctgcagctcgaggcaaggcctggggtgcccaggcccgtgcccgcctgcggctcaagcggaccagctccatggattccccaggaggtcccctgcccctccccctgctcaaaggaggggttggcggtgcaggggcaacccctcgaaagcggggtgtcttctcttttcttgatgccttccggctgaaaccctctctgctccatatgccctaaacttatctgggaaggctggggaagtaggctctgggtccatgcctaactctgtaccgttttattcctcaaggcctatagcctgtcactccttgaagccttctctgcctgtccctccgatccttgtccaccgtctatttattgcccaatttattgtttatacggatgactgggaggcactgcaccacaacgtaggaccctggctcccctttccttgggtccttgtgttccttgcccctgtccaaccctggacagttggctctacctcagtaacactttatagcaaaatcagtgcaaataaaaatccctcagtgacctcaaaaaaaaaaa

SEQ ID NO: 284298 - DNA, 2035 bp, Homo sapiens
cgcggcgcatgttcggcgtgtcggtcttcaggcgcctgatgagttcatagttgggcggtggtgtcagcggtttcgctggcgttcgtgggcctcccccggacccacacacggaaacacgcaaccattcggggatccagacgcccgtttacacgcaccacccctgggcgggctgtgcggctcaggccctcccccgggaccggcccgtgtcccgccccgtgtcccgccccgtatttgtgcggcgccagctggccccgcagcctgcggcgcagagaggctgggcttgcaggcgcagtagctccagaggtcgcgctgggctgagagtgcgggccggcagaggctggcggggagcagccggggttatgctgggcaaggattacatgctggccatcattctggtcaactgcgatgatgacttgtggggggaccacagtctggaggtggaggctggcctgcctcctggctggaggaagatccacgatgctgcaggtacttactactggcatgtacccagcggtagcacccagtggcagcgcccaacctgggaactaggagatgcagaggacccaggcacgccctggacacagatcctctgatgtggacccaggactgcttcccctgcctggtccagccctggttggggagggtgggcccagctcagcagggacagtttggggagagtccgagaggctgggctgattcccttctgtgctcccacatgcttccggaacagtgacaggtgagtgaaaaccaggtatcctgagccccatccctgatgtccctactccatccctgctatatccctagcctgactttccagcctcctgcaggctcctgcctctaaccagcctctaccccagccccatctctgcccctgctacgggacttcgcttttgtggcaagtgacaaagatagctgtatgctcaagtgccatgtgtttcgctgtgatgtccctgccaaggccattgccagtgccctacatgggctttgtgcccagatcttgtcagagcgagtagaggtcagtggtgatgcctcttgctgctccccagaccccatctctcctgaagacctgccacggcaagtggagctgctggatgcggtaagccaagctgctcagaagtacgaggcactgtatatggggacactgccagtcaccaaggccatgggcatggatgtgctgaacgaggccattggtaccctcaccgccaggggggaccggaatgcctgggtccccaccatgctcagtgtgtctgactctctcatgactgcacatcccattcaggcagaggccagtacagaggaggagccattgtggcagtgccctgtgcgccttgtgacatttattggtgttggccgcgacccacacacctttggcctcatcgctgacctgggccgtcagagcttccagtgcgcagccttctggtgccagccccatgcagggggactctctgaagctgtgcaggctgcctgtatggttcagtaccagaagtgtcttgtggcctctgcagctcgaggcaaggcctggggtgcccaggcccgtgcccgcctgcggctcaagcggaccagctccatggattccccaggaggtcccctgcccctccccctgctcaaaggaggggttggcggtgcaggggcaacccctcgaaagcggggtgtcttctcttttcttgatgccttccggctgaaaccctctctgctccatatgccctaaacttatctgggaaggctggggaagtaggctctgggtccatgcctaactctgtaccgttttattcctcaaggcctatagcctgtcactccttgaagccttctctgcctgtccctccgatccttgtccaccgtctatttattgcccaatttattgtttatacggatgactgggaggcactgcaccacaacgtaggaccctggctcccctttccttgggtccttgtgttccttgcccctgtccaaccctggacagttggctctacctcagtaacactttatagcaaaatcagtgcaaataaaaatccctcagtgacctcaaaaaaaaaaa

SEQ ID NO: 284299 - DNA, 2007 bp, Homo sapiens
cgcggcgcatgttcggcgtgtcggtcttcaggcgcctgatgagttcatagttgggcggtggtgtcagcggtttcgctggcgttcgtgggcctcccccggacccacacacggaaacacgcaaccattcggggatccagacgcccgtttacacgcaccacccctgggcgggctgtgcggctcaggccctcccccgggaccggcccgtgtcccgccccgtgtcccgccccgtatttgtgcggcgccagctggccccgcagcctgcggcgcagagaggctgggcttgcaggcgcagtagctccagaggtcgcgctgggctgagagtgcgggccggcagaggctggcggggagcagccggggttatgctgggcaaggattacatgctggccatcattctggtcaactgcgatgatgacttgtggggggaccacagtctggaggtggaggctggcctgcctcctggctggaggaagatccacgatgctgcaggtacttactactggcatgtacccagcggtagcacccagtggcagcgcccaacctgggaactaggagatgcagaggacccaggcacgtgctttgcagtccgctctctgggctgggtagaggtacctgaagaggacctggcaccggggaagagcagtattgcagtcaataactgtatccagcagctggcccagacccgcagccggagccagcctccagatggtgcctggggtgagggccagaacatgctgatgatcctgaagaaggatgccatgagcctagtgaatcccctggaccacagtctgatccactgccagcctctggtgcacatccgtgtgtggggcgtggggagctccaagggccgtacgggacttcgcttttgtggcaagtgacaaagatagctgtatgctcaagtgccatgtgtttcgctgtgatgtccctgccaaggccattgccagtgccctacatgggctttgtgcccagatcttgtcagagcgagtagaggtcagtggtgatgcctcttgctgctccccagaccccatctctcctgaagacctgccacggcaagtggagctgctggatgcggtaagccaagctgctcagaagtacgaggcactgtatatggggacactgccagtcaccaaggccatgggcatggatgtgctgaacgaggccattggtaccctcaccgccaggggggaccggaatgcctgggtccccaccatgctcagtgtgtctgactctctcatgactgcacatcccattcaggcagaggccagtacagaggaggagccattgtggcagtgccctgtgcgccttgtgacatttattggtgttggccgcgacccacacacctttggcctcatcgctgacctgggccgtcagagcttccagtgcgcagccttctggtgccagccccatgcagggggactctctgaagctgtgcaggctgcctgtatggttcagtaccagaagtgtcttgtggcctctgcagctcgaggcaaggcctggggtgcccaggcccgtgcccgcctgcggctcaagcggaccagctccatggattccccaggaggtcccctgcccctccccctgctcaaaggaggggttggcggtgcaggggcaacccctcgaaagcggggtgtcttctcttttcttgatgccttccggctgaaaccctctctgctccatatgccctaaacttatctgggaaggctggggaagtaggctctgggtccatgcctaactctgtaccgttttattcctcaaggcctatagcctgtcactccttgaagccttctctgcctgtccctccgatccttgtccaccgtctatttattgcccaatttattgtttatacggatgactgggaggcactgcaccacaacgtaggaccctggctcccctttccttgggtccttgtgttccttgcccctgtccaaccctggacagttggctctacctcagtaacactttatagcaaaatcagtgcaaataaaaatccctcagtgacctcaaaaaaaaaaa

SEQ ID NO: 284300 - DNA, 1783 bp, Homo sapiens
tcagatacttccacgtgaccccctcccgtcgagtctcaggctgcgtatgacttgtggggggaccacagtctggaggtggaggctggcctgcctcctggctggaggaagatccacgatgctgcaggtacttactactggcatgtacccagcggtagcacccagtggcagcgcccaacctgggaactaggagatgcagaggacccaggcacgggaacggaggggatctggggactgcggccccccaaagggagatccttctccagcctggagagttcactggaccggagtaactctctgtcctggtatggtggggaatcctacatccagagcatggagccaggggctaagtgctttgcagtccgctctctgggctgggtagaggtacctgaagaggacctggcaccggggaagagcagtattgcagtcaataactgtatccagcagctggcccagacccgcagccggagccagcctccagatggtgcctggggtgagggccagaacatgctgatgatcctgaagaaggatgccatgagcctagtgaatcccctggaccacagtctgatccactgccagcctctggtgcacatccgtgtgtggggcgtggggagctccaagggccgtacgggacttcgcttttgtggcaagtgacaaagatagctgtatgctcaagtgccatgtgtttcgctgtgatgtccctgccaaggccattgccagtgccctacatgggctttgtgcccagatcttgtcagagcgagtagaggtcagtggtgatgcctcttgctgctccccagaccccatctctcctgaagacctgccacggcaagtggagctgctggatgcggtaagccaagctgctcagaagtacgaggcactgtatatggggacactgccagtcaccaaggccatgggcatggatgtgctgaacgaggccattggtaccctcaccgccaggggggaccggaatgcctgggtccccaccatgctcagtgtgtctgactctctcatgactgcacatcccattcaggcagaggccagtacagaggaggagccattgtggcagtgccctgtgcgccttgtgacatttattggtgttggccgcgacccacacacctttggcctcatcgctgacctgggccgtcagagcttccagtgcgcagccttctggtgccagccccatgcagggggactctctgaagctgtgcaggctgcctgtatggttcagtaccagaagtgtcttgtggcctctgcagctcgaggcaaggcctggggtgcccaggcccgtgcccgcctgcggctcaagcggaccagctccatggattccccaggaggtcccctgcccctccccctgctcaaaggaggggttggcggtgcaggggcaacccctcgaaagcggggtgtcttctcttttcttgatgccttccggctgaaaccctctctgctccatatgccctaaacttatctgggaaggctggggaagtaggctctgggtccatgcctaactctgtaccgttttattcctcaaggcctatagcctgtcactccttgaagccttctctgcctgtccctccgatccttgtccaccgtctatttattgcccaatttattgtttatacggatgactgggaggcactgcaccacaacgtaggaccctggctcccctttccttgggtccttgtgttccttgcccctgtccaaccctggacagttggctctacctcagtaacactttatagcaaaatcagtgcaaataaaaatccctcagtgacctcaaaaaaaaaaa

SEQ ID NO: 284301 - DNA, 1615 bp, Homo sapiens
cgcggcgcatgttcggcgtgtcggtcttcaggcgcctgatgagttcatagttgggcggtggtgtcagcggtttcgctggcgttcgtgggcctcccccggacccacacacggaaacacgcaaccattcggggatccagacgcccgtttacacgcaccacccctgggcgggctgtgcggctcaggccctcccccgggaccggcccgtgtcccgccccgtgtcccgccccgtatttgtgcggcgccagctggccccgcagcctgcggcgcagagaggctgggcttgcaggcgcagtagctccagaggtcgcgctgggctgagagtgcgggccggcagaggctgtccatccctgctatatccctagcctgactttccagcctcctgcaggctcctgcctctaaccagcctctaccccagccccatctctgcccctgctacgggacttcgcttttgtggcaagtgacaaagatagctgtatgctcaagtgccatgtgtttcgctgtgatgtccctgccaaggccattgccagtgccctacatgggctttgtgcccagatcttgtcagagcgagtagaggtcagtggtgatgcctcttgctgctccccagaccccatctctcctgaagacctgccacggcaagtggagctgctggatgcggtaagccaagctgctcagaagtacgaggcactgtatatggggacactgccagtcaccaaggccatgggcatggatgtgctgaacgaggccattggtaccctcaccgccaggggggaccggaatgcctgggtccccaccatgctcagtgtgtctgactctctcatgactgcacatcccattcagtgactaggcctggtgtgggcaggcagaggccagtacagaggaggagccattgtggcagtgccctgtgcgccttgtgacatttattggtgttggccgcgacccacacacctttggcctcatcgctgacctgggccgtcagagcttccagtgcgcagccttctggtgccagccccatgcagggggactctctgaagctgtgcaggctgcctgtatggttcagtaccagaagtgtcttgtggcctctgcagctcgaggcaaggcctggggtgcccaggcccgtgcccgcctgcggctcaagcggaccagctccatggattccccaggaggtcccctgcccctccccctgctcaaaggaggggttggcggtgcaggggcaacccctcgaaagcggggtgtcttctcttttcttgatgccttccggctgaaaccctctctgctccatatgccctaaacttatctgggaaggctggggaagtaggctctgggtccatgcctaactctgtaccgttttattcctcaaggcctatagcctgtcactccttgaagccttctctgcctgtccctccgatccttgtccaccgtctatttattgcccaatttattgtttatacggatgactgggaggcactgcaccacaacgtaggaccctggctcccctttccttgggtccttgtgttccttgcccctgtccaaccctggacagttggctctacctcagtaacactttatagcaaaatcagtgcaaataaaaatccctcagtgacctcaaaaaaaaaaa

SEQ ID NO: 284302 - DNA, 2140 bp, Homo sapiens
cgcggcgcatgttcggcgtgtcggtcttcaggcgcctgatgagttcatagttgggcggtggtgtcagcggtttcgctggcgttcgtgggcctcccccggacccacacacggaaacacgcaaccattcggggatccagacgcccgtttacacgcaccacccctgggcgggctgtgcggctcaggccctcccccgggaccggcccgtgtcccgccccgtgtcccgccccgtatttgtgcggcgccagctggccccgcagcctgcggcgcagagaggctgggcttgcaggcgcagtagctccagaggtcgcgctgggctgagagtgcgggccggcagaggctggcggggagcagccggggttatgctgggcaaggattacatgctggccatcattctggtcaactgcgatgatgacttgtggggggaccacagtctggaggtggaggctggcctgcctcctggctggaggaagatccacgatgctgcaggtacttactactggcatgtacccagcggtagcacccagtggcagcgcccaacctgggaactaggagatgcagaggacccaggcacgggaacggaggggatctggggactgcggccccccaaagggagatccttctccagcctggagagttcactggaccggagtaactctctgtcctggtatggtggggaatcctacatccagagcatggagccaggggctaagtgctttgcagtccgctctctgggctgggtagaggtacctgaagaggacctggcaccggggaagagcagtattgcagtcaataactgtatccagcagctggcccagacccgcagccggagccagcctccagatggtgcctggggtgagggccagaacatgctgatgatcctgaagaaggatgccatgagcctagtgaatcccctggaccacagtctgatccactgccagcctctggtgcacatccgtgtgtggggcgtggggagctccaagggccggtgaggatgcctacatcccccaagcaagagctacttctccctcccggctgcaggctgtgatccccactgatgctgatccccagtacttgaacccctggacacagatcctctgatgtggacccaggactgcttcccctgcctggtccagccctggttggggagggtgggcccagctcagcagggacagtttggggagagtccgagaggctgggctgattcccttctgtgctcccacatgcttccggaacagtgacaggtgagtgaaaaccaggtatcctgagccccatccctgatgtccctactccatccctgctatatccctagcctgactttccagcctcctgcaggctcctgcctctaaccagcctctaccccagccccatctctgcccctgctacgggacttcgcttttgtggcaagtgacaaagatagctgtatgctcaagtgccatgtgtttcgctgtgatgtccctgccaaggccattgccagtgccctacatgggctttgtgcccagatcttgtcagagcgagtagaggtcagtggtgatgcctcttgctgctccccagaccccatctctcctgaagacctgccacggcaagtggagctgctggatgcggtaagccaagctgctcagaagtacgaggcactgtatatggggacactgccagtcaccaaggccatgggcatggatgtgctgaacgaggccattggtaccctcaccgccaggggggaccggaatgcctgggtccccaccatgctcagtgtgtctgactctctcatgactgcacatcccattcaggcagaggccagtacagaggaggagccattgtggcagtgccctgtgcgccttgtgacatttattggtgttggccgcgacccacacacctttggcctcatcgctgacctgggccgtcagagcttccagtgcgcagccttctggtgccagccccatgcagggggactctctgaagctgtgcaggctgcctgtatggttcagtaccagaagtgtcttgtggcctctgcagctcgaggcaaggcctggggtgcccaggcccgtgcccgcctgcggctcaagcggaccagctccatggattccccaggaggtcccctgcccctcccctgccctctccctgaaataaagaacagcttgacaga

SEQ ID NO: 284303 - DNA, 1613 bp, Homo sapiens
cgcggcgcatgttcggcgtgtcggtcttcaggcgcctgatgagttcatagttgggcggtggtgtcagcggtttcgctggcgttcgtgggcctcccccggacccacacacggaaacacgcaaccattcggggatccagacgcccgtttacacgcaccacccctgggcgggctgtgcggctcaggccctcccccgggaccggcccgtgtcccgccccgtgtcccgccccgtatttgtgcggcgccagctggccccgcagcctgcggcgcagagaggctgggcttgcaggcgcagtagctccagaggtcgcgctgggctgagagtgcgggccggcagaggctggcggggagcagccggggttatgctgggcaaggattacatgctggccatcattctggtcaactgcgatgatgacttgtggggggaccacagtctggaggtggaggctggcctgcctcctggctggaggaagatccacgatgctgcaggtacttactactggcatgtacccagcggtagcacccagtggcagcgcccaacctgggaactaggagatgcagaggacccaggcacgggaacggaggggatctggggactgcggccccccaaagggagatccttctccagcctggagagttcactggaccggagtaactctctgtcctggtatggtggggaatcctacatccagagcatggagccaggggctaagtgctttgcagtccgctctctgggctgggtagaggtacctgaagaggacctggcaccggggaagagcagtattgcagtcaataactgtatccagcagctggcccagacccgcagccggagccagcctccagatggtgcctggggtgagggccagaacatgctgatgatcctgaagaaggatgccatgagcctagtgaatcccctggaccacagtctgatccactgccagcctctggtgcacatccgtgtgtggggcgtggggagctccaagggccggtgaggatgcctacatcccccaagcaagagctacttctccctcccggctgcaggctgtgatccccactgatgctgatccccagtacttgaacccctggacacagatcctctgatgtggacccaggactgcttcccctgcctggtccagccctggttggggagggtgggcccagctcagcagggacagtttggggagagtccgagaggctgggctgattcccttctgtgctcccacatgcttccggaacagtgacaggtgagtgaaaaccaggtatcctgagccccatccctgatgtccctactccatccctgctatatccctagcctgactttccagcctcctgcaggctcctgcctctaaccagcctctaccccagccccatctctgcccctgctacgggacttcgcttttgtggcaagtgacaaagatagctgtatgctcaagtgccatgtgtttcgctgtgatgtccctgccaaggccattgccagtgccctacatgggctttgtgcccagatcttgtcagagcgagtagaggtcagtggtgatgcctcttgctgctccccagaccccacacacggatgtgcaccagaggctggcagtggatcagactgtggtccaggggattca

SEQ ID NO: 284304 - DNA, 1378 bp, Homo sapiens
cgcggcgcatgttcggcgtgtcggtcttcaggcgcctgatgagttcatagttgggcggtggtgtcagcggtttcgctggcgttcgtgggcctcccccggacccacacacggaaacacgcaaccattcggggatccagacgcccgtttacacgcaccacccctgggcgggctgtgcggctcaggccctcccccgggaccggcccgtgtcccgccccgtgtcccgccccgtatttgtgcggcgccagctggccccgcagcctgcggcgcagagaggctgggcttgcaggcgcagtagctccagaggtcgcgctgggctgagagtgcgggccggcagaggctggcggggagcagccggggttatgctgggcaaggattacatgctggccatcattctggtcaactgcgatgatgacttgtggggggaccacagtctggaggtggaggctggcctgcctcctggctggaggaagatccacgatgctgcaggtacttactactggcatgtacccagcggtagcacccagtggcagcgcccaacctgggaactaggagatgcagaggacccaggcacgggaacggaggggatctggggactgcggccccccaaagggagatccttctccagcctggagagttcactggaccggagtaactctctgtcctggtatggtggggaatcctacatccagagcatggagccaggggctaagtgctttgcagtccgctctctgggctgggtagaggtacctgaagaggacctggcaccggggaagagcagtattgcagtcaataactgtatccagcagctggcccagacccgcagccggagccagcctccagatggtgcctggggtgagggccagaacatgctgatgatcctgaagaaggatgccatgagcctagtgaatcccctggaccacagtctgatccactgccagcctctggtgcacatccgtgtgtggggcgtggggagctccaagggccggtgaggatgcctacatcccccaagcaagagctacttctccctcccggctgcaggctgtgatccccactgatgctgatccccagtacttgaacccctggacacagatcctctgatgtggacccaggactgcttcccctgcctggtccagccctggttggggagggtgggcccagctcagcagggacagtttggggagagtccgagaggctgggctgattcccttctgtgctcccacatgcttccggaacagtgacaggtgagtgaaaaccaggtatcctgagccccatccctgatgtccctactccatccctgctatatccctagcctgactttccagcctcctgcaggctcctgcctctaaccagccttctagtcagataacgcaggaacaca

SEQ ID NO: 284305 - DNA, 193 bp, Homo sapiens
tgctcaagtgccatgtgtttcgctgtgatgtccctgccaaggccattgccagtgccctacatgggctttgtgcccaggtaagtgtcaggggtggggcagggaatgtgggtaaggggttgggtctgaagcttccaaggtagttggggtggtattggcccttttaccctaattcccctctctccctgtgggtcat

SEQ ID NO: 284306 - DNA, 4160 bp, Homo sapiens
tcaatactgttagttgagatgtggaccatctatcagtttgtaattaagaaaaagtctggcacgtgactgaaactgaggaagaagtagaaaaggcaaaaggtcaaaggtctcatgggaaggaaggagggtagagacagtgagttttattggtccttttatggttcagacttccttcttcatcgactctccctaattctcttcactgttcatccccagcaacttttcttcccaagcatttcctgcgggcttttattaccccaggagtgccaatcaaggcgtggaacagataaagctgtgtagcaactaacgcgtgactcttgtgagtgtggagggcaaacgaagctccctgaaacctccgctctgctctcctgccttacgccgcgcggcccctgttctgaggtttaatacttgcttcacagataagcgctgcggccacgttccggtgcccaccttctccttggctagggcacgacgccagcccagggggcgcggccctgagctgctgcgagagacagctgaaagcgccggcccgacggccttggctccctcggtgcgctgggcgcagagcactcggaccctgggcgcccactgctcgagtacctgcgcggctcctagccaggcttagcccaggcgcgggctgagagtcagttcgccaggtgggcctggagccatgggctgggtgggcgggcggcgccgggattctgcgtcaccacctgggcggagccgttctgctgctgacgacatcaacccggcacctgccaacatggaaggtggcggcggcagcgtcgctgtagctggcctcggagctcgaggctctggagcggctgcagctacagtccgggaacttctgcaggacgggtgttatagtgactttttaaacgaagactttgatgtaaagacttatacttctcaatctattcatcaagctgtaattgctgaacaactagcaaaacttgcccaaggaatcagtcagttggacagagaactacacttacaggttgttgcaagacatgaagatttactggcacaagcaactgggattgagtcgttggaaggtgttcttcagatgatgcagacgagaattggggctttacagggagctgttgataggataaaagcaaaaattgttgaaccatacaataagatagttgcccggactgcacaactagcaagacttcaggttgcctgtgatttgcttcggaggattattcgtatcttgaatctcagtaagagactccaaggacaactgcaagggggaagtagagagataacaaaagctgctcagagtctcaatgaacttgattatctttctcaaggaatagatctttctggaatagaagtgatagaaaatgatctactttttattgcaagagcccgacttgaagtggaaaatcaagctaagcgcctactagagcagggtttggagactcagaatccaactcaagtcggaacagctcttcaggttttctataatcttggaactttgaaggatactattaccagtgttgtggatggatattgtgctactttagaagaaaatatcaacagtgcattagacataaaagttttgactcagccttcccagtcagctgtgagagggggacctggacgatctaccatgccaaccccaggaaatactgcagctttgcgtgcctcactctggaccaatatggagaaacttatggatcatatttatgctgtttgtggacaggtacaacatctacaaaaagtattggccaagaagagagatcctgtttctcacatttgtttcattgaagaaatagttaaggatggacaaccggaaattttctacacattttggaattcagttactcaggcactttcttctcaatttcatatggcaacaaactcttcgatgtttttgaagcaggcatttgaaggagaataccctaaattattacgtctttataatgacttatggaagcgtcttcaacaatacagtcagcatatccaagggaattttaatgcaagtggaactacagacctctatgttgacctacaacacatggaagatgatgcacaagatatattcataccaaaaaagccagattatgatccagaaaaggctttgaaagactcactacaaccctatgaggctgcttatctatcaaaatccttatctcgactcttcgatcctatcaacttggtttttcccccgggtggtcgtaatcctccttcctctgatgaacttgatggtattattaaaactatagcaagtgaactaaatgttgctgctgttgatacaaacctcacattagctgtgtcaaaaaatgtggcaaagaccatccagttatacagtgtaaaatcagagcagcttctctccacacaaggagatgcaagtcaggtgattgggcctcttactgaaggacagagaagaaatgtggcagtagtgaattcattgtataagttgcaccaatcagtaacaaaggctattcatgctcttatggaaaatgctgtgcaacccttactcacttctgtgggagatgctatagaggccataatcatcaccatgcatcaagaagacttttctgggtcattatccagctcaggaaaacctgatgttccttgttctctgtacatgaaggagctacaaggtttcattgccagagttatgagtgactattttaaacactttgaatgcttggattttgtctttgacaacactgaggctattgcccaaagagctgttgaactttttatccgccatgccagtctcataagacctcttggtgaaggtgggaaaatgcgacttgctgctgattttgcacagatggagttggctgtgggtccattctgtagacgagtatctgatttaggaaagtcctatcggatgctgagatcattcagacctctgctcttccaggcaagtgaacatgtagccagtagtcctgcattgggggatgtgattccgttcagcatcattattcagtttttgttcacgagagcacccgctgaactgaaatctcctttccagagggcagagtggtcccacacacgcttctctcagtggctggatgaccatccatctgaaaaggacaggctcctcctcatcaggggagccctggaagcttatgttcaatcagtgagaagtagagaaggcaaagaatttgcaccagtttatcccataatggttcagctgcttcaaaaggctatgtctgctcttcagtaatgacatgaaatctttgttcatctccactttgtgctaacccattcatagttggcagttaaacacatactccaaaagactgctactatctactattttaagaatgtaattgattgttcggtatttcctatcgacgtttatttacctctttagcacttatactttagcataaaaaatgttgagttatcaccacctttcaattccatggacctgatttttccagaaagatgttttcctctttcagatttttgtacaaggctaaaatgtctttcccatccataaccaagtcctcctatgggtacataaacccaaagtccccacttcttttaaagggatatgatcaagttataacatgtaccctgcttcccccaaccctgccttcttcactaaataagcatgtagctcagtggtttccaaatttggctgcacattcataccaatcaccaggggatttttttaaaatcctgatgcccaacttgcactccacattaattaacatgtctaggagtgggagcctgacagacaccactattaaaaaaaaaaaaaatccccaaaatgattccaatagacaacaaagttgaggaaccactggcacatcccaagctaagatacaaggttaaatggcctttttaagtatgtcatactggatctttaaataaagcaaggcttttgttacactttgtcatgttattaaaagcagacctttgggctgtttaaccgtgtaacaaaaatgccacgtgaaaaataaaaatttttattgtatagcaattctctataaatagtagataatctaagtccttattttctgatggctcttgttccactattaagattgtttttaatttttaaaatcctatcagcagcctcctaattagcagtgttaggaatttgccttatgttttccatctcatctcctgaacctgttattctgagaactcataaataaaattcagccaagattaatcaatcaatc

SEQ ID NO: 284307 - DNA, 4223 bp, Homo sapiens
tcaatactgttagttgagatgtggaccatctatcagtttgtaattaagaaaaagtctggcacgtgactgaaactgaggaagaagtagaaaaggcaaaaggtcaaaggtctcatgggaaggaaggagggtagagacagtgagttttattggtccttttatggttcagacttccttcttcatcgactctccctaattctcttcactgttcatccccagcaacttttcttcccaagcatttcctgcgggcttttattaccccaggagtgccaatcaaggcgtggaacagataaagctgtgtagcaactaacgcgtgactcttgtgagtgtggagggcaaacgaagctccctgaaacctccgctctgctctcctgccttacgccgcgcggcccctgttctgaggtttaatacttgcttcacagataagcgctgcggccacgttccggtgcccaccttctccttggctagggcacgacgccagcccagggggcgcggccctgagctgctgcgagagacagctgaaagcgccggcccgacggccttggctccctcggtgcgctgggcgcagagcactcggaccctgggcgcccactgctcgagtacctgcgcggctcctagccaggcttagcccaggcgcgggctgagagtcagttcgccaggtgggcctggagccatgggctgggtgggcgggcggcgccgggattctgcgtcaccacctgggcggagccgttctgctgctgacgacatcaacccggcacctgccaacatggaaggtggcggcggcagcgtcgctgtagctggcctcggagctcgaggctctggagcggctgcagctacagtccgggaacttctgcaggacgggtgttatagtgactttttaaacgaagactttgatgtaaagacttatacttctcaatctattcatcaagctgtaattgctgaacaactagcaaaacttgcccaaggaatcagtcagttggacagagaactacacttacaggttgttgcaagacatgaagatttactggcacaagcaactgggattgagtcgttggaaggtgttcttcagatgatgcagacgagaattggggctttacagggagctgttgataggataaaagcaaaaattgttgaaccatacaataagatagttgcccggactgcacaactagcaagacttcaggttgcctgtgatttgcttcggaggattattcgtatcttgaatctcagtaagagactccaaggacaactgcaagggggaagtagagagataacaaaagctgctcagagtctcaatgaacttgattatctttctcaaggaatagatctttctggaatagaagtgatagaaaatgatctactttttattgcaagagcccgacttgaagtggaaaatcaagctaagcgcctactagagcagggtttggagactcagaatccaactcaagtcggaacagctcttcaggttttctataatcttggaactttgaaggatactattaccagtgttgtggatggatattgtgctactttagaagaaaatatcaacagtgcattagacataaaagttttgactcagccttcccagtcagctgtgagagggggacctggacgatctaccatgccaaccccaggaaatactgcagctttgcgtgcctcactctggaccaatatggagaaacttatggatcatatttatgctgtttgtggacaggtacaacatctacaaaaagtattggccaagaagagagatcctgtttctcacatttgtttcattgaagaaatagttaaggatggacaaccggaaattttctacacattttggaattcagttactcaggcactttcttctcaatttcatatggcaacaaactcttcgatgtttttgaagcaggcatttgaaggagaataccctaaattattacgtctttataatgacttatggaagcgtcttcaacaatacagtcagcatatccaagggaattttaatgcaagtggaactacagacctctatgttgacctacaacacatggaagatgatgcacaagatatattcataccaaaaaagccagattatgatccagaaaaggctttgaaagactcactacaaccctatgaggctgcttatctatcaaaatccttatctcgactcttcgatcctatcaacttggtttttcccccgggtggtcgtaatcctccttcctctgatgaacttgatggtattattaaaactatagcaagtgaactaaatgttgctgctgttgatacaaacctcacattagctgtgtcaaaaaatgtggcaaagaccatccagttatacagtgtaaaatcagagcagcttctctccacacaaggagatgcaagtcaggtgattgggcctcttactgaaggacagagaagaaatgtggcagtagtgaattcattgtataagttgcaccaatcagtaacaaaggttgtttccagtcagagctcattcccactggcagctgagcaaactataatttcagctctaaaggctattcatgctcttatggaaaatgctgtgcaacccttactcacttctgtgggagatgctatagaggccataatcatcaccatgcatcaagaagacttttctgggtcattatccagctcaggaaaacctgatgttccttgttctctgtacatgaaggagctacaaggtttcattgccagagttatgagtgactattttaaacactttgaatgcttggattttgtctttgacaacactgaggctattgcccaaagagctgttgaactttttatccgccatgccagtctcataagacctcttggtgaaggtgggaaaatgcgacttgctgctgattttgcacagatggagttggctgtgggtccattctgtagacgagtatctgatttaggaaagtcctatcggatgctgagatcattcagacctctgctcttccaggcaagtgaacatgtagccagtagtcctgcattgggggatgtgattccgttcagcatcattattcagtttttgttcacgagagcacccgctgaactgaaatctcctttccagagggcagagtggtcccacacacgcttctctcagtggctggatgaccatccatctgaaaaggacaggctcctcctcatcaggggagccctggaagcttatgttcaatcagtgagaagtagagaaggcaaagaatttgcaccagtttatcccataatggttcagctgcttcaaaaggctatgtctgctcttcagtaatgacatgaaatctttgttcatctccactttgtgctaacccattcatagttggcagttaaacacatactccaaaagactgctactatctactattttaagaatgtaattgattgttcggtatttcctatcgacgtttatttacctctttagcacttatactttagcataaaaaatgttgagttatcaccacctttcaattccatggacctgatttttccagaaagatgttttcctctttcagatttttgtacaaggctaaaatgtctttcccatccataaccaagtcctcctatgggtacataaacccaaagtccccacttcttttaaagggatatgatcaagttataacatgtaccctgcttcccccaaccctgccttcttcactaaataagcatgtagctcagtggtttccaaatttggctgcacattcataccaatcaccaggggatttttttaaaatcctgatgcccaacttgcactccacattaattaacatgtctaggagtgggagcctgacagacaccactattaaaaaaaaaaaaaatccccaaaatgattccaatagacaacaaagttgaggaaccactggcacatcccaagctaagatacaaggttaaatggcctttttaagtatgtcatactggatctttaaataaagcaaggcttttgttacactttgtcatgttattaaaagcagacctttgggctgtttaaccgtgtaacaaaaatgccacgtgaaaaataaaaatttttattgtatagcaattctctataaatagtagataatctaagtccttattttctgatggctcttgttccactattaagattgtttttaatttttaaaatcctatcagcagcctcctaattagcagtgttaggaatttgccttatgttttccatctcatctcctgaacctgttattctgagaactcataaataaaattcagccaagattaatcaatcaatc

SEQ ID NO: 284308 - DNA, 3221 bp, Homo sapiens
tggtggagtattggtggaaacccattgagactgggttgtggagagaatatgatgtgttcttcagatgatgcagacgagaattggggctttacagggagctgttgataggataaaagcaaaaattgttgaaccatacaataagatagttgcccggactgcacaactagcaagacttcaggttgcctgtgatttgcttcggaggattattcgtatcttgaatctcagtaagagactccaaggacaactgcaagggggaagtagagagataacaaaagctgctcagagtctcaatgaacttgattatctttctcaaggaatagatctttctggaatagaagtgatagaaaatgatctactttttattgcaagagcccgacttgaagtggaaaatcaagctaagcgcctactagagcagggtttggagactcagaatccaactcaagtcggaacagctcttcaggttttctataatcttggaactttgaaggatactattaccagtgttgtggatggatattgtgctactttagaagaaaatatcaacagtgcattagacataaaagttttgactcagccttcccagtcagctgtgagagggggacctggacgatctaccatgccaaccccaggaaatactgcagctttgcgtgcctcactctggaccaatatggagaaacttatggatcatatttatgctgtttgtggacaggtacaacatctacaaaaagtattggccaagaagagagatcctgtttctcacatttgtttcattgaagaaatagttaaggatggacaaccggaaattttctacacattttggaattcagttactcaggcactttcttctcaatttcatatggcaacaaactcttcgatgtttttgaagcaggcatttgaaggagaataccctaaattattacgtctttataatgacttatggaagcgtcttcaacaatacagtcagcatatccaagggaattttaatgcaagtggaactacagacctctatgttgacctacaacacatggaagatgatgcacaagatatattcataccaaaaaagccagattatgatccagaaaaggctttgaaagactcactacaaccctatgaggctgcttatctatcaaaatccttatctcgactcttcgatcctatcaacttggtttttcccccgggtggtcgtaatcctccttcctctgatgaacttgatggtattattaaaactatagcaagtgaactaaatgttgctgctgttgatacaaacctcacattagctgtgtcaaaaaatgtggcaaagaccatccagttatacagtgtaaaatcagagcagcttctctccacacaaggagatgcaagtcaggtgattgggcctcttactgaaggacagagaagaaatgtggcagtagtgaattcattgtataagttgcaccaatcagtaacaaaggttgtttccagtcagagctcattcccactggcagctgagcaaactataatttcagctctaaaggctattcatgctcttatggaaaatgctgtgcaacccttactcacttctgtgggagatgctatagaggccataatcatcaccatgcatcaagaagacttttctgggtcattatccagctcaggaaaacctgatgttccttgttctctgtacatgaaggagctacaaggtttcattgccagagttatgagtgactattttaaacactttgaatgcttggattttgtctttgacaacactgaggctattgcccaaagagctgttgaactttttatccgccatgccagtctcataagacctcttggtgaaggtgggaaaatgcgacttgctgctgattttgcacagatggagttggctgtgggtccattctgtagacgagtatctgatttaggaaagtcctatcggatgctgagatcattcagacctctgctcttccaggcaagtgaacatgtagccagtagtcctgcattgggggatgtgattccgttcagcatcattattcagtttttgttcacgagagcacccgctgaactgaaatctcctttccagagggcagagtggtcccacacacgcttctctcagtggctggatgaccatccatctgaaaaggacaggctcctcctcatcaggggagccctggaagcttatgttcaatcagtgagaagtagagaaggcaaagaatttgcaccagtttatcccataatggttcagctgcttcaaaaggctatgtctgctcttcagtaatgacatgaaatctttgttcatctccactttgtgctaacccattcatagttggcagttaaacacatactccaaaagactgctactatctactattttaagaatgtaattgattgttcggtatttcctatcgacgtttatttacctctttagcacttatactttagcataaaaaatgttgagttatcaccacctttcaattccatggacctgatttttccagaaagatgttttcctctttcagatttttgtacaaggctaaaatgtctttcccatccataaccaagtcctcctatgggtacataaacccaaagtccccacttcttttaaagggatatgatcaagttataacatgtaccctgcttcccccaaccctgccttcttcactaaataagcatgtagctcagtggtttccaaatttggctgcacattcataccaatcaccaggggatttttttaaaatcctgatgcccaacttgcactccacattaattaacatgtctaggagtgggagcctgacagacaccactattaaaaaaaaaaaaaatccccaaaatgattccaatagacaacaaagttgaggaaccactggcacatcccaagctaagatacaaggttaaatggcctttttaagtatgtcatactggatctttaaataaagcaaggcttttgttacactttgtcatgttattaaaagcagacctttgggctgtttaaccgtgtaacaaaaatgccacgtgaaaaataaaaatttttattgtatagcaattctctataaatagtagataatctaagtccttattttctgatggctcttgttccactattaagattgtttttaatttttaaaatcctatcagcagcctcctaattagcagtgttaggaatttgccttatgttttccatctcatctcctgaacctgttattctgagaactcataaataaaattcagccaagattaatcaatcaatc

SEQ ID NO: 284309 - DNA, 2904 bp, Homo sapiens
ctcaggttataatgctcactgccctgccgctcacctcctgctgtgtggcccagttcctaacagccaccgactcttactggtcagcagcccaggggcgttgggaactcctgattaatccaactcaagtcggaacagctcttcaggttttctataatcttggaactttgaaggatactattaccagtgttgtggatggatattgtgctactttagaagaaaatatcaacagtgcattagacataaaagttttgactcagccttcccagtcagctgtgagagggggacctggacgatctaccatgccaaccccaggaaatactgcagctttgcgtgcctcactctggaccaatatggagaaacttatggatcatatttatgctgtttgtggacaggtacaacatctacaaaaagtattggccaagaagagagatcctgtttctcacatttgtttcattgaagaaatagttaaggatggacaaccggaaattttctacacattttggaattcagttactcaggcactttcttctcaatttcatatggcaacaaactcttcgatgtttttgaagcaggcatttgaaggagaataccctaaattattacgtctttataatgacttatggaagcgtcttcaacaatacagtcagcatatccaagggaattttaatgcaagtggaactacagacctctatgttgacctacaacacatggaagatgatgcacaagatatattcataccaaaaaagccagattatgatccagaaaaggctttgaaagactcactacaaccctatgaggctgcttatctatcaaaatccttatctcgactcttcgatcctatcaacttggtttttcccccgggtggtcgtaatcctccttcctctgatgaacttgatggtattattaaaactatagcaagtgaactaaatgttgctgctgttgatacaaacctcacattagctgtgtcaaaaaatgtggcaaagaccatccagttatacagtgtaaaatcagagcagcttctctccacacaaggagatgcaagtcaggtgattgggcctcttactgaaggacagagaagaaatgtggcagtagtgaattcattgtataagttgcaccaatcagtaacaaaggttgtttccagtcagagctcattcccactggcagctgagcaaactataatttcagctctaaaggctattcatgctcttatggaaaatgctgtgcaacccttactcacttctgtgggagatgctatagaggccataatcatcaccatgcatcaagaagacttttctgggtcattatccagctcaggaaaacctgatgttccttgttctctgtacatgaaggagctacaaggtttcattgccagagttatgagtgactattttaaacactttgaatgcttggattttgtctttgacaacactgaggctattgcccaaagagctgttgaactttttatccgccatgccagtctcataagacctcttggtgaaggtgggaaaatgcgacttgctgctgattttgcacagatggagttggctgtgggtccattctgtagacgagtatctgatttaggaaagtcctatcggatgctgagatcattcagacctctgctcttccaggcaagtgaacatgtagccagtagtcctgcattgggggatgtgattccgttcagcatcattattcagtttttgttcacgagagcacccgctgaactgaaatctcctttccagagggcagagtggtcccacacacgcttctctcagtggctggatgaccatccatctgaaaaggacaggctcctcctcatcaggggagccctggaagcttatgttcaatcagtgagaagtagagaaggcaaagaatttgcaccagtttatcccataatggttcagctgcttcaaaaggctatgtctgctcttcagtaatgacatgaaatctttgttcatctccactttgtgctaacccattcatagttggcagttaaacacatactccaaaagactgctactatctactattttaagaatgtaattgattgttcggtatttcctatcgacgtttatttacctctttagcacttatactttagcataaaaaatgttgagttatcaccacctttcaattccatggacctgatttttccagaaagatgttttcctctttcagatttttgtacaaggctaaaatgtctttcccatccataaccaagtcctcctatgggtacataaacccaaagtccccacttcttttaaagggatatgatcaagttataacatgtaccctgcttcccccaaccctgccttcttcactaaataagcatgtagctcagtggtttccaaatttggctgcacattcataccaatcaccaggggatttttttaaaatcctgatgcccaacttgcactccacattaattaacatgtctaggagtgggagcctgacagacaccactattaaaaaaaaaaaaaatccccaaaatgattccaatagacaacaaagttgaggaaccactggcacatcccaagctaagatacaaggttaaatggcctttttaagtatgtcatactggatctttaaataaagcaaggcttttgttacactttgtcatgttattaaaagcagacctttgggctgtttaaccgtgtaacaaaaatgccacgtgaaaaataaaaatttttattgtatagcaattctctataaatagtagataatctaagtccttattttctgatggctcttgttccactattaagattgtttttaatttttaaaatcctatcagcagcctcctaattagcagtgttaggaatttgccttatgttttccatctcatctcctgaacctgttattctgagaactcataaataaaattcagccaagattaatcaatcaatc

SEQ ID NO: 284310 - DNA, 4252 bp, Homo sapiens
tcaatactgttagttgagatgtggaccatctatcagtttgtaattaagaaaaagtctggcacgtgactgaaactgaggaagaagtagaaaaggcaaaaggtcaaaggtctcatgggaaggaaggagggtagagacagtgagttttattggtccttttatggttcagacttccttcttcatcgactctccctaattctcttcactgttcatccccagcaacttttcttcccaagcatttcctgcgggcttttattaccccaggagtgccaatcaaggcgtggaacagataaagctgtgtagcaactaacgcgtgactcttgtgagtgtggagggcaaacgaagctccctgaaacctccgctctgctctcctgccttacgccgcgcggcccctgttctgaggtttaatacttgcttcacagataagcgctgcggccacgttccggtgcccaccttctccttggctagggcacgacgccagcccagggggcgcggccctgagctgctgcgagagacagctgaaagcgccggcccgacggccttggctccctcggtgcgctgggcgcagagcactcggaccctgggcgcccactgctcgagtacctgcgcggctcctagccaggcttagcccaggcgcgggctgagagtcagttcgccaggtgggcctggagccatgggctgggtgggcgggcggcgccgggattctgcgtcaccacctgggcggagccgttctgctgctgacgacatcaacccggcacctgccaacatggaaggtggcggcggcagcgtcgctgtagctggcctcggagctcgaggctctggagcggctgcagctacagtccgggaacttctgcaggacgggtgttatagtgactttttaaacgaagactttgatgtaaagacttatacttctcaatctattcatcaagctgtaattgctgaacaactagcaaaacttgcccaaggaatcagtcagttggacagagaactacacttacaggttgttgcaagacatgaagatttactggcacaagcaactgggattgagtcgttggaaggtgttcttcagatgatgcagacgagaattggggctttacagggagctgttgataggataaaagcaaaaattgttgaaccatacaataagatagttgcccggactgcacaactagcaagacttcaggttgcctgtgatttgcttcggaggattattcgtatcttgaatctcagtaagagactccaaggacaactgcaagggggaagtagagagataacaaaagctgctcagagtctcaatgaacttgattatctttctcaaggaatagatctttctggaatagaagtgatagaaaatgatctactttttattgcaagagcccgacttgaagtggaaaatcaagctaagcgcctactagagcagggtttggagactcagaatccaactcaagtcggaacagctcttcaggttttctataatcttggaactttgaaggatactattaccagtgttgtggatggatattgtgctactttagaagaaaatatcaacagtgcattagacataaaagttttgactcagccttcccagtcagctgtgagagggggacctggacgatctaccatgccaaccccaggaaatactgcagctttgcgtgcctcactctggaccaatatggagaaacttatggatcatatttatgctgtttgtggacaggtacaacatctacaaaaagtattggccaagaagagagatcctgtttctcacatttgtttcattgaagaaatagttaaggatggacaaccggaaattttctacacattttggaattcagttactcaggcactttcttctcaatttcatatggcaacaaactcttcgatgtttttgaagcaggcatttgaaggagaataccctaaattattacgtctttataatgacttatggaagcgtcttcaacaatacagtcagcatatccaagggaattttaatgcaagtggaactacagacctctatgttgacctacaacacatggaagatgatgcacaagatatattcataccaaaaaagccagattatgatccagaaaaggctttgaaagactcactacaaccctatgaggctgcttatctatcaaaatccttatctcgactcttcgatcctatcaacttggtttttcccccgggtggtcgtaatcctccttcctctgatgaacttgatggtattattaaaactatagcaagtgaactaaatgttgctgctgttgatacaaacctcacattagctgtgtcaaaaaatgtggcaaagaccatccagttatacagtgtaaaatcagagcagcttctctccacacaaggagatgcaagtcaggtgattgggcctcttactgaaggacagagaagaaatgtggcagtagtgaattcattgtataagttgcaccaatcagtaacaaaggttgtttccagtcagagctcattcccactggcagctgagcaaactataatttcagctctaaaggatctgcagtacagtgttgaatagaactggctattcatgctcttatggaaaatgctgtgcaacccttactcacttctgtgggagatgctatagaggccataatcatcaccatgcatcaagaagacttttctgggtcattatccagctcaggaaaacctgatgttccttgttctctgtacatgaaggagctacaaggtttcattgccagagttatgagtgactattttaaacactttgaatgcttggattttgtctttgacaacactgaggctattgcccaaagagctgttgaactttttatccgccatgccagtctcataagacctcttggtgaaggtgggaaaatgcgacttgctgctgattttgcacagatggagttggctgtgggtccattctgtagacgagtatctgatttaggaaagtcctatcggatgctgagatcattcagacctctgctcttccaggcaagtgaacatgtagccagtagtcctgcattgggggatgtgattccgttcagcatcattattcagtttttgttcacgagagcacccgctgaactgaaatctcctttccagagggcagagtggtcccacacacgcttctctcagtggctggatgaccatccatctgaaaaggacaggctcctcctcatcaggggagccctggaagcttatgttcaatcagtgagaagtagagaaggcaaagaatttgcaccagtttatcccataatggttcagctgcttcaaaaggctatgtctgctcttcagtaatgacatgaaatctttgttcatctccactttgtgctaacccattcatagttggcagttaaacacatactccaaaagactgctactatctactattttaagaatgtaattgattgttcggtatttcctatcgacgtttatttacctctttagcacttatactttagcataaaaaatgttgagttatcaccacctttcaattccatggacctgatttttccagaaagatgttttcctctttcagatttttgtacaaggctaaaatgtctttcccatccataaccaagtcctcctatgggtacataaacccaaagtccccacttcttttaaagggatatgatcaagttataacatgtaccctgcttcccccaaccctgccttcttcactaaataagcatgtagctcagtggtttccaaatttggctgcacattcataccaatcaccaggggatttttttaaaatcctgatgcccaacttgcactccacattaattaacatgtctaggagtgggagcctgacagacaccactattaaaaaaaaaaaaaatccccaaaatgattccaatagacaacaaagttgaggaaccactggcacatcccaagctaagatacaaggttaaatggcctttttaagtatgtcatactggatctttaaataaagcaaggcttttgttacactttgtcatgttattaaaagcagacctttgggctgtttaaccgtgtaacaaaaatgccacgtgaaaaataaaaatttttattgtatagcaattctctataaatagtagataatctaagtccttattttctgatggctcttgttccactattaagattgtttttaatttttaaaatcctatcagcagcctcctaattagcagtgttaggaatttgccttatgttttccatctcatctcctgaacctgttattctgagaactcataaataaaattcagccaagattaatcaatcaatc

SEQ ID NO: 284311 - DNA, 3853 bp, Homo sapiens
tcaatactgttagttgagatgtggaccatctatcagtttgtaattaagaaaaagtctggcacgtgactgaaactgaggaagaagtagaaaaggcaaaaggtcaaaggtctcatgggaaggaaggagggtagagacagtgagttttattggtccttttatggttcagacttccttcttcatcgactctccctaattctcttcactgttcatccccagcaacttttcttcccaagcatttcctgcgggcttttattaccccaggagtgccaatcaaggcgtggaacagataaagctgtgtagcaactaacgcgtgactcttgtgagtgtggagggcaaacgaagctccctgaaacctccgctctgctctcctgccttacgccgcgcggcccctgttctgaggtttaatacttgcttcacagataagcgctgcggccacgttccggtgcccaccttctccttggctagggcacgacgccagcccagggggcgcggccctgagctgctgcgagagacagctgaaagcgccggcccgacggccttggctccctcggtgcgctgggcgcagagcactcggaccctgggcgcccactgctcgagtacctgcgcggctcctagccaggcttagcccaggcgcgggctgagagtcagttcgccaggtgggcctggagccatgggctgggtgggcgggcggcgccgggattctgcgtcaccacctgggcggagccgttctgctgctgacgacatcaacccggcacctgccaacatggaaggtggcggcggcagcgtcgctgtagctggcctcggagctcgaggctctggagcggctgcagctacagtccgggaacttctgcaggacgggtgttatagtgactttttaaacgaagactttgatgtaaagacttatacttctcaatctattcatcaagctgtaattgctgaacaactagcaaaacttgcccaaggaatcagtcagttggacagagaactacacttacaggttgttgcaagacatgaagatttactggcacaagcaactgggattgagtcgttggaaggtgttcttcagatgatgcagacgagaattggggctttacagggagctgttgataggataaaagcaaaaattgttgaaccatacaataagatagttgcccggactgcacaactagcaagacttcaggttgcctgtgatttgcttcggaggattattcgtatcttgaatctcagtaagagactccaaggacaactgcaagggggaagtagagagataacaaaagctgctcagagtctcaatgaacttgaatcttgctgcatcacccaggcaggagtacagtggtgctatcacagctcactgcagcctcaacctcctggactcaggcaatcctccttcctcagcctcccaggtagctgggaccacaggatggacaaccggaaattttctacacattttggaattcagttactcaggcactttcttctcaatttcatatggcaacaaactcttcgatgtttttgaagcaggcatttgaaggagaataccctaaattattacgtctttataatgacttatggaagcgtcttcaacaatacagtcagcatatccaagggaattttaatgcaagtggaactacagacctctatgttgacctacaacacatggaagatgatgcacaagatatattcataccaaaaaagccagattatgatccagaaaaggctttgaaagactcactacaaccctatgaggctgcttatctatcaaaatccttatctcgactcttcgatcctatcaacttggtttttcccccgggtggtcgtaatcctccttcctctgatgaacttgatggtattattaaaactatagcaagtgaactaaatgttgctgctgttgatacaaacctcacattagctgtgtcaaaaaatgtggcaaagaccatccagttatacagtgtaaaatcagagcagcttctctccacacaaggagatgcaagtcaggtgattgggcctcttactgaaggacagagaagaaatgtggcagtagtgaattcattgtataagttgcaccaatcagtaacaaaggttgtttccagtcagagctcattcccactggcagctgagcaaactataatttcagctctaaaggctattcatgctcttatggaaaatgctgtgcaacccttactcacttctgtgggagatgctatagaggccataatcatcaccatgcatcaagaagacttttctgggtcattatccagctcaggaaaacctgatgttccttgttctctgtacatgaaggagctacaaggtttcattgccagagttatgagtgactattttaaacactttgaatgcttggattttgtctttgacaacactgaggctattgcccaaagagctgttgaactttttatccgccatgccagtctcataagacctcttggtgaaggtgggaaaatgcgacttgctgctgattttgcacagatggagttggctgtgggtccattctgtagacgagtatctgatttaggaaagtcctatcggatgctgagatcattcagacctctgctcttccaggcaagtgaacatgtagccagtagtcctgcattgggggatgtgattccgttcagcatcattattcagtttttgttcacgagagcacccgctgaactgaaatctcctttccagagggcagagtggtcccacacacgcttctctcagtggctggatgaccatccatctgaaaaggacaggctcctcctcatcaggggagccctggaagcttatgttcaatcagtgagaagtagagaaggcaaagaatttgcaccagtttatcccataatggttcagctgcttcaaaaggctatgtctgctcttcagtaatgacatgaaatctttgttcatctccactttgtgctaacccattcatagttggcagttaaacacatactccaaaagactgctactatctactattttaagaatgtaattgattgttcggtatttcctatcgacgtttatttacctctttagcacttatactttagcataaaaaatgttgagttatcaccacctttcaattccatggacctgatttttccagaaagatgttttcctctttcagatttttgtacaaggctaaaatgtctttcccatccataaccaagtcctcctatgggtacataaacccaaagtccccacttcttttaaagggatatgatcaagttataacatgtaccctgcttcccccaaccctgccttcttcactaaataagcatgtagctcagtggtttccaaatttggctgcacattcataccaatcaccaggggatttttttaaaatcctgatgcccaacttgcactccacattaattaacatgtctaggagtgggagcctgacagacaccactattaaaaaaaaaaaaaatccccaaaatgattccaatagacaacaaagttgaggaaccactggcacatcccaagctaagatacaaggttaaatggcctttttaagtatgtcatactggatctttaaataaagcaaggcttttgttacactttgtcatgttattaaaagcagacctttgggctgtttaaccgtgtaacaaaaatgccacgtgaaaaataaaaatttttattgtatagcaattctctataaatagtagataatctaagtccttattttctgatggctcttgttccactattaagattgtttttaatttttaaaatcctatcagcagcctcctaattagcagtgttaggaatttgccttatgttttccatctcatctcctgaacctgttattctgagaactcataaataaaattcagccaagattaatcaatcaatc

SEQ ID NO: 284312 - DNA, 3402 bp, Homo sapiens
tcaatactgttagttgagatgtggaccatctatcagtttgtaattaagaaaaagtctggcacgtgactgaaactgaggaagaagtagaaaaggcaaaaggtcaaaggtctcatgggaaggaaggagggtagagacagtgagttttattggtccttttatggttcagacttccttcttcatcgactctccctaattctcttcactgttcatccccagcaacttttcttcccaagcatttcctgcgggcttttattaccccaggagtgccaatcaaggcgtggaacagataaagctgtgtagcaactaacgcgtgactcttgtgagtgtggagggcaaacgaagctccctgaaacctccgctctgctctcctgccttacgccgcgcggcccctgttctgaggtttaatacttgcttcacagataagcgctgcggccacgttccggtgcccaccttctccttggctagggcacgacgccagcccagggggcgcggccctgagctgctgcgagagacagctgaaagcgccggcccgacggccttggctccctcggtgcgctgggcgcagagcactcggaccctgggcgcccactgctcgagtacctgcgcggctcctagccaggcttagcccaggcgcgggctgagagtcagttcgccaggtgggcctggagccatgggctgggtgggcgggcggcgccgggattctgcgtcaccacctgggcggagccgttctgctgctgacgacatcaacccggcacctgccaacatggaaggtggcggcggcagcgtcgctgtagctggcctcggagctcgaggctctggagcggctgcagctacagtccgggaacttctgcaggacgggtgttatagtgactttttaaacgaagactttgatgtaaagacttatacttctcaatctattcatcaagctgtaattgctgaacaactagcaaaacttgcccaaggaatcagtcagttggacagagaactacacttacaggttgttgcaagacatgaagatttactggcacaagcaactgggattgagtcgttggaaggtgttcttcagatgatgcagacgagaattggggctttacagggagctgttgataggataaaagcaaaaattgttgaaccatacaataagatagttgcccggactgcacaactagcaagacttcaggttgcctgtgatttgcttcggaggattattcgtatcttgaatctcagtaagagactccaaggacaactgcaagggggaagtagagagataacaaaagctgctcagagtctcaatgaacttgattatctttctcaaggaatagatctttctggaatagaagtgatagaaaatgatctactttttattgcaagagcccgacttgaagtggaaaatcaagctaagcgcctactagagcagggtttggagactcagaatccaactcaagtcggaacagctcttcaggttttctataatcttggaactttgaaggatactattaccagtgttgtggatggatattgtgctactttagaagaaaatatcaacagtgcattagacataaaagttttgactcagccttcccagtcagctgtgagagggggacctggacgatctaccatgccaaccccaggaaatactgcagctttgcgtgcctcactctggaccaatatggagaaacttatggatcatatttatgctgtttgtggacaggtacaacatctacaaaaagtattggccaagaagagagatcctgtttctcacatttgtttcattgaagaaatagttaaggatggacaaccggaaattttctacacattttggaattcagttactcaggcactttcttctcaatttcatatggcaacaaactcttcgatgtttttgaagcaggcatttgaaggagaataccctaaattattacgtctttataatgacttatggaagcgtcttcaacaatacagtcagcatatccaagggaattttaatgcaagtggaactacagacctctatgttgacctacaacacatggaagatgatgcacaagatatattcataccaaaaaagccagattatgatccagaaaaggctttgaaagactcactacaaccctatgaggctgcttatctatcaaaatccttatctcgactcttcgatcctatcaacttggtttttcccccgggtggtcgtaatcctccttcctctgatgaacttgatggtattattaaaactatagcaagtgaactaaatgttgctgctgttgatacaaacctcacattagctgtgtcaaaaaatgtggcaaagaccatccagttatacagtgtaaaatcagagcagcttctctccacacaaggagatgcaagtcaggtgattgggcctcttactgaaggacagagaagaaatgtggcagtagtgaattcattgtataagttgcaccaatcagtaacaaaggttgtttccagtcagagctcattcccactggcagctgagcaaactataatttcagctctaaaggctattcatgctcttatggaaaatgctgtgcaacccttactcacttctgtgggagatgctatagaggccataatcatcaccatgcatcaagaagacttttctgggtcattatccagctcaggaaaacctgatgttccttgttctctgtacatgaaggagctacaaggtttcattgccagagttatgagtgactattttaaacactttgaatgcttggattttgtctttgacaacactgaggctattgcccaaagagctgttgaactttttatccgccatgccagtctcataagacctcttggtgaaggtgggaaaatgcgacttgctgctgattttgcacagatggagttggctgtgggtccattctgtagacgagtatctgatttaggaaagtcctatcggatgctgagatcattcagacctctgctcttccaggcaagtgaacatgtagccagtagtcctgcattgggggatgtgattccgttcagcatcattattcagtttttgttcacgagagcacccgctgaactgaaatctcctttccagagggcagagtggtcccacacacgcttctctcagtggctggatgaccatccatctgaaaaggacaggctcctcctcatcaggtaaagccaggtgctctgggggcacccatctggtctggaagcccaaggagggtggggatgcaagagaggatgaaggagcagtgcctgggggcatggacatgtgactgcaccttccagtggcgggccacctcactgcctaggcacgggtgctggagcaaccagcagttggaaatgttggccacaacatcttttgctttctttcattccaaaccttcatatccctgatgtgcaatcctgtgtcccatgcaaccctaaggaccatgc

SEQ ID NO: 284313 - DNA, 1293 bp, Homo sapiens
tcaatactgttagttgagatgtggaccatctatcagtttgtaattaagaaaaagtctggcacgtgactgaaactgaggaagaagtagaaaaggcaaaaggtcaaaggtctcatgggaaggaaggagggtagagacagtgagttttattggtccttttatggttcagacttccttcttcatcgactctccctaattctcttcactgttcatccccagcaacttttcttcccaagcatttcctgcgggcttttattaccccaggagtgccaatcaaggcgtggaacagataaagctgtgtagcaactaacgcgtgactcttgtgagtgtggagggcaaacgaagctccctgaaacctccgctctgctctcctgccttacgccgcgcggcccctgttctgaggtttaatacttgcttcacagataagcgctgcggccacgttccggtgcccaccttctccttggctagggcacgacgccagcccagggggcgcggccctgagctgctgcgagagacagctgaaagcgccggcccgacggccttggctccctcggtgcgctgggcgcagagcactcggaccctgggcgcccactgctcgagtacctgcgcggctcctagccaggcttagcccaggcgcgggctgagagtcagttcgccaggtgggcctggagccatgggctgggtgggcgggcggcgccgggattctgcgtcaccacctgggcggagccgttctgctgctgacgacatcaacccggcacctgccaacatggaaggtggcggcggcagcgtcgctgtagctggcctcggagctcgaggctctggagcggctgcagctacagtccgggaacttctgcaggacgggtgttatagtgactttttaaacgaagactttgatgtaaagacttatacttctcaatctattcatcaagctgtaattgctgaacaactagcaaaacttgcccaaggaatcagtcagttggacagagaactacacttacaggttgttgcaagacatgaagatttactggcacaagcaactgggattgagtcgttggaaggtgttcttcagatgatgcagacgagaattggggctttacagggagctgttgataggataaaagcaaaaattgttgaaccatacaataagatagttgcccggactgcacaactagcaagacttcaggtagtttcttacttttatttctttatactttattattcattttgttttcataagtggacaaaatttaagagtatgagtttggaagaagtaagagaatgggaacagaaggtaag

SEQ ID NO: 284314 - DNA, 251 bp, Homo sapiens
agctacagtccgggaacttctgcaggacggtaaggagacggggtctgaccaggtcgtggggttgggggtctgcgctgctccgcacctggacagcgaggtggacccaacccgttgctttgcagaaagttttccagtctggacgtgaccactcccctccgcccggccccctggcttgggtactgttctagccaacctatttactctgggactggctccctcttttctggagtcttggggacacttggtttctg

SEQ ID NO: 284315 - DNA, 428 bp, Homo sapiens
gtgtactcttgaaaataatgtgctttctctcattgttaggagtagtgttctataaatgtcaaacaggtcaagttaatgatagtattgtacaatcttctctagccttaccgataatgtttttactgttctattaactttttttttttttccctgagccagaatcttgctgcatcacccaggcaggagtacagtggtgctatcacagctcactgcagcctcaacctcctggactcaggcaatcctccttcctcagcctcccaggtagctgggaccacaggtgtgtaccacagtacctggctttttttatttttcccagtagatatggggtctccttaggttgcccaggctggtcttaaactgctggtctcaaggatcctcctgccctggcctctcaaagtgctggaattacagtcgtgagccaccacacc

SEQ ID NO: 284316 - DNA, 404 bp, Homo sapiens
tccattgatattctgaaaatgattttattctcactcctctcttttcctgtaggataaaagcaaaaattgttgaaccatacaataagatagttgcccggactgcacaactagcaagacttcaggtagtttcttacttttatttctttatactttattattcattttgttttcataagtggacaaaatttaagagtatgagtttggaagaagtaagagaatgggaacagaaggtaagagaaaaggagaaaaaaatactaaaaagccttaagatgtctagctcaaaaaatacaaatctaaagcaaattcttttcactgtcattgcagtgtataattgtttattaacttatatcttcttcaatttctttcatcaatgttttatagctttcaatgtatagatgcttcac

SEQ ID NO: 284317 - DNA, 762 bp, Homo sapiens
agcccctcatcccatggaggaccctcccttcactccactcacttagaggctgttctcacgttgatatccaagtcacccttgaacacaaactgaccaggtttccaatgaaaagacaggtggctccactcccagtgcatattttcagttgtgttgtatggatcctatgaccacccccgagaatttggtgagatatagaagggtctcagctcacctcccatttcacccatcacaaacgtccctcagccaaaccaactgcctcatctctactcacagtgaaagtcatggtagaatttgagtgggggcatgttcctctccactgccacgttaccccacggaagccccaagtgcaagatctgacgccgacgggagcaaggctgaccactctgctcggtgcccacaagtcgacccattagccgccagtcacggatctcaaacagcctcatctagagttcgagaaaagtcatactgataaggaaactccaccgagactgagccgaaagagaggagccaaacacggttccggagggtctgcagcgcagggaaggggttccggtggaggatcatctcttccagctcaggtagcagctgcacctccacctccttgaagttgaagatactattgccatcaaagccagcagccagctctggacagtatgcctgcagggaacctccatgccggctcagtgacacactctctgcagccagggtaatgaacttgtcctcagctacaaaagctgtgagcttggctgtgctcacctccag

SEQ ID NO: 284318 - DNA, 453 bp, Homo sapiens
cagcacactggagtttttgtccagaagtttgactttagaagataagaaataactgagcgtattacaagcaggagttagaggaagagactcagtacagaagagacaggaacaaaagttcacctccattcaatgggaaaggatacagatcaagagttcaggaaaagtaggagaaagaagctctattccagaagcagtctggagcacaaagaatccctaatcactgacattaagaaagaagaaaaatattcctaggacgatcctggagagcaaaggtcatcagcagtcacttgactttccttggatttctcaactgcagtagtcacatggtctgctgaaaatgaattctctttattttcatctgatttcaaggaattatggttttcagtgatttcttcatttggatctattttgagacagagtaatagcattaaaacccccttctgaattaataag

SEQ ID NO: 284319 - DNA, 2336 bp, Homo sapiens
tgcttgcctgcaaacctttacttctgaaatgacttccacggctgggacgggaaccttccacccacagctatgcctctgattggtgaatggtgaaggtgcctgtctaacttttctgtaaaaagaaccagctgcctccaggcagccagccctcaagcatcacttacaggaccagagggacaagacatgactgtgatgaggagctgctttcgccaatttaacaccaagaagaattgaggctgcttgggaggaaggccaggaggaacacgagactgagagatgaattttcaacagaggctgcaaagcctgtggactttagccagacccttctgccctcctttgctggcgacagcctctcaaatgcagatggttgtgctcccttgcctgggttttaccctgcttctctggagccaggtatcaggggcccagggccaagaattccactttgggccctgccaagtgaagggggttgttccccagaaactgtgggaagccttctgggctgtgaaagacactatgcaagctcaggataacatcacgagtgcccggctgctgcagcaggaggttctgcagaacgtctcggatgctgagagctgttaccttgtccacaccctgctggagttctacttgaaaactgttttcaaaaactaccacaatagaacagttgaagtcaggactctgaagtcattctctactctggccaacaactttgttctcatcgtgtcacaactgcaacccagtcaagaaaatgagatgttttccatcagagacagtgcacacaggcggtttctgctattccggagagcattcaaacagttggacgtagaagcagctctgaccaaagcccttggggaagtggacattcttctgacctggatgcagaaattctacaagctctgaatgtctagaccaggacctccctccccctggcactggtttgttccctgtgtcatttcaaacagtctcccttcctatgctgttcactggacacttcacgcccttggccatgggtcccattcttggcccaggattattgtcaaagaagtcattctttaagcagcgccagtgacagtcagggaaggtgcctctggatgctgtgaagagtctacagagaagattcttgtatttattacaactctatttaattaatgtcagtatttcaactgaagttctatttatttgtgagactgtaagttacatgaaggcagcagaatattgtgccccatgcttctttacccctcacaatccttgccacagtgtggggcagtggatgggtgcttagtaagtacttaataaactgtggtgctttttttggcctgtctttggattgttaaaaaacagagagggatgcttggatgtaaaactgaacttcagagcatgaaaatcacactgtcttctgatatctgcagggacagagcattggggtgggggtaaggtgcatctgtttgaaaagtaaacgataaaatgtggattaaagtgcccagcacaaagcagatcctcaataaacatttcatttcccacccacactcgccagctcaccccatcatccctttcccttggtgccctccttttttttttatcctagtcattcttccctaatcttccacttgagtgtcaagctgaccttgctgatggtgacattgcacctggatgtactatccaatctgtgatgacattccctgctaataaaagacaacataactcaagtctggcagactttcttctctatttctggatgaatgcccagtgagactgtgttgtacagctagaaaaggccttcttcccaatagcaaggctgtgcatctagcctcaagctctggctgaactttgtggtcgacatcaatctaaagatacagtgtctgactataaccttgttccaaaaacctaggcaaagagtatatgtaggaggtgggatatcacttccatgacataagtgctattgcagagccgtggccacccaggaactcctgactgctttccttcccctgcttgctatacattgtctggaactggctaagaaatggggaacatttgtgaaaaccaagaaatgtaatggttttggatgaataaaatagaccaaagttaaggtaagtgcacaaatatcagtgtcaggctatggaagaaagataaagagatacttttttttttttttttttagaggggagatgctgaggtcagggcacttatgtgcatcaagtgatggagacagagtaaagagaatttatggatatatatgcatatcttgctaataagtttggtttatcatcacatcaagataaattgcctttagcatagaacttgagataagtagacgttcactagcaagtgctaacatttgg

SEQ ID NO: 284320 - DNA, 2042 bp, Homo sapiens
ttgtgaaaaacaattatgggaaattatttttgcttttccaaaattatgacaacaaagaaaacccaaatttcatccccagcccccctaaaaacataaatgatttcgatcacttttttttttttgaggaagagatgcatcagcttttaaataaatggtgaagagcaataacatctgatggagaggggccacctgggctcatttcacctgtgcagtggattcaggtggtgggccatatccatcccatactgcagtttgtggttgctgttgttaggggtgccatatgtctttcccttgttctttgtccactgatattcactagcctgtttgtcctcacccctgaagcagataaacacatgtagatggaggaaaagtgacaggcaggtgggttcatcagtgggctcatcccaaaggtgacccatcccttggattggagtcaggtctattttaggcatggcaggttggaagaaagactattctcatagctaacatggctgaccttcaaccctcttttccctttagttggacgtagaagcagctctgaccaaagcccttggggaagtggacattcttctgacctggatgcagaaattctacaagctctgaatgtctagaccaggacctccctccccctggcactggtttgttccctgtgtcatttcaaacagtctcccttcctatgctgttcactggacacttcacgcccttggccatgggtcccattcttggcccaggattattgtcaaagaagtcattctttaagcagcgccagtgacagtcagggaaggtgcctctggatgctgtgaagagtctacagagaagattcttgtatttattacaactctatttaattaatgtcagtatttcaactgaagttctatttatttgtgagactgtaagttacatgaaggcagcagaatattgtgccccatgcttctttacccctcacaatccttgccacagtgtggggcagtggatgggtgcttagtaagtacttaataaactgtggtgctttttttggcctgtctttggattgttaaaaaacagagagggatgcttggatgtaaaactgaacttcagagcatgaaaatcacactgtcttctgatatctgcagggacagagcattggggtgggggtaaggtgcatctgtttgaaaagtaaacgataaaatgtggattaaagtgcccagcacaaagcagatcctcaataaacatttcatttcccacccacactcgccagctcaccccatcatccctttcccttggtgccctccttttttttttatcctagtcattcttccctaatcttccacttgagtgtcaagctgaccttgctgatggtgacattgcacctggatgtactatccaatctgtgatgacattccctgctaataaaagacaacataactcaagtctggcagactttcttctctatttctggatgaatgcccagtgagactgtgttgtacagctagaaaaggccttcttcccaatagcaaggctgtgcatctagcctcaagctctggctgaactttgtggtcgacatcaatctaaagatacagtgtctgactataaccttgttccaaaaacctaggcaaagagtatatgtaggaggtgggatatcacttccatgacataagtgctattgcagagccgtggccacccaggaactcctgactgctttccttcccctgcttgctatacattgtctggaactggctaagaaatggggaacatttgtgaaaaccaagaaatgtaatggttttggatgaataaaatagaccaaagttaaggtaagtgcacaaatatcagtgtcaggctatggaagaaagataaagagatacttttttttttttttttttagaggggagatgctgaggtcagggcacttatgtgcatcaagtgatggagacagagtaaagagaatttatggatatatatgcatatcttgctaataagtttggtttatcatcacatcaagataaattgcctttagcatagaacttgagataagtagacgttcactagcaagtgctaacatttgg

SEQ ID NO: 284321 - DNA, 1994 bp, Homo sapiens
tgcttgcctgcaaacctttacttctgaaatgacttccacggctgggacgggaaccttccacccacagctatgcctctgattggtgaatggtgaaggtgcctgtctaacttttctgtaaaaagaaccagctgcctccaggcagccagccctcaagcatcacttacaggaccagagcaagctcaggataacatcacgagtgcccggctgctgcagcaggaggttctgcagaacgtctcggatgctgagagctgttaccttgtccacaccctgctggagttctacttgaaaactgttttcaaaaactaccacaatagaacagttgaagtcaggactctgaagtcattctctactctggccaacaactttgttctcatcgtgtcacaactgcaacccagtcaagaaaatgagatgttttccatcagagacagtgcacacaggcggtttctgctattccggagagcattcaaacagttggacgtagaagcagctctgaccaaagcccttggggaagtggacattcttctgacctggatgcagaaattctacaagctctgaatgtctagaccaggacctccctccccctggcactggtttgttccctgtgtcatttcaaacagtctcccttcctatgctgttcactggacacttcacgcccttggccatgggtcccattcttggcccaggattattgtcaaagaagtcattctttaagcagcgccagtgacagtcagggaaggtgcctctggatgctgtgaagagtctacagagaagattcttgtatttattacaactctatttaattaatgtcagtatttcaactgaagttctatttatttgtgagactgtaagttacatgaaggcagcagaatattgtgccccatgcttctttacccctcacaatccttgccacagtgtggggcagtggatgggtgcttagtaagtacttaataaactgtggtgctttttttggcctgtctttggattgttaaaaaacagagagggatgcttggatgtaaaactgaacttcagagcatgaaaatcacactgtcttctgatatctgcagggacagagcattggggtgggggtaaggtgcatctgtttgaaaagtaaacgataaaatgtggattaaagtgcccagcacaaagcagatcctcaataaacatttcatttcccacccacactcgccagctcaccccatcatccctttcccttggtgccctccttttttttttatcctagtcattcttccctaatcttccacttgagtgtcaagctgaccttgctgatggtgacattgcacctggatgtactatccaatctgtgatgacattccctgctaataaaagacaacataactcaagtctggcagactttcttctctatttctggatgaatgcccagtgagactgtgttgtacagctagaaaaggccttcttcccaatagcaaggctgtgcatctagcctcaagctctggctgaactttgtggtcgacatcaatctaaagatacagtgtctgactataaccttgttccaaaaacctaggcaaagagtatatgtaggaggtgggatatcacttccatgacataagtgctattgcagagccgtggccacccaggaactcctgactgctttccttcccctgcttgctatacattgtctggaactggctaagaaatggggaacatttgtgaaaaccaagaaatgtaatggttttggatgaataaaatagaccaaagttaaggtaagtgcacaaatatcagtgtcaggctatggaagaaagataaagagatacttttttttttttttttttagaggggagatgctgaggtcagggcacttatgtgcatcaagtgatggagacagagtaaagagaatttatggatatatatgcatatcttgctaataagtttggtttatcatcacatcaagataaattgcctttagcatagaacttgagataagtagacgttcactagcaagtgctaacatttgg

SEQ ID NO: 284322 - DNA, 2072 bp, Homo sapiens
gcgagctgtattcaatatgcttatgttttatttatgtaggtggcatttaaaatacatgatgtgtttagggttacattgtccacagaaagcatcaaataccactcctctccccgccaaaaccaaataaacaaagccaactctttggcaacagttgtgttaaataaaatcccaggtcacacttgtttctggctcccaagcctgggtcactgctacatggattgcgccaaaaaattcccagcttcaacactgctagattaaaattgctggcatttttaaatcacagcaaagcttttcacaatgccctcaagtccaagaggacaaaggagaaagcaacatgaacggcagatcctcatgtgaaagggaaggaaagtcactgggagggagcatgcagggaagaagtcaaggcagccctggaattctactccgtgctcaataaaaaaaaaacgtgaagaagcaatacatcatgcaaacgaaataatgaccggaagtgggcgcatctagttagaatgaagtgactttcgtaaggagtcaatgttcgcgaactgaaacatgagttcaacctccttgtgccgtctctgggtgttttgcacgtgtgtaaataccggcccgttttccccagcatggccctaacccatggacactagggagggtgccactgagcaaaaattttttgctaaaaataattagcaaaaatccaagaaaaaaatatggaatctagcaaaacctacaccatatttgaagttgaatttgcactacctgcaaagcaaataatttaaaagaataaacattgtgaacatcaattcccatcacagcaagccctggatgaaaacatggacctcttggaaggtataactggctttgaagactctgtccgaaagtgtaagtccctctctgaggctgggctccccaaggggaaggggtagggagtggcagccaggtccggggggacagctgctcaccggttttgtctctgacctccacagttatctgccatgttgtgggtatcacttaccagcacattgaccgctggctgctggccgagatgctcggggatctgtcgggtaacgccctctgggtcctggtgcacatctgggaggttgggggtggctagggcagtggacctcagtcagctcctccaacaggcctgtctgggtctcatcaggtcagcatggaaggcccagcccaaggaggaaataagaacttggtataagacagtctctgccttgagggagatcctatgccatttgctcatttattttgcattaattgagtgcctaccgtgtgtcagtgtgctaaactgggcgtgcagcagtaaacaaagtgggatggctccaattcattctcatggaggtagcaaagcacatggcgacatggaggtgtccagtggtgattcctgtcatgaaggaaagcaagacagctcacagaccagcggcatctgagcccttacctccgtagagagaggcccgtggcctgaggtagtgcagaggaggatagtagagcagggccctgacttgtaacgttcatgggtagccagggtgtatgtggccagagcagagtaagcatgggcgaaagtagagagctgggggttggaggggcatttccaggtcatgtggggcctcgggaggaccttgtcctttcccctgactgagaaggagccaccggagggctctgagcagggtagggctctgatcagatggatattttttaaagatccccccaagaacaaaaaaagaaaaaataacttatttgcttacttttgtaaaaagaaacgtagaaaaggaagtcaagaaactaaggaaggccgggtgcggtggctcccgcctgtaatccagcactttgggaggccgaggtgggcggatcatctgtggtcaggagttcgagaccagcctgcccaacgtggtaaaaccccctctctactaaaaatacaaaaaattgctgggtgtggtggcgtgcacctgtagtcccggctacttgggaggctgaggcaggagaattgcttcaacgcaggaggcggaggttgcagtgagctgagatcgcaccattgcactagtgataagatcgaaactccatct

SEQ ID NO: 284323 - DNA, 2107 bp, Homo sapiens
gtagacctcttggctttcacttccttcctagtgctatgagcaactgccatggtccaggagccagctggccttgcaccttgactccctggcactggtcacaaagcgtagcagttggtcaggggcagaatggtttgtcttggtaaatcacagcagggggtggaccctgctagggtccacatccgaacctgggcctctcagcctgctgattccaggctgggcgtggcagtgtatgtctggatcaggcagtgagctgtcaggcccctagcctgccccctgcccagccacaggcctcagtgcaggctttgtcttcaaagacagagctgtgagtgcccaaggagctttgactgctcatcaggtgtgtgtgctgagatgggtttgagcccaggtcagggctcctgccagggcctgtcatcccttcacagtgagcctgtgccttagcccttgcacagccaccaatgaatgctttgcccgatgtccccagatgccaccctgggtccaggctggccttgggagccagctctagagcctgctacccaagtccacccaccctgctgacatgcctgcctctggagcccccactcccagccgacacgtctcacttcccacccttgcaggctatgaagagaccctgacccgcctggctgccattctcgccaaacactttgccgacgcacgcattgtgggcactgacatccgagactcactgatgcaggccctggccagctacgtgtgctacccacactccctgcgggctgtggagcgaatccccgaggagcagcgtatcgccatggtgaggaacctcctggcgccctatgagcagcggccctgggcccagaccaactggatcctggtgcggctctggaggggctgtggcttcgggtaccgctatacacggctgccacatctgctgaaaaccaaacttgaggacgccaatttgcccagcctccagaagccctgcccttccaccctgctgcagcagcacatggcggacctcctacagcagggtcctgatgtggcacccagcttcctcaacagcgtcctcaatcagctcaactgggccttctctgaattcattggcatgatccaagagatccagcaggctgctgagcgcctggagcggaactttgtggacagccggcagctcaaggtatgtgccacctgctttgacctctcggtcagcctgctgcgtgtcttggagatgactatcacactggtgcctgagatattccttgactggacccggcctacctctgagatgctgctgcggcgtcttgcacagctgctaaaccaggtgctgaaccgggtgacagctgagaggaacctgtttgatcgtgtggtcaccctacggctgcctggcctagagagcgtggaccactatcccattctggtggcagtgacgggcatcctggtgcagctcctggtgcgtggcccagcctcagagagagagcaagccacatcagtgctcctggcagatccctgcttccagctacgctcaatatgctatctcctgggacagccagagcccccagcacctggcactgctctgccagcccctgaccggaagcgcttctccctgcagagctatgcggattatatcagtgccgatgagctggcccaagtggaacagatgctggcgcacctgacctctgcatctgcccaggcagcagctgcctccctgcccaccagtgaggaggacctctgccccatctgctatgcccaccccatctctgctgtgttccagccctgtggccacaagtcctgcaaagcctgtatcaaccagcacctgatgaacaacaaggactgcttcttctgcaaaaccaccatcgtgtctgtagaggactgggagaagggagccaatacgagtactacctcctcagctgcctagccctcacagcctgtgccatcctggaacctccacctttgaacccagagccaggctgggccctatttatgagctccctttgcccttctcctgtatcccacaccaccacatccaacctccttgcctgcctgtatcctcattggtgggagcccagccatggccctaattgtgcctgagcttgactttcagtcagggccacagtgagcattaaattattattccata

SEQ ID NO: 284324 - DNA, 983 bp, Homo sapiens
  misc_feature (835)..(835): n is a, c, g, or t
cggacgcgtgggtcgacccacgcgtccgggtgacagctgagaggaacctgtttgatcgtgtggtcaccctacggctgcctggcctagagagcgtggaccactatcccattctggtggcagtgacgggcatcctggtgcagctcctggtgcgtggcccagcctcagagagagagcaagccacatcagtgctcctggcagatccctgcttccagctacgctcaatatgctatctcctgggacagccagagcccccagcacctggcactgctctgccagcccctgaccggaagcgcttctccctgcagagctatgcggattatatcagtgccgatgagctggcccaagtggaacagatgctggcgcacctgacctctgcatctgcccaggcagcagctgcctccctgcccaccagtgaggaggacctctgccccatctgctatgcccaccccatctctgctgtgttccagccctgtggccacaagtcctgcaaagcctgtatcaaccagcacctgatgaacaacaaggactgcttcttctgcaaaaccaccatcgtgtctgtagaggactgggagaagggagccaatacgagtactacctcctcagctgcctagccctcacagcctgtgccatcctggaacctccacctttgaacccagagccaggctgggccctatttatgagctccctttgcccttctcctgtatcccacaccaccacatccaacctccttgcctgcctgtatcctcattggtgggagcccagccatggccctaattgtgcctgagcttgactttcagtcagggccacagtgagcattaaattattattccataanaaaaaaaagggggggggctaaaatatcccgaggggccagttacgtacccgttttgtcaaagggccaaggaggataaacagcacggcgggtaacggggggaagcgtggttggaggccccgggggatggcccaaaagcggaaaaaggggg

SEQ ID NO: 284325 - DNA, 668 bp, Homo sapiens
ccattccctctccgttttcagccctcaggtgtgattgtgatcttgcattattctaaaaagcagccagagccctgggacctgcagccacagagccaacagctccctagcaaaggaaaacagacaagatggaacacggctatgaagagaccctgacccgcctggctgccattctcgccaaacactttgccgacgcacgcattgtgggcactgacatccgagactcactgatgcaggccctggccagctacgtgtgctacccacactccctgcgggctgtggagcgaatccccgaggagcagcgtatcgccatggtgaggaacctcctggcgccctatgagcagcggccctgggcccagaccaactggatcctggtgcggctctggaggggctgtggcttcgggtaccgctatacacggctgccacatctgctgaaaaccaaacttgaggacgccaatttgcccagcctccagaagccctgcccttccaccctgctgcagcagcacatggcggacctcctacagcagggtcctgatgtggcacccagcttctcgggtcctcaaccaggcccaggggccacccccaacccacggactgtccacagatcacacgagcagaccgccgcacggacaagggagacccgcgccccggcgatccccaccacggccccg

SEQ ID NO: 284326 - DNA, 591 bp, Homo sapiens
cgactcttagaggatccccactgcggttgcctcgactgtgcgctcagctcttggagcgggctgggtgtttggggccagcggcggcagcggcaggcacggcggcagcagcggcagggtggggcgaacaggtagagcagcacgagcacaaggcccacggcacagcccagcagtgtggtgaagcctgtgttgaaagcctcgggctctgggcgcggaaagtgcacgctcacgttgtactcgtgcgtctggttgtggtgcaggcggggcccagtggccaggcacacgaagagtcccgcatgctgctcctgtacgttgcctatggccaagctgccgtcggccagcaccgcgatgctgccatcgcgggatcctggcgccctgagaagctcctgctgcggcgaaacccaggcaatgcgcatggccgggacgctggtgttgcagtaaagcctcagggaccgacccaccagcgcgtacaggtgctcttccggccgctctaggccaagagctggggccgacgagcagttctcaaagacgcggctgtgctggaagaagcgcacgcgggacgcgggtaccttgaaggccaagcatacgtactcg

SEQ ID NO: 284327 - DNA, 440 bp, Homo sapiens
ggctggaggctcagcgcgcaagcgtgcgcgtgatttggccctgaacggacgccgtagccaagaggttgggcggatgttgtgagccgggtcgctgcggccgaggctccggcccccaggaccactggctgcccatgagagatgaaggatggcatccaagggggccggcatgtctttctcccgcaagagctataggctgacctcagatgctgagaaatccagggtcacaggcattgtgcaggagaagctgctgaatgactacctgaaccgcatcttttcctcttctgaacatgcacccccagcagccaccagcaggaaacccctgaacttccagaacctgccagaacatttggaccagttgctacaggtggacaatgaggaggaggaaagccaggcttgactttcagtcagggccacagtgagcattaaattattattccata

SEQ ID NO: 284328 - DNA, 3041 bp, Homo sapiens
agttgatgatgtctctgcttcggctgtaccgattctcacccattgtcccagacctgggcctacagatccattacctgcggctcactatcgccatcctgaggcatgagaagtcccgcaagtttctgcttagcaatgtcctcttcgacgtgctccgctccgtcgtcttcttttacatcaagagccccctgcgtgtggaggaggccggcctgcaggagctcattcccaccacctggtggccccactgctccagtagggagggcaaagagagcacggagatgaaggaggagaccgcagaggagcggctgcggcggcgagcctacgaacggggctgtcagcggctcaggaagcgcatcgaaggtcagcccgccttgggcacggggtagggtgggaggtgtgtgtgtgcacatgagggtgcttggaggtgcccatgtctaggtgggacttggggaaccctggtggtggagccctggcccaaacctgccccccatctcctggagcctgagggccatgttcctcacctgacctccagtggtggaagaactacaggtccagatcctgaagctgctgctggacaataaagatgacaatgggggtgaagcttctaggtatatcttcctgaccaagtttcgcaagtttctgcaggagaacgccagtggccgggggaacatgcccatgctctgcccccctgagtacatggtctgcttcttacaccggctgatctctgccctgcgctactattgggatgaatacaaggcttccaatcctcatgcttccttcagtgaggaggcctacatcccgccccaggtcttctataatggcaaggtggactactttgacctgcagcgcctggggggcctcctctcgcacctgcggaagaccctcaaagatgaccttgcttccaaagccaacattgtgatcgacccactggagctccagtcaaccgccatggatgacctagatgaggatgaggagccagccccagctatggcccagcgccccatgcaggccctggctgttggggggccactgcccctgccccggcccggctggctcagttctccaactttgggccgagccaaccgcttcctcagcacagcggctgtgagcctcatgaccccacggcggcctctgagcacctcggagaaagtgaaggtccgcacgctgagcgtggagcagaggacccgtgaggacattgaaggcagccactggaatgagggcttgctgctggggcggccccccgaggagcctgagcagcccctcaccgagaactcgctgctggaagtcctggatggggcggtcatgatgtacaacctcagcgtacaccagcagctgggcaagatggtgggtgtctccgatgatgtcaatgaatacgctatggctctgagggacacagaggacaagctccgccggtgccccaagaggaggaaggacatccttgcagagttgaccaagagccagaaggttttctcagaaaagctggaccacctgagccgccgtcttgcctgggtccatgccactgtctactcccaggagaagatgctggacatctactggctgctgcgcgtctgcctgcggaccattgagcacggtgatcgcacagggtctctctttgccttcatgcccgagttctacctgagcgtggccatcaacagctacagtgctctcaagaattactttggtcccgtgcacagcatggaggagctcccaggctatgaagagaccctgacccgcctggctgccattctcgccaaacactttgccgacgcacgcattgtgggcactgacatccgagactcactgatgcaggccctggccagctacgtgtgctacccacactccctgcgggctgtggagcgaatccccgaggagcagcgtatcgccatggtgaggaacctcctggcgccctatgagcagcggccctgggcccagaccaactggatcctggtgcggctctggaggggctgtggcttcgggtaccgctatacacggctgccacatctgctgaaaaccaaacttgaggacgccaatttgcccagcctccagaagccctgcccttccaccctgctgcagcagcacatggcggacctcctacagcagggtcctgatgtggcacccagcttcctcaacagcgtcctcaatcagctcaactgggccttctctgaattcattggcatgatccaagagatccagcaggctgctgagcgcctggagcggaactttgtggacagccggcagctcaaggtatgtgccacctgctttgacctctcggtcagcctgctgcgtgtcttggagatgactatcacactggtgcctgagatattccttgactggacccggcctacctctgagatgctgctgcggcgtcttgcacagctgctaaaccaggtgctgaaccgggtgacagctgagaggaacctgtttgatcgtgtggtcaccctacggctgcctggcctagagagcgtggaccactatcccattctggtggcagtgacgggcatcctggtgcagctcctggtgcgtggcccagcctcagagagagagcaagccacatcagtgctcctggcagatccctgcttccagctacgctcaatatgctatctcctgggacagccagagcccccagcacctggcactgctctgccagcccctgaccggaagcgcttctccctgcagagctatgcggattatatcagtgccgatgagctggcccaagtggaacagatgctggcgcacctgacctctgcatctgcccaggcagcagctgcctccctgcccaccagtgaggaggacctctgccccatctgctatgcccaccccatctctgctgtgttccagccctgtggccacaagtcctgcaaagcctgtatcaaccagcacctgatgaacaacaaggactgcttcttctgcaaaaccaccaaccaccacatccaacctccttgcctgcctgtatcctcattggtgggagcccagccatggccctaattgtgcctgagcttgactttcagtcagggccacagtgagcattaaattattattccata

SEQ ID NO: 284329 - DNA, 2688 bp, Homo sapiens
ccctagattgagaagtttcaatagcagtgagaacgcagtggcgggggaacatgcccatgctctgccccccaggcagggcaaagagagcacggagatgaaggaggagaccgcagaggagcggctgcggcggcgagcctacgaacggggctgtcagcggctcaggaagcgcatcgaagtggtggaagaactacaggtccagatcctgaagctgctgctggacaataaagatgacaatgggggtgaagcttctaggtatatcttcctgaccaagtttcgcaagtttctgcaggagaacgccagtggccgggggaacatgcccatgctctgcccccctgagtacatggtctgcttcttacaccggctgatctctgccctgcgctactattgggatgaatacaaggcttccaatcctcatgcttccttcagtgaggaggcctacatcccgccccaggtcttctataatggcaaggtggactactttgacctgcagcgcctggggggcctcctctcgcacctgcggaagaccctcaaagatgaccttgcttccaaagccaacattgtgatcgacccactggagctccagtcaaccgccatggatgacctagatgaggatgaggagccagccccagctatggcccagcgccccatgcaggccctggctgttggggggccactgcccctgccccggcccggctggctcagttctccaactttgggccgagccaaccgcttcctcagcacagcggctgtgagcctcatgaccccacggcggcctctgagcacctcggagaaagtgaaggtccgcacgctgagcgtggagcagaggacccgtgaggacattgaaggcagccactggaatgagggcttgctgctggggcggccccccgaggagcctgagcagcccctcaccgagaactcgctgctggaagtcctggatggggcggtcatgatgtacaacctcagcgtacaccagcagctgggcaagatggtgggtgtctccgatgatgtcaatgaatacgctatggctctgagggacacagaggacaagctccgccggtgccccaagaggaggaaggacatccttgcagagttgaccaagagccagaaggttttctcagaaaagctggaccacctgagccgccgtcttgcctgggtccatgccactgtctactcccaggagaagatgctggacatctactggctgctgcgcgtctgcctgcggaccattgagcacggtgatcgcacagggtctctctttgccttcatgcccgagttctacctgagcgtggccatcaacagctacagtgctctcaagaattactttggtcccgtgcacagcatggaggagctcccaggctatgaagagaccctgacccgcctggctgccattctcgccaaacactttgccgacgcacgcattgtgggcactgacatccgagactcactgatgcaggccctggccagctacgtgtgctacccacactccctgcgggctgtggagcgaatccccgaggagcagcgtatcgccatggtgaggaacctcctggcgccctatgagcagcggccctgggcccagaccaactggatcctggtgcggctctggaggggctgtggcttcgggtaccgctatacacggctgccacatctgctgaaaaccaaacttgaggacgccaatttgcccagcctccagaagccctgcccttccaccctgctgcagcagcacatggcggacctcctacagcagggtcctgatgtggcacccagcttcctcaacagcgtcctcaatcagctcaactgggccttctctgaattcattggcatgatccaagagatccagcaggctgctgagcgcctggagcggaactttgtggacagccggcagctcaaggtatgtgccacctgctttgacctctcggtcagcctgctgcgtgtcttggagatgactatcacactggtgcctgagatattccttgactggacccggcctacctctgagatgctgctgcggcgtcttgcacagctgctaaaccaggtgctgaaccgggtgacagctgagaggaacctgtttgatcgtgtggtcaccctacggctgcctggcctagagagcgtggaccactatcccattctggtggcagtgacgggcatcctggtgcagctcctggtgcgtggcccagcctcagagagagagcaagccacatcagtgctcctggcagatccctgcttccagctacgctcaatatgctatctcctgggacagccagagcccccagcacctggcactgctctgccagcccctgaccggaagcgcttctccctgcagagctatgcggattatatcagtgccgatgagctggcccaagtggaacagatgctggcgcacctgacctctgcatctgcccaggcagcagctgcctccctgcccaccagtgaggaggacctctgccccatctgctatgcccaccccatctctgctgtgttccagccctgtggccacaagtcctgcaaagcctgtatcaaccagcacctgatgaacaacaaggactgcttcttctgcaaaaccaccaaccaccacatccaacctccttgcctgcctgtatcctcattggtgggagcccagccatggccctaattgtgcctgagcttgactttcagtcagggccacagtgagcattaaattattattccata

SEQ ID NO: 284330 - DNA, 3470 bp, Homo sapiens
agttgatgatgtctctgcttcggctgtaccgattctcacccattgtcccagacctgggcctacagatccattacctgcggctcactatcgccatcctgaggcatgagaagtcccgcaagtttctgcttagcaatgtcctcttcgacgtgctccgctccgtcgtcttcttttacatcaagagccccctgcgtgtggaggaggccggcctgcaggagctcattcccaccacctggtggccccactgctccagtagggagggcaaagagagcacggagatgaaggaggagaccgcagaggagcggctgcggcggcgagcctacgaacggggctgtcagcggctcaggaagcgcatcgaaggtcagcccgccttgggcacggggtagggtgggaggtgtgtgtgtgcacatgagggtgcttggaggtgcccatgtctaggtgggacttggggaaccctggtggtggagccctggcccaaacctgccccccatctcctggagcctgagggccatgttcctcacctgacctccagtggtggaagaactacaggtccagatcctgaagctgctgctggacaataaagatgacaatgggggtgaagcttctaggtatatcttcctgaccaagtttcgcaagtttctgcaggagaacgccagtggccgggggaacatgcccatgctctgcccccctgagtacatggtctgcttcttacaccggctgatctctgccctgcgctactattgggatgaatacaaggcttccaatcctcatgcttccttcagtgaggaggcctacatcccgccccaggtcttctataatggcaaggtggactactttgacctgcagcgcctggggggcctcctctcgcacctgcggaagaccctcaaagatgaccttgcttccaaagccaacattgtgatcgacccactggagctccagtcaaccgccatggatgacctagatgaggatgaggagccagccccagctatggcccagcgccccatgcaggccctggctgttggggggccactgcccctgccccggcccggctggctcagttctccaactttgggccgagccaaccgcttcctcagcacagcggctgtgagcctcatgaccccacggcggcctctgagcacctcggagaaagtgaaggtccgcacgctgagcgtggagcagaggacccgtgaggacattgaaggcagccactggaatgagggcttgctgctggggcggccccccgaggagcctgagcagcccctcaccgagaactcgctgctggaagtcctggatggggcggtcatgatgtacaacctcagcgtacaccagcagctgggcaagatggtgggtgtctccgatgatgtcaatgaatacgctatggctctgagggacacagaggacaagctccgccggtgccccaagaggaggaaggacatccttgcagagttgaccaagagccagaaggttttctcagaaaagctggaccacctgagccgccgtcttgcctgggtccatgccactgtctactcccaggagaagatgctggacatctactggctgctgcgcgtctgcctgcggaccattgagcacggtgatcgcacagggtctctctttgccttcatgcccgagttctacctgagcgtggccatcaacagctacagtgctctcaagaattactttggtcccgtgcacagcatggaggagctcccaggctatgaagagaccctgacccgcctggctgccattctcgccaaacactttgccgacgcacgcattgtgggcactgacatccgagactcactgatgcaggccctggccagctacgtgtgctacccacactccctgcgggctgtggagcgaatccccgaggagcagcgtatcgccatggtgaggaacctcctggcgccctatgagcagcggccctgggcccagaccaactggatcctggtgcggctctggaggggctgtggcttcgggtaccgctatacacggctgccacatctgctgaaaaccaaacttgaggacgccaatttgcccagcctccagaagccctgcccttccaccctgctgcagcagcacatggcggacctcctacagcagggtcctgatgtggcacccagcttcctcaacagcgtcctcaatcagctcaactgggccttctctgaattcattggcatgatccaagagatccagcaggctgctgagcgcctggagcggaactttgtggacagccggcagctcaaggtatgtgccacctgctttgacctctcggtcagcctgctgcgtgtcttggagatgactatcacactggtgcctgagatattccttgactggacccggcctacctctgagatgctgctgcggcgtcttgcacagctgctaaaccaggtgctgaaccgggtgacagctgagaggaacctgtttgatcgtgtggtcaccctacggctgcctggcctagagagcgtggaccactatcccattctggtggcagtgacgggcatcctggtgcagctcctggtgcgtggcccagcctcagagagagagcaagccacatcagtgctcctggcagatccctgcttccagctacgctcaatatgctatctcctgggacagccagagcccccagcacctggcactgctctgccagcccctgaccggaagcgcttctccctgcagagctatgcggattatatcagtgccgatgagctggcccaagtggaacagatgctggcgcacctgacctctgcatctgcccaggcagcagctgcctccctgcccaccagtgaggaggacctctgccccatctgctatgcccaccccatctctgctgtgttccagccctgtggccacaagtcctgcaaagcctgtatcaaccagcacctgatgaacaacaaggactgcttcttctgcaaaaccaccatcgtgtctgtagaggactgggagaagggagccaatacgagtactacctcctcagctgcctagccctcacagcctgtgccatcctggaacctccacctttgaacccagagccaggctgggccctatttatgagctccctttgcccttctcctgtatcccacaccaccacatccaacctccttgcctgcctgtatcctcattggtgggagcccagccatggccctaattgtgcctgagcttgactttcagtcagggccacagtgagcattaaattattattccatacagccctggccctggcccttcttgagggagtggggtttgtggggtgtgcccagcagggatcctgccagatgatgtccacatgagaaggcaggtgtccaacagcttcagcttcacccagtgccccccagacaaataatgacaagtccagggtcttctgatgtgtcaggccagcactccccttgctgatgggaaaaccggggctcggccagccccactgcatcccctcacatgatgatacgaggctctggcactgactcgccaatagactt

SEQ ID NO: 284331 - DNA, 3113 bp, Homo sapiens
agttgatgatgtctctgcttcggctgtaccgattctcacccattgtcccagacctgggcctacagatccattacctgcggctcactatcgccatcctgaggcatgagaagtcccgcaagtttctgcttagcaatgtcctcttcgacgtgctccgctccgtcgtcttcttttacatcaagagccccctgcgtgtggaggaggccggcctgcaggagctcattcccaccacctggtggccccactgctccagtagggagggcaaagagagcacggagatgaaggaggagaccgcagaggagcggctgcggcggcgagcctacgaacggggctgtcagcggctcaggaagcgcatcgaaggtcagcccgccttgggcacggggtagggtgggaggtgtgtgtgtgcacatgagggtgcttggaggtgcccatgtctaggtgggacttggggaaccctggtggtggagccctggcccaaacctgccccccatctcctggagcctgagggccatgttcctcacctgacctccagtggtggaagaactacaggtccagatcctgaagctgctgctggacaataaagatgacaatgggggtgaagcttctaggtatatcttcctgaccaagtttcgcaagtttctgcaggagaacgccagtggccgggggaacatgcccatgctctgcccccctgagtacatggtctgcttcttacaccggctgatctctgccctgcgctactattgggatgaatacaaggcttccaatcctcatgcttccttcagtgaggaggcctacatcccgccccaggtcttctataatggcaaggtggactactttgacctgcagcgcctggggggcctcctctcgcacctgcggaagaccctcaaagatgaccttgcttccaaagccaacattgtgatcgacccactggagctccagtcaaccgccatggatgacctagatgaggatgaggagccagccccagctatggcccagcgccccatgcaggccctggctgttggggggccactgcccctgccccggcccggctggctcagttctccaactttgggccgagccaaccgcttcctcagcacagcggctgtgagcctcatgaccccacggcggcctctgagcacctcggagaaagtgaaggtccgcacgctgagcgtggagcagaggacccgtgaggacattgaaggcagccactggaatgagggcttgctgctggggcggccccccgaggagcctgagcagcccctcaccgagaactcgctgctggaagtcctggatggggcggtcatgatgtacaacctcagcgtacaccagcagctgggcaagatggtgggtgtctccgatgatgtcaatgaatacgctatggctctgagggacacagaggacaagctccgccggtgccccaagaggaggaaggacatccttgcagagttgaccaagagccagaaggttttctcagaaaagctggaccacctgagccgccgtcttgcctgggtccatgccactgtctactcccaggagaagatgctggacatctactggctgctgcgcgtctgcctgcggaccattgagcacggtgatcgcacagggtctctctttgccttcatgcccgagttctacctgagcgtggccatcaacagctacagtgctctcaagaattactttggtcccgtgcacagcatggaggagctcccaggctatgaagagaccctgacccgcctggctgccattctcgccaaacactttgccgacgcacgcattgtgggcactggcgtatcgccatggtgaggaacctcctggcgccctatgagcagcggccctgggcccagaccaactggatcctggtgcggctctggaggggctgtggcttcgggtaccgctatacacggctgccacatctgctgaaaaccaaacttgaggacgccaatttgcccagcctccagaagccctgcccttccaccctgctgcagcagcacatggcggacctcctacagcagggtcctgatgtggcacccagcttcctcaacagcgtcctcaatcagctcaactgggccttctctgaattcattggcatgatccaagagatccagcaggctgctgagcgcctggagcggaactttgtggacagccggcagctcaaggtatgtgccacctgctttgacctctcggtcagcctgctgcgtgtcttggagatgactatcacactggtgcctgagatattccttgactggacccggcctacctctgagatgctgctgcggcgtcttgcacagctgctaaaccaggtgctgaaccgggtgacagctgagaggaacctgtttgatcgtgtggtcaccctacggctgcctggcctagagagcgtggaccactatcccattctggtggcagtgacgggcatcctggtgcagctcctggtgcgtggcccagcctcagagagagagcaagccacatcagtgctcctggcagatccctgcttccagctacgctcaatatgctatctcctgggacagccagagcccccagcacctggcactgctctgccagcccctgaccggaagcgcttctccctgcagagctatgcggattatatcagtgccgatgagctggcccaagtggaacagatgctggcgcacctgacctctgcatctgcccaggcagcagctgcctccctgcccaccagtgaggaggacctctgccccatctgctatgcccaccccatctctgctgtgttccagccctgtggccacaagtcctgcaaagcctgtatcaaccagcacctgatgaacaacaaggactgcttcttctgcaaaaccaccatcgtgtctgtagaggactgggagaagggagccaatacgagtactacctcctcagctgcctagccctcacagcctgtgccatcctggaacctccacctttgaacccagagccaggctgggccctatttatgagctccctttgcccttctcctgtatcccacaccaccacatccaacctccttgcctgcctgtatcctcattggtgggagcccagccatggccctaattgtgcctgagcttgactttcagtcagggccacagtgagcattaaattattattccata

SEQ ID NO: 284332 - DNA, 1628 bp, Homo sapiens
ccattccctctccgttttcagccctcaggtgtgattgtgatcttgcattattctaaaaagcagccagagccctgggacctgcagccacagagccaacagctccctagcaaaggaaaacagacaagatggaacacggctatgaagagaccctgacccgcctggctgccattctcgccaaacactttgccgacgcacgcattgtgggcactgacatccgagactcactgatgcaggccctggccagctacgtgtgctacccacactccctgcgggctgtggagcgaatccccgaggagcagcgtatcgccatggtgaggaacctcctggcgccctatgagcagcggccctgggcccagaccaactggatcctggtgcggctctggaggggctgtggcttcgggtaccgctatacacggctgccacatctgctgaaaaccaaacttgaggacgccaatttgcccagcctccagaagccctgcccttccaccctgctgcagcagcacatggcggacctcctacagcagggtcctgatgtggcacccagcttcctcaacagcgtcctcaatcagctcaactgggccttctctgaattcattggcatgatccaagagatccagcaggctgctgagcgcctggagcggaactttgtggacagccggcagctcaaggtatgtgccacctgctttgacctctcggtcagcctgctgcgtgtcttggagatgactatcacactggtgcctgagatattccttgactggacccggcctacctctgagatgctgctgcggcgtcttgcacagctgctaaaccaggtgctgaaccgggtgacagctgagaggaacctgtttgatcgtgtggtcaccctacggctgcctggcctagagagcgtggaccactatcccattctggtggcagtgacgggcatcctggtgcagctcctggtgcgtggcccagcctcagagagagagcaagccacatcagtgctcctggcagatccctgcttccagctacgctcaatatgctatctcctgggacagccagagcccccagcacctggcactgctctgccagcccctgaccggaagcgcttctccctgcagagctatgcggattatatcagtgccgatgagctggcccaagtggaacagatgctggcgcacctgacctctgcatctgcccaggcagcagctgcctccctgcccaccagtgaggaggacctctgccccatctgctatgcccaccccatctctgctgtgttccagccctgtggccacaagtcctgcaaagcctgtatcaaccagcacctgatgaacaacaaggactgcttcttctgcaaaaccaccatcgtgtctgtagaggactgggagaagggagccaatacgagtactacctcctcagctgcctagccctcacagcctgtgccatcctggaacctccacctttgaacccagagccaggctgggccctatttatgagctccctttgcccttctcctgtatcccacaccaccacatccaacctccttgcctgcctgtatcctcattggtgggagcccagccatggccctaattgtgcctgagcttgactttcagtcagggccacagtgagcattaaattattattccata

SEQ ID NO: 284333 - DNA, 3351 bp, Homo sapiens
  misc_feature (3203)..(3203): n is a, c, g, or t
agttgatgatgtctctgcttcggctgtaccgattctcacccattgtcccagacctgggcctacagatccattacctgcggctcactatcgccatcctgaggcatgagaagtcccgcaagtttctgcttagcaatgtcctcttcgacgtgctccgctccgtcgtcttcttttacatcaagagccccctgcgtgtggaggaggccggcctgcaggagctcattcccaccacctggtggccccactgctccagtagggagggcaaagagagcacggagatgaaggaggagaccgcagaggagcggctgcggcggcgagcctacgaacggggctgtcagcggctcaggaagcgcatcgaaggtcagcccgccttgggcacggggtagggtgggaggtgtgtgtgtgcacatgagggtgcttggaggtgcccatgtctaggtgggacttggggaaccctggtggtggagccctggcccaaacctgccccccatctcctggagcctgagggccatgttcctcacctgacctccagtggtggaagaactacaggtccagatcctgaagctgctgctggacaataaagatgacaatgggggtgaagcttctaggtatatcttcctgaccaagtttcgcaagtttctgcaggagaacgccagtggccgggggaacatgcccatgctctgcccccctgagtacatggtctgcttcttacaccggctgatctctgccctgcgctactattgggatgaatacaaggcttccaatcctcatgcttccttcagtgaggaggcctacatcccgccccaggtcttctataatggcaaggtggactactttgacctgcagcgcctggggggcctcctctcgcacctgcggaagaccctcaaagatgaccttgcttccaaagccaacattgtgatcgacccactggagctccagtcaaccgccatggatgacctagatgaggatgaggagccagccccagctatggcccagcgccccatgcaggccctggctgttggggggccactgcccctgccccggcccggctggctcagttctccaactttgggccgagccaaccgcttcctcagcacagcggctgtgagcctcatgaccccacggcggcctctgagcacctcggagaaagtgaaggtccgcacgctgagcgtggagcagaggacccgtgaggacattgaaggcagccactggaatgagggcttgctgctggggcggccccccgaggagcctgagcagcccctcaccgagaactcgctgctggaagtcctggatggggcggtcatgatgtacaacctcagcgtacaccagcagctgggcaagatggtgggtgtctccgatgatgtcaatgaatacgctatggctctgagggacacagaggacaagctccgccggtgccccaagaggaggaaggacatccttgcagagttgaccaagagccagaaggttttctcagaaaagctggaccacctgagccgccgtcttgcctgggtccatgccactgtctactcccaggagaagatgctggacatctactggctgctgcgcgtctgcctgcggaccattgagcacggtgatcgcacagggtctctctttgccttcatgcccgagttctacctgagcgtggccatcaacagctacagtgctctcaagaattactttggtcccgtgcacagcatggaggagctcccaggctatgaagagaccctgacccgcctggctgccattctcgccaaacactttgccgacgcacgcattgtgggcactgacatccgagactcactgatgcaggccctggccagctacgtgtgctacccacactccctgcgggctgtggagcgaatccccgaggagcagcgtatcgccatggtgaggaacctcctggcgccctatgagcagcggccctgggcccagaccaactggatcctggtgcggctctggaggggctgtggcttcgggtaccgctatacacggctgccacatctgctgaaaaccaaacttgaggacgccaatttgcccagcctccagaagccctgcccttccaccctgctgcagcagcacatggcggacctcctacagcagggtcctgatgtggcacccagcttcctcaacagcgtcctcaatcagctcaactgggccttctctgaattcattggcatgatccaagagatccagcaggctgctgagcgcctggagcggaactttgtggacagccggcagctcaaggtatgtgccacctgctttgacctctcggtcagcctgctgcgtgtcttggagatgactatcacactggtgcctgagatattccttgactggacccggcctacctctgagatgctgctgcggcgtcttgcacagctgctaaaccaggtgctgaaccgggtgacagctgagaggaacctgtttgatcgtgtggtcaccctacggctgcctggcctagagagcgtggaccactatcccattctggtggcagtgacgggcatcctggtgcagctcctggtgcgtggcccagcctcagagagagagcaagccacatcagtgctcctggcagatccctgcttccagctacgctcaatatgctatctcctgggacagccagagcccccagcacctggcactgctctgccagcccctgaccggaagcgcttctccctgcagagctatgcggattatatcagtgccgatgagctggcccaagtggaacagatgctggcgcacctgacctctgcatctgcccaggcagcagctgcctccctgcccaccagtgaggaggacctctgccccatctgctatgcccaccccatctctgctgtgttccagccctgtggccacaagtcctgcaaagcctgtatcaaccagcacctgatgaacaacaaggactgcttcttctgcaaaaccaccatcgtgtctgtagaggactgggagaagggagccaatacgagtactacctcctcagctgcctagccctcacagcctgtgccatcctggaacctccacctttgaacccagagccaggctgggccctatttatgagctccctttgcccttctcctgtatcccacaccaccacatccaacctccttgcctgcctgtatcctcattggtgggagcccagccatggccctaattgtgcctgagcttgactttcagtcagggccacagtgagcattaaattattattccataanaaaaaaaagggggggggctaaaatatcccgaggggccagttacgtacccgttttgtcaaagggccaaggaggataaacagcacggcgggtaacggggggaagcgtggttggaggccccgggggatggcccaaaagcggaaaaaggggg

SEQ ID NO: 284334 - DNA, 1039 bp, Homo sapiens
tacgtgcttgtggacgctggccttgcggctgggtgcgtctggcggtgtggtgctgagtactgaggactgtgcgctcagctcttggagcgggctgggtgtttggggccagcggcggcagcggcaggcacggcggcagcagcggcagggtggggcgaacaggcggggcccagtggccaggcacacgaagagtcccgcatgctgctcctgtacgttgcctatggccaagctgccgtcggccagcaccgcgatgctgccatcgcgggatcctggcgccctgagaagctcctgctgcggcgaaacccaggcaatgcgcatggccgggacgctggtgttgcagtaaagcctcagggaccgacccaccagcgcgtacaggagagagcaagccacatcagtgctcctggcagatccctgcttccagctacgctcaatatgctatctcctgggacagccagagcccccagcacctggcactgctctgccagcccctgaccggaagcgcttctccctgcagagctatgcggattatatcagtgccgatgagctggcccaagtggaacagatgctggcgcacctgacctctgcatctgcccaggcagcagctgcctccctgcccaccagtgaggaggacctctgccccatctgctatgcccaccccatctctgctgtgttccagccctgtggccacaagtcctgcaaagcctgtatcaaccagcacctgatgaacaacaaggactgcttcttctgcaaaaccaccatcgtgtctgtagaggactgggagaagggagccaatacgagtactacctcctcagctgcctagccctcacagcctgtgccatcctggaacctccacctttgaacccagagccaggctgggccctatttatgagctccctttgcccttctcctgtatcccacaccaccacatccaacctccttgcctgcctgtatcctcattggtgggagcccagccatggccctaattgtgcctgagcttgactttcagtcagggccacagtgagcattaaattattattccata

SEQ ID NO: 284335 - DNA, 3090 bp, Homo sapiens
agttgatgatgtctctgcttcggctgtaccgattctcacccattgtcccagacctgggcctacagatccattacctgcggctcactatcgccatcctgaggcatgagaagtcccgcaagtttctgcttagcaatgtcctcttcgacgtgctccgctccgtcgtcttcttttacatcaagagccccctgcgtgtggaggaggccggcctgcaggagctcattcccaccacctggtggccccactgctccagtagggagggcaaagagagcacggagatgaaggaggagaccgcagaggagcggctgcggcggcgagcctacgaacggggctgtcagcggctcaggaagcgcatcgaaggtcagcccgccttgggcacggggtagggtgggaggtgtgtgtgtgcacatgagggtgcttggaggtgcccatgtctaggtgggacttggggaaccctggtggtggagccctggcccaaacctgccccccatctcctggagcctgagggccatgttcctcacctgacctccagtggtggaagaactacaggtccagatcctgaagctgctgctggacaataaagatgacaatgggggtgaagcttctaggtatatcttcctgaccaagtttcgcaagtttctgcaggagaacgccagtggccgggggaacatgcccatgctctgcccccctgagtacatggtctgcttcttacaccggctgatctctgccctgcgctactattgggatgaatacaaggcttccaatcctcatgcttccttcagtgaggaggcctacatcccgccccaggtcttctataatggcaaggtggactactttgacctgcagcgcctggggggcctcctctcgcacctgcggaagaccctcaaagatgaccttgcttccaaagccaacattgtgatcgacccactggagctccagtcaaccgccatggatgacctagatgaggatgaggagccagccccagctatggcccagcgccccatgcaggccctggctgttggggggccactgcccctgccccggcccggctggctcagttctccaactttgggccgagccaaccgcttcctcagcacagcggctgtgagcctcatgaccccacggcggcctctgagcacctcggagaaagtgaaggtccgcacgctgagcgtggagcagaggacccgtgaggacattgaaggcagccactggaatgagggcttgctgctggggcggccccccgaggagcctgagcagcccctcaccgagaactcgctgctggaagtcctggatggggcggtcatgatgtacaacctcagcgtacaccagcagctgggcaagatggtgggtgtctccgatgatgtcaatgaatacgctatggctctgagggacacagaggacaagctccgccggtgccccaagaggaggaaggacatccttgcagagttgaccaagagccagaaggttttctcagaaaagctggaccacctgagccgccgtcttgcctgggtccatgccactgtctactcccaggagaagatgctggacatctactggctgctgcgcgtctgcctgcggaccattgagcacggtgatcgcacagggtctctctttgccttcatgcccgagttctacctgagcgtggccatcaacagctacagtgctctcaagaattactttggtcccgtgcacagcatggaggagctcccaggctatgaagagaccctgacccgcctggctgccattctcgccaaacactttgccgacgcacgcattgtgggcactgacatccgagactcactgatgcaggccctggccagctacgtgtgctacccacactccctgcgggctgtggagcgaatccccgaggagcagcgtatcgccatggtgaggaacctcctggcgccctatgagcagcggccctgggcccagaccaactggatcctggtgcggctctggaggggctgtggcttcgggtaccgctatacacggctgccacatctgctgaaaaccaaacttgaggacgccaatttgcccagcctccagaagccctgcccttccaccctgctgcagcagcacatggcggacctcctacagcagggtcctgatgtggcacccagcttcctcaacagcgtcctcaatcagctcaactgggccttctctgaattcattggcatgatccaagagatccagcaggctgctgagcgcctggagcggaactttgtggacagccggcagctcaaggtatgtgccacctgctttgacctctcggtcagcctgctgcgtgtcttggagatgactatcacactggtgcctgagatattccttgactggacccggcctacctctgagatgctgctgcggcgtcttgcacagctgctaaaccaggtgctgaaccgggtgacagctgagaggaacctgtttgatcgtgtggtcaccctacggctgcctggcctagagagcgtggaccactatcccattctggtggcagtgacgggcatcctggtgcagctcctggtgcgtggcccagcctcagagagagagcaagccacatcagtgctcctggcagatccctgcttccagctacgctcaatatgctatctcctgggacagccagagcccccagcacctggcactgctctgccagcccctgaccggaagcgcttctccctgcagagctatgcggattatatcagtgccgatgagctggcccaagtggaacagatgctggcgcacctgacctctgcatctgcccaggcagcagctgcctccctgcccaccagtgaggaggacctctgccccatctgctatgcccaccccatctctgctgtgttccagccctgtggccacaagtcctgcaaagcctgtatcaaccagcacctgatgaacaacaaggactgcttcttctgcaaaaccaccatcgtgtctgtagaggactgggagaagggagccaatacgagtactacctcctcagctgcctagccctcacagcctgtgccatcctggaacctccacctttgaaccatggccctaattgtgcctgagcttgactttcagtcagggccacagtgagcattaaattattattccata

SEQ ID NO: 284336 - DNA, 3099 bp, Homo sapiens
agttgatgatgtctctgcttcggctgtaccgattctcacccattgtcccagacctgggcctacagatccattacctgcggctcactatcgccatcctgaggcatgagaagtcccgcaagtttctgcttagcaatgtcctcttcgacgtgctccgctccgtcgtcttcttttacatcaagagccccctgcgtgtggaggaggccggcctgcaggagctcattcccaccacctggtggccccactgctccagtagggagggcaaagagagcacggagatgaaggaggagaccgcagaggagcggctgcggcggcgagcctacgaacggggctgtcagcggctcaggaagcgcatcgaaggtcagcccgccttgggcacggggtagggtgggaggtgtgtgtgtgcacatgagggtgcttggaggtgcccatgtctaggtgggacttggggaaccctggtggtggagccctggcccaaacctgccccccatctcctggagcctgagggccatgttcctcacctgacctccagtggtggaagaactacaggtccagatcctgaagctgctgctggacaataaagatgacaatgggggtgaagcttctaggtatatcttcctgaccaagtttcgcaagtttctgcaggagaacgccagtggccgggggaacatgcccatgctctgcccccctgagtacatggtctgcttcttacaccggctgatctctgccctgcgctactattgggatgaatacaaggcttccaatcctcatgcttccttcagtgaggaggcctacatcccgccccaggtcttctataatggcaaggtggactactttgacctgcagcgcctggggggcctcctctcgcacctgcggaagaccctcaaagatgaccttgcttccaaagccaacattgtgatcgacccactggagctccagtcaaccgccatggatgacctagatgaggatgaggagccagccccagctatggcccagcgccccatgcaggccctggctgttggggggccactgcccctgccccggcccggctggctcagttctccaactttgggccgagccaaccgcttcctcagcacagcggctgtgagcctcatgaccccacggcggcctctgagcacctcggagaaagtgaaggtccgcacgctgagcgtggagcagaggacccgtgaggacattgaaggcagccactggaatgagggcttgctgctggggcggccccccgaggagcctgagcagcccctcaccgagaactcgctgctggaagtcctggatggggcggtcatgatgtacaacctcagcgtacaccagcagctgggcaagatggtgggtgtctccgatgatgtcaatgaatacgctatggctctgagggacacagaggacaagctccgccggtgccccaagaggaggaaggacatccttgcagagttgaccaagagccagaaggttttctcagaaaagctggaccacctgagccgccgtcttgcctgggtccatgccactgtctactcccaggagaagatgctggacatctactggctgctgcgcgtctgcctgcggaccattgagcacggtgatcgcacagggtctctctttgccttcatgcccgagttctacctgagcgtggccatcaacagctacagtgctctcaagaattactttggtcccgtgcacagcatggaggagctcccaggctatgaagagaccctgacccgcctggctgccattctcgccaaacactttgccgacgcacgcattgtgggcactgacatccgagactcactgatgcaggccctggccagctacgtgtgctacccacactccctgcgggctgtggagcgaatccccgaggagcagcgtatcgccatggtgaggaacctcctggcgccctatgagcagcggccctgggcccagaccaactggatcctggtgcggctctggaggggctgtggcttcgggtaccgctatacacggctgccacatctgctgaaaaccaaacttgaggacgccaatttgcccagcctccagaagccctgcccttccaccctgctgcagcagcacatggcggacctcctacagcagggtcctgatgtggcacccagcttcctcaacagcgtcctcaatcagctcaactgggccttctctgaattcattggcatgatccaagagatccagcaggctgctgagcgcctggagcggaactttgtggacagccggcagctcaaggtatgtgccacctgctttgacctctcggtcagcctgctgcgtgtcttggagatgactatcacactggtgcctgagatattccttgactggacccggcctacctctgagatgctgctgcggcgtcttgcacagctgctaaaccaggtgctgaaccgggtgacagctgagaggaacctgtttgatcgtgtggtcaccctacggctgcctggcctagagagcgtggaccactatcccattctggtggcagtgacgggcatcctggtgcagctcctggtgcgtggcccagcctcagagagagagcaagccacatcagtgctcctggcagatccctgcttccagctacgctcaatatgctatctcctgggacagccagagcccccagcacctggcactgctctgccagcccctgaccggaagcgcttctccctgcagagctatgcggattatatcagtgccgatgagctggcccaagtggaacagatgctggcgcacctgacctctgcatctgcccaggcagcagctgcctccctgcccaccagtgaggaggacctctgccccatctgctatgcccaccccatctctgctgtgttccagccctgtggccacaagtcctgcaaagcctgtatcaaccagcacctgatgaacaacaaggactgcttcttctgcaaaaccaccacccagagccaggctgggccctatttatgagctccctttgcccttctcctgtatcccacaccaccacatccaacctccttgcctgcctgtatcctcattggtgggagcccagccatggccctaattgtgcctgagcttgactttcagtcagggccacagtgagcattaaattattattccata

SEQ ID NO: 284337 - DNA, 2982 bp, Homo sapiens
agttgatgatgtctctgcttcggctgtaccgattctcacccattgtcccagacctgggcctacagatccattacctgcggctcactatcgccatcctgaggcatgagaagtcccgcaagtttctgcttagcaatgtcctcttcgacgtgctccgctccgtcgtcttcttttacatcaagagccccctgcgtgtggaggaggccggcctgcaggagctcattcccaccacctggtggccccactgctccagtagggagggcaaagagagcacggagatgaaggaggagaccgcagaggagcggctgcggcggcgagcctacgaacggggctgtcagcggctcaggaagcgcatcgaaggtcagcccgccttgggcacggggtagggtgggaggtgtgtgtgtgcacatgagggtgcttggaggtgcccatgtctaggtgggacttggggaaccctggtggtggagccctggcccaaacctgccccccatctcctggagcctgagggccatgttcctcacctgacctccagtggtggaagaactacaggtccagatcctgaagctgctgctggacaataaagatgacaatgggggtgaagcttctaggtatatcttcctgaccaagtttcgcaagtttctgcaggagaacgccagtggccgggggaacatgcccatgctctgcccccctgagtacatggtctgcttcttacaccggctgatctctgccctgcgctactattgggatgaatacaaggcttccaatcctcatgcttccttcagtgaggaggcctacatcccgccccaggtcttctataatggcaaggtggactactttgacctgcagcgcctggggggcctcctctcgcacctgcggaagaccctcaaagatgaccttgcttccaaagccaacattgtgatcgacccactggagctccagtcaaccgccatggatgacctagatgaggatgaggagccagccccagctatggcccagcgccccatgcaggccctggctgttggggggccactgcccctgccccggcccggctggctcagttctccaactttgggccgagccaaccgcttcctcagcacagcggctgtgagcctcatgaccccacggcggcctctgagcacctcggagaaagtgaaggtccgcacgctgagcgtggagcagaggacccgtgaggacattgaaggcagccactggaatgagggcttgctgctggggcggccccccgaggagcctgagcagcccctcaccgagaactcgctgctggaagtcctggatggggcggtcatgatgtacaacctcagcgtacaccagcagctgggcaagatggtgggtgtctccgatgatgtcaatgaatacgctatggctctgagggacacagaggacaagctccgccggtgccccaagaggaggaaggacatccttgcagagttgaccaagagccagaaggttttctcagaaaagctggaccacctgagccgccgtcttgcctgggtccatgccactgtctactcccaggagaagatgctggacatctactggctgctgcgcgtctgcctgcggaccattgagcacggtgatcgcacagggtctctctttgccttcatgcccgagttctacctgagcgtggccatcaacagctacagtgctctcaagaattactttggtcccgtgcacagcatggaggagctcccaggctatgaagagaccctgacccgcctggctgccattctcgccaaacactttgccgacgcacgcattgtgggcactgacatccgagactcactgatgcaggccctggccagctacgtgtgctacccacactccctgcgggctgtggagcgaatccccgaggagcagcgtatcgccatggtgaggaacctcctggcgccctatgagcagcggccctgggcccagaccaactggatcctggtgcggctctggaggggctgtggcttcgggtaccgctatacacggctgccacatctgctgaaaaccaaacttgaggacgccaatttgcccagcctccagaagccctgcccttccaccctgctgcagcagcacatggcggacctcctacagcagggtcctgatgtggcacccagcttcctcaacagcgtcctcaatcagctcaactgggccttctctgaattcattggcatgatccaagagatccagcaggctgctgagcgcctggagcggaactttgtggacagccggcagctcaaggtatgtgccacctgctttgacctctcggtcagcctgctgcgtgtcttggagatgactatcacactggtgcctgagatattccttgactggacccggcctacctctgagatgctgctgcggcgtcttgcacagctgctaaaccaggtgctgaaccgggtgacagctgagaggaacctgtttgatcgtgtggtcaccctacggctgcctggcctagagagcgtggaccactatcccattctggtggcagtgacgggcatcctggtgcagctcctggtgcgtggcccagcctcagagagagagcaagccacatcagtgctcctggcagatccctgcttccagctacgctcaatatgctatctcctgggacagccagagcccccagcacctggcactgctctgccagcccctgaccggaagcgcttctccctgcagagctatgcggattatatcagtgccgatgagctggcccaagtggaacagatgctggcgcacctgacctctgcatctgcccaggcagcagctgcctccctgcccaccagtgaggaggacctctgccccatctgctatgcccaccccatctctgctgtgttccagccctgtggccacaagtcctgcaaaccaccacatccaacctccttgcctgcctgtatcctcattggtgggagcccagccatggccctaattgtgcctgagcttgactttcagtcagggccacagtgagcattaaattattattccata

SEQ ID NO: 284338 - DNA, 2490 bp, Homo sapiens
agttgatgatgtctctgcttcggctgtaccgattctcacccattgtcccagacctgggcctacagatccattacctgcggctcactatcgccatcctgaggcatgagaagtcccgcaagtttctgcttagcaatgtcctcttcgacgtgctccgctccgtcgtcttcttttacatcaagagccccctgcgtgtggaggaggccggcctgcaggagctcattcccaccacctggtggccccactgctccagtagggagggcaaagagagcacggagatgaaggaggagaccgcagaggagcggctgcggcggcgagcctacgaacggggctgtcagcggctcaggaagcgcatcgaaggtcagcccgccttgggcacggggtagggtgggaggtgtgtgtgtgcacatgagggtgcttggaggtgcccatgtctaggtgggacttggggaaccctggtggtggagccctggcccaaacctgccccccatctcctggagcctgagggccatgttcctcacctgacctccagtggtggaagaactacaggtccagatcctgaagctgctgctggacaataaagatgacaatgggggtgaagcttctaggtatatcttcctgaccaagtttcgcaagtttctgcaggagaacgccagtggccgggggaacatgcccatgctctgcccccctgagtacatggtctgcttcttacaccggctgatctctgccctgcgctactattgggatgaatacaaggcttccaatcctcatgcttccttcagtgaggaggcctacatcccgccccaggtcttctataatggcaaggtggactactttgacctgcagcgcctggggggcctcctctcgcacctgcggaagaccctcaaagatgaccttgcttccaaagccaacattgtgatcgacccactggagctccagtcaaccgccatggatgacctagatgaggatgaggagccagccccagctatggcccagcgccccatgcaggccctggctgttggggggccactgcccctgccccggcccggctggctcagttctccaactttgggccgagccaaccgcttcctcagcacagcggctgtgagcctcatgaccccacggcggcctctgagcacctcggagaaagtgaaggtccgcacgctgagcgtggagcagaggacccgtgaggacattgaaggcagccactggaatgagggcttgctgctggggcggccccccgaggagcctgagcagcccctcaccgagaactcgctgctggaagtcctggatggggcggtcatgatgtacaacctcagcgtacaccagcagctgggcaagatggtgggtgtctccgatgatgtcaatgaatacgctatggctctgagggacacagaggacaagctccgccggtgccccaagaggaggaaggacatccttgcagagttgaccaagagccagaaggttttctcagaaaagctggaccacctgagccgccgtcttgcctgggtccatgccactgtctactcccaggagaagatgctggacatctactggctgctgcgcgtctgcctgcggaccattgagcacggtgatcgcacagggtctctctttgccttcatgcccgagttctacctgagcgtggccatcaacagctacagtgctctcaagaattactttggtcccgtgcacagcatggaggagctcccaggctatgaagagaccctgacccgcctggctgccattctcgccaaacactttgccgacgcacgcattgtgggcactgacatccgagactcactgatgcaggccctggccagctacgtgtgctacccacactccctgcgggctgtggagcgaatccccgaggagcagtgagtggggcctggggggcacacaccctggccacaagcaccatgcccagcctcaccccgtctctcccctccttgccctcacaggcgtatcgccatggtgaggaacctcctggcgccctatgagcagcggccctgggcccagaccaactggatcctggtgcggctctggaggggctgtggcttcgggtaccgctatacacggctgccacatctgctgaaaaccaaacttgaggacgccaatttgcccagcctccagaagccctgcccttccaccctgctgcagcagcacatggcggacctcctacagcagggtcctgatgtggcacccagcttcctcaacagcgtcctcaatcagctcaactgggccttctctgaattcattggcatgatccaagagatccagcaggctgctgagcgcctggagcggaactttgtggacagccggcagctcaaggtatgtgccacctgctttgacctctcggtcagcctgctgcgtgtcttggagatgactatcacactggtgcctgagatattccttgactggacccggcctacctctgagatgctgctgcggcgtcttgcacaggtgtggccatctgggcaacaagggtgggaccct

SEQ ID NO: 284339 - DNA, 973 bp, Homo sapiens
ggctggaggctcagcgcgcaagcgtgcgcgtgatttggccctgaacggacgccgtagccaagaggttgggcggatgttgtgagccgggtcgctgcggccgaggctccggcccccaggaccactggctgcccatgagagatgaaggatggcatccaagggggccggcatgtctttctcccgcaagagctataggctgacctcagatgctgagaaatccagggtcacaggcattgtgcaggagaagctgctgaatgactacctgaaccgcatcttttcctcttctgaacatgcacccccagcagccaccagcaggaaacccctgaacttccagaacctgccagaacatttggaccagttgctacaggtggacaatgaggaggaggaaagccagggacaggttgaagggcggcttggcccatccactgtggtcctggaccacacaggcggctttgaggggcttctcctggtggatgatgacctgctgggggtgattggacacagcaactttggcaccatccgctctaccacatgcgtgtacaaagggaaatggctctacgaggtcctcatctcctcccaggggctcatgcagatcggctggtgcaccatcagctgccgcttcaaccaggaggagggggttggagatacacacaactcctatgcctatgatggcaaccgcgtgcgcaagtggaatgtgaccacaacgaattatggcaaggcgtgggcagcgggggacatcgtgagctgcctgattgacctggatgatggcactctgtccttctgctgacggtgtattccctgggcactgcctttgggaccctgccgggctggtattgggtacttccagacataacccttttcaggggccggggctcatctgggcagcggcttggccacccaggaggaccggcctggggcccctgttctgcccgctcttcttgtctgcttctctcgggtcttactccgctcaggggta

SEQ ID NO: 284340 - DNA, 1462 bp, Homo sapiens
agttgatgatgtctctgcttcggctgtaccgattctcacccattgtcccagacctgggcctacagatccattacctgcggctcactatcgccatcctgaggcatgagaagtcccgcaagtttctgcttagcaatgtcctcttcgacgtgctccgctccgtcgtcttcttttacatcaagagccccctgcgtgtggaggaggccggcctgcaggagctcattcccaccacctggtggccccactgctccagtagggagggcaaagagagcacggagatgaaggaggagaccgcagaggagcggctgcggcggcgagcctacgaacggggctgtcagcggctcaggaagcgcatcgaaggtcagcccgccttgggcacggggtagggtgggaggtgtgtgtgtgcacatgagggtgcttggaggtgcccatgtctaggtgggacttggggaaccctggtggtggagccctggcccaaacctgccccccatctcctggagcctgagggccatgttcctcacctgacctccagtggtggaagaactacaggtccagatcctgaagctgctgctggacaataaagatgacaatgggggtgaagcttctaggtatatcttcctgaccaagtttcgcaagtttctgcaggagaacgccagtggccgggggaacatgcccatgctctgcccccctgagtacatggtctgcttcttacaccggctgatctctgccctgcgctactattgggatgaatacaaggcttccaatcctcatgcttccttcagtgaggaggcctacatcccgccccaggtcttctataatggcaaggtggactactttgacctgcagcgcctggggggcctcctctcgcacctgcggaagaccctcaaagatgaccttgcttccaaagccaacattgtgatcgacccactggagctccagtcaaccgccatggatgacctagatgaggatgaggagccagccccagctatggcccagcgccccatgcaggccctggctgttggggggccactgcccctgccccggcccggctggctcagttctccaactttgggccgagccaaccgcttcctcagcacagcggctgtgagcctcatgaccccacggcggcctctgagcacctcggagaaagtgaaggtccgcacgctgagcgtggagcagaggacccgtgaggacattgaaggcagccactggaatgagggcttgctgctggggcggccccccgaggagcctgagcagcccctcaccgagaactcgctgctggaagtcctggatggggcggtcatgatgtacaacctcagcgtacaccagcagctgggcaagaccaccacatccaacctccttgcctgcctgtatcctcattggtgggagcccagccatggccctaattgtgcctgagcttgactttcagtcagggccacagtgagcattaaattattattccata

SEQ ID NO: 284341 - DNA, 691 bp, Homo sapiens
ggctggaggctcagcgcgcaagcgtgcgcgtgatttggccctgaacggacgccgtagccaagaggttgggcggatgttgtgagccgggtcgctgcggccgaggctccggcccccaggaccactggctgcccatgagagatgaaggatggcatccaagggggccggcatgtctttctcccgcaagagctataggctgacctcagatgctgagaaatccagggtcacaggcattgtgcaggagaagctgctgaatgactacctgaaccgcatcttttcctcttctgaacatgcacccccagcagccaccagcaggaaacccctgaacttccagaacctgccagaacatttggaccagttgctacaggtggacaatgaggaggaggaaagccagggacaggttgaagggcggcttggcccatccactgtggtcctggaccacacaggcggctttgaggggcttctcctggtggatgatgacctgctgggggtgattggacacagcaactttggcaccatccgctctaccacatgcgtgtacaaagggaaatggctctacgaggtcctcataccaccacatccaacctccttgcctgcctgtatcctcattggtgggagcccagccatggccctaattgtgcctgagcttgactttcagtcagggccacagtgagcattaaattattattccata

SEQ ID NO: 284342 - DNA, 168 bp, Homo sapiens
gaaaaatggagcccaatcccttgcctgctccaggcactagagggcccttcctaggctgcctgcaggatcagggtggacctgggtatggggccatgtcttgattgtcctcctttccccttgggtggcagaggaaggacatccttgcagagttgaccaagagccagaagg

SEQ ID NO: 284343 - DNA, 249 bp, Homo sapiens
gtcccacccaatcccaggcaccccagctcagagaatacctcttactctttccctcagatcatctgttcccttctgtagagccatatgcatccaaggctggtgattggtgggctctggcccagaccctgcctgcctcaccagggacctcataggcatttcctccctaggagggggttggagatacacacaactcctatgcctatgatggcaaccgcgtgcgcaagtggaatgtgaccacaacgaattatg

SEQ ID NO: 284344 - DNA, 2433 bp, Homo sapiens
acttccttcgtctgggtggttgccccagcgacacgttgggccgaagagcggtgttgggtacccgagagacccggcggtggggaagtcacttcctcccgaagacgctgtttcctagcaaccgccctccgcctctgttattagcccctcctcctcgctcggtccaggaccggctctgcgggcgccgccaggcccagaccaagctactatcagaagttgaattctaataattagctattttataaaggtaacgagaaaaaatacactatgtctgatgaagtttttagcaccactttggcatatacaaagagtccaaaagttaccaaaagaactactttccaggatgagctaataagagcaattacagctcgctcagccagacaaaggagttctgaatactcagatgactttgacagtgatgagattgtttctttaggtgatttttctgacacttcagcagatgaaaattcagttaataaaaaaatgaatgactttcatatatcagatgatgaagaaaagaatccttcaaaactattgtttttgaaaaccaataaatcaaacggtaacataaccaaagatgagccagtgtgtgccatcaaaaatgaagaggaaatggcacctgatgggtgtgaagacattgttgtaaaatctttctctgaatctcaaaataaggatgaggaatttgaaaaagacaaaataaaaatgaaacctaaacccagaattctttcaattaaaagcacatcttcagcagaaaacaacagccttgacacagatgatcactttaaaccatcaccttggccaaggagtatgttaaaaaagaaaagtcacatggaggagaaggatggactagaagataaagaaactgccctcagtgaagaattggagttacattctgcaccttcttcccttccaacgccgaatggcatacaattagaagctgagaaaaaagcattctctgaaaaccttgatcctgaggattcatgcttaacaagtctagcatcatcatcacttaaacaaattcttggagattctttttcaccaggatctgagggaaacgcatctggaaaagatccaaatgaagaaatcactgaaaaccataattccttgaaatcagatgaaaataaagagaattcattttcagcagaccatgtgactactgcagttgagaaatccaaggaaagtcaagtgactgctgatgaccttgaagaagaaaaggcaaaagcggaactgattatggatgatgacagaacagttgatccactactatctaaatctcagagtatcttaatatctaccagtgcaacagcatcttcaaagaaaacaattgaagatagaaatataaagaataaaaagtcaacaaataatagagcatccagtgcatctgccaggagtggttagaaaagaaaaatgtatatttacatgaaatgcacagaataaaaagaattgaaagtgaaaacttaaggatccaaaatgaacagaaaaaagctgctaaaagagaagaagcattagcatcatttgaggcctggaaggctatgaaagaaaaggaagcaaagaaaatagctgccaaaaagaggcttgaagaaaaaaacaagaagaaaactgaagaagaaaatgctgcaagaaaaggagaagcactacaagcttttgaaaaatggaaagagaaaaagatggaatatcttaaagagaaaaatagaaaggagagagaatatgaaagagcaaagaaacagaaagaggaggaaactgttgccgagaaaaagaaagataatttaactgctgttgagaaatggaatgaaaaaaaggaagcttttttcaagcaaaaggaaaaagaaaaaataaatgagaaaagaaaggaagaactgaaaagagctgagaaaaaagataaagataaacaagctattaatgaatatgaaaaatggctggaaaataaggaaaaacaagaaagaattgaacgaaaacagaagaaacgtcattcctttcttgaaagtgaggcacttcctccgtggagccctccaagcagaactgtgttcgcaaaagtgttttgataattctagttcttacattatttggttatttatcggtttgccaatattagccatagatttaaaaccattcaattatttatagttagaggaatatattttaattaaatgccagacactcctgctgacaatgaaagaaatactttggaatgtaatcagtgaaagcatttttttgaactgtagataaactgcctcaaacaaagacctaataatcagattgtttttaccattaagatacataagattttatcatgtcctgataattcttatggtggagtgattcatgatctttttcattaagctctgtatgttatttaagtatatttaattccagtaataaaaaggaaatcatctaggtaccataatgatagaaattattccttttgtggatgattgt

SEQ ID NO: 284345 - DNA, 2602 bp, Homo sapiens
acttccttcgtctgggtggttgccccagcgacacgttgggccgaagagcggtgttgggtacccgagagacccggcggtggggaagtcacttcctcccgaagacgctgtttcctagcaaccgccctccgcctctgttattagcccctcctcctcgctcggtccaggaccggctctgcgggcgccgccaggcccagaccaagctactatcagaagttgaattctaataattagctattttataaaggtaacgagaaaaaatacactatgtctgatgaagtttttagcaccactttggcatatacaaagagtccaaaagttaccaaaagaactactttccaggatgagctaataagagcaattacagctcgctcagccagacaaaggagttctgaatactcagatgactttgacagtgatgagattgtttctttaggtgatttttctgacacttcagcagatgaaaattcagttaataaaaaaatgaatgactttcatatatcagatgatgaagaaaagaatccttcaaaactattgtttttgaaaaccaataaatcaaacggtaacataaccaaagatgagccagtgtgtgccatcaaaaatgaagaggaaatggcacctgatgggtgtgaagacattgttgtaaaatctttctctgaatctcaaaataaggatgaggaatttgaaaaagacaaaataaaaatgaaacctaaacccagaattctttcaattaaaagcacatcttcagcagaaaacaacagccttgacacagatgatcactttaaaccatcaccttggccaaggagtatgttaaaaaagaaaagtcacatggaggagaaggatggactagaagataaagaaactgccctcagtgaagaattggagttacattctgcaccttcttcccttccaacgccgaatggcatacaattagaagctgagaaaaaagcattctctgaaaaccttgatcctgaggattcatgcttaacaagtctagcatcatcatcacttaaacaaattcttggagattctttttcaccaggatctgagggaaacgcatctggaaaagatccaaatgaagaaatcactgaaaaccataattccttgaaatcagatgaaaataaagagaattcattttcagcagaccatgtgactactgcagttgagaaatccaaggaaagtcaagtgactgctgatgaccttgaagaagaaaaggcaaaagcggaactgattatggatgatgacagaacagttgatccactactatctaaatctcagagtatcttaatatctaccagtgcaacagcatcttcaaagaaaacaattgaagatagaaatataaagaataaaaagtcaacaaataatagagcatccagtgcatctgccagattaatgacctctgagtttttgaagaaatctagttctaaaaggagaactccatcgacaactacctcttctcactatttagggactttaaaagtcttggaccaaaaaccttcacagaaacagagcatagaacctgatagagcagataacataagggcagctgtttatcaggagtggttagaaaagaaaaatgtatatttacatgaaatgcacagaataaaaagaattgaaagtgaaaacttaaggatccaaaatgaacagaaaaaagctgctaaaagagaagaagcattagcatcatttgaggcctggaaggctatgaaagaaaaggaagcaaagaaaatagctgccaaaaagaggcttgaagaaaaaaacaagaagaaaactgaagaagaaaatgctgcaagaaaaggagaagcactacaagcttttgaaaaatggaaagagaaaaagatggaatatcttaaagagaaaaatagaaaggagagagaatatgaaagagcaaagaaacagaaagaggaggaaactgttgccgagaaaaagaaagataatttaactgctgttgagaaatggaatgaaaaaaaggaagcttttttcaagcaaaaggaaaaagaaaaaataaatgagaaaagaaaggaagaactgaaaagagctgagaaaaaagataaagataaacaagctattaatgaatatgaaaaatggctggaaaataaggaaaaacaagaaagaattgaacgaaaacagaagaaacgtcattcctttcttgaaagtgaggcacttcctccgtggagccctccaagcagaactgtgttcgcaaaagtgttttgataattctagttcttacattatttggttatttatcggtttgccaatattagccatagatttaaaaccattcaattatttatagttagaggaatatattttaattaaatgccagacactcctgctgacaatgaaagaaatactttggaatgtaatcagtgaaagcatttttttgaactgtagataaactgcctcaaacaaagacctaataatcagattgtttttaccattaagatacataagattttatcatgtcctgataattcttatggtggagtgattcatgatctttttcattaagctctgtatgttatttaagtatatttaattccagtaataaaaaggaaatcatctaggtaccataatgatagaaattattccttttgtggatgattgt

SEQ ID NO: 284346 - DNA, 1112 bp, Homo sapiens
acacaccatgatcgatcgagctcggtcctggttagcagatacataagggcagctgtttatcagtgagtggttagaaaagaaaaatgtatatttacatgaaatgcacagaataaaaagaattgaaagtgaaaacttaaggatccaaaatgaacagaaaaaagctgctaaaagagaagaagcattagcatcatttgaggcctggaaggctatgaaagaaaaggaagcaaagaaaatagctgccaaaaagaggcttgaagaaaaaaacaagaagaaaactgaagaagaaaatgctgcaagaaaaggagaagcactacaagcttttgaaaaatggaaagagaaaaagatggaatatcttaaagagaaaaatagaaaggagagagaatatgaaagagcaaagaaacagaaagaggaggaaactgttgccgagaaaaagaaagataatttaactgctgttgagaaatggaatgaaaaaaaggaagcttttttcaagcaaaaggaaaaagaaaaaataaatgagaaaagaaaggaagaactgaaaagagctgagaaaaaagataaagataaacaagctattaatgaatatgaaaaatggctggaaaataaggaaaaacaagaaagaattgaacgaaaacagaagaaacgtcattcctttcttgaaagtgaggcacttcctccgtggagccctccaagcagaactgtgttcgcaaaagtgttttgataattctagttcttacattatttggttatttatcggtttgccaatattagccatagatttaaaaccattcaattatttatagttagaggaatatattttaattaaatgccagacactcctgctgacaatgaaagaaatactttggaatgtaatcagtgaaagcatttttttgaactgtagataaactgcctcaaacaaagacctaataatcagattgtttttaccattaagatacataagattttatcatgtcctgataattcttatggtggagtgattcatgatctttttcattaagctctgtatgttatttaagtatatttaattccagtaataaaaaggaaatcatctaggtaccataatgatagaaattattccttttgtggatgattgt

SEQ ID NO: 284347 - DNA, 389 bp, Homo sapiens
gaggaaactgttgccgagaaaaagaaagataatttaactgctgttgagaaatggtaatccaaaatcataaatattttgatatattttaaattatagtaacacttcaggattttataaaatttatttacttgaaatttagtaatgcatttcaatttcattactgtcaaagatgtactagggaatctttattatgtattttcctttaactctccagtgttttatactatgctctataggaatgaaaaaaaggaagcttttttcaagcaaaaggaaaaagaaaaaataaatgagaaaagaaaggaagaactgaaaagagctgagaaaaaagataaagataaacaagctattaatgaatatgaaaaatggctggtaggtattatttgtcaatg

SEQ ID NO: 284348 - DNA, 711 bp, Homo sapiens
taggagagcccggagccggatccactctcagcctcaggaagcagcagcctccgctccgcggcgggtgtgctcggcagtcacagacccactcaggacacctcccgttgccgacgggctagacctgccttaaaggggtccccgtgtctctccagtctagagcctaagttcaaacgaggcgtataggcgaggacagcaggaaggctccaagtcaaacaaacggatgggaagtggtcttgggaaacctgaagacactgggatattcagaaggccaaggggatccagcttatcctgttgggcaaggtgctgggagtgaaggcaggtcacctgaatgatactggtgccatttctgaagttggtgaaactccgcattacatcctgactcagagattccactgatgatttccaggaactaccaaagccacggatcagctgagttacccgggctaatagcaggaggaaacagtgtcagagagggatctggctgatcttcaactccactaagttctccccaagggtcttgctccatcacccacgctggagtgcagtggcacaatcacagctcactacaacctcaactttcctggctcagtgattatcccacctcagcctcctgagtagctgggactaacaggcatgtgccaacatgtcccactcattttttttttattttttgtagagatggggtttcaccatgttgtccaggctggtctc

SEQ ID NO: 284349 - DNA, 101 bp, Homo sapiens
gataagtgtcatgtcatactaaatatttattttctgcagactgacttcggagtaattcttgagccaggaggggagaggttagtgttcaaattgctgagatc

SEQ ID NO: 284350 - DNA, 361 bp, Homo sapiens
gatgggggatctgagtggggcctgggacttgcaggtcacctgaatgatactggtgccatttctgaagttggtgaaactccgcattacatcctgactcagagattccactgatgatttccaggaactaccaaagccacggatcagctgagttacccgggctaatagcaggaggaaacagtgtcagagagggatctggctgatcttcaactccactaagttctccccaaggtatagccatccttatcatcaaaccctcttttctggtattctctcaatccagtctttcatactctattcccccaccatgtaatctgcatcctttcatttttcttttccacttcccttaccactgatcccatca

SEQ ID NO: 284351 - DNA, 603 bp, Homo sapiens
actaaatatttattttctgcagactgacttcggagtaattcttgagccaggaggggagaggttagtgttcaaattgctgagatcttaggtcaaaaagctacagaaaagaaatcactttgaaaaacacaatgactcagaggcagtcaccccttgccagcaattccaagagctgaggaggcttcatgcctcaggacatggtgactagttgagtgaaccagagattgaggcagtggtttttacaggggaagaaacaagccttgggtgtatgggagcaggaaaggagggtgacagactggagaaatgataaaggccattttggaagcccacagggaagtggtcttgggaaacctgaagacactgggatattcagaaggccaaggggatccagcttatcctgttgggcaaggtgctgggagtgaaggcaggtaagccatgtcaagggcctgggaagcaaggggaaaactggaaggggtaccccaggtgaagaagggtatggaatggggtgcagaagtccatggagatgaccggcagatctcagggcggtttctggcacatcagaagttgggcttatgcttcttgagctccaccataaggtggtgaatg

SEQ ID NO: 284352 - DNA, 689 bp, Homo sapiens
ttgagacaagttctcattctgttgcccaggctggactgcagtggtgagatcacagctcactgcagcctcagcctcctggactcaagggattctcccacctcagtctcccaagcagccgggaatacaggtgtgtgccaccatgcagagctgattttttttttttttttttcctgtggagatggggatctcacaatgttgccaaggctcatcttgaactcttagcctcaagtggtcctcctgccttagcctctcaaagtgctgggattacaggcgtgaaccaccacacctggctcttttacaattttagttcattttaaccctcagtacaccaagaaaaacagtcatcatcatttatcatctgggtccaaaagacattttattaatatttaagttaattcatgaataatttacacaataagaataaagaataaaaaggctagtcatatcgtacataaatgtaagttatcaatattacaaaaaggaacaaattatccagaagacagttaagcctaaagtactcataagccatgtggaggagcgtgaagaactttccttaaattatatagtcctgcaaaataaaaaggattatggccaatttacctagtaaccaatacaattgcttatgaacttttaaaaaagaacatggtcattttattaattcttatattttataaattttgacatacccc

SEQ ID NO: 284353 - DNA, 827 bp, Homo sapiens
attcttactgaactcccaatctgcttcaagatctgtcttaggattggtgaattatgttcatttttaaaaagggatgtgatagacaacatctagagaaacaggcaaggagtatatatctgaaaaggacaaggcgctttgaaactgacagctcatcaacaggttcatggatgaacctggaaatatttataaatattgattccagatttcagagacggggtttcgaaatgttgcccaggttggtctagaactcccggactcaagtgatcccccgaccaggcctcccaaagtgctgggattatcggtgtgagccaccaacccctgcagagtctacatctgaaataaaccacagaagcaaggatatcacttaaacaatgtaacttaccaattcagtctgagtgagttttgtagtttataacatattgatgaaaacagttaagtgtccacattccgtttacataagagaatgctattcaagcttttaaaataaaaaacttaaactattcccctcaccccccaaaaagtctaactataaagatgggtttgctacaaaataattagcaaaactgatttaccaagtaagatgtcctcccgctcactgccccccagaaatacgtatactgtaggaatactcctaggaagtgacacaagtgaaagaaagaatattctttcaatatgctaaaaacatctacagtgcactaaaaaaaagtccctaaatttggcaatacatttcttccaaaaatgttattcaataacataaacattatgaagtagaactggctgtcccatatgttcagaataaaagggttaagtggagtcctgcataacta

SEQ ID NO: 284354 - DNA, 1243 bp, Homo sapiens
ttgagacaagttctcattctgttgcccaggctggactgcagtggtgagatcacagctcactgcagcctcagcctcctggactcaagggattctcccacctcagtctcccaagcagccgggaatacaggtgtgtgccaccatgcagagctgattttttttttttttttttcctgtggagatggggatctcacaatgttgccaaggctcatcttgaactcttagcctcaagtggtcctcctgccttagcctctcaaagtgctgggattacaggcgtgaaccaccacacctggctcttttacaattttagttcattttaaccctcagtacaccaagaaaaacagtcatcatcatttatcatctgggtccaaaagacattttattaatatttaagttaattcatgaataatttacacaataagaataaagaaatgacacaaaacaacttcactgattttttttcataagaatttaaacataacattgtaattcaattcttcattccctgttttcctggttttgaaggagtatatatctgaaaaggacaaggcgctttgaaactgacagctcatcaacaggttcatggatgaacctggaaatatttataaatattgattccagatttcagagacggggtttcgaaatgttgcccaggttggtctagaactcccggactcaagtgatcccccgaccaggcctcccaaagtgctgggattatcggtgtgagccaccaacccctgcagagtctacatctgaaataaaccacagaagcaaggatatcacttaaacaatgtaacttaccaattcagtctgagtgagttttgtagtttataacatattgatgaaaacagttaagtgtccacattccgtttacataagagaatgctattcaagcttttaaaataaaaaacttaaactattcccctcaccccccaaaaagtctaactataaagatgggtttgctacaaaataattagcaaaactgatttaccaagtaagatgtcctcccgctcactgccccccagaaatacgtatactgtaggaatactcctaggaagtgacacaagtgaaagaaagaatattctttcaatatgctaaaaacatctacagtgcactaaaaaaaagtccctaaatttggcaatacatttcttccaaaaatgttattcaataacataaacattatgaagtagaactggctgtcccatatgttcagaataaaagggttaagtggagtcctgcataacta

SEQ ID NO: 284355 - DNA, 381 bp, Homo sapiens
tctctgaccaacattttctcctctattctaaatattgtacacagcccaaaggaagtcagtcttgttttgttttgtatgctttcagacaggtctcactctgttgcccaggcctgagtgtggtggtgtgaccatgactcactgcagcctgaaactcctgggctcaagcaatcctcccacctcagcctccggaatagacggggactatagttgcgtgccaccatgcttggctaattttacatgtttgtttgtttgtttatagagacggggtttcgaaatgttgcccaggttggtctagaactcccggactcaagtgatcccccgaccaggcctcccaaagtgctgggattatcggtgtgagccaccaacccctgcagagtctac

SEQ ID NO: 284356 - DNA, 308 bp, Homo sapiens
aagatgtcctcccgctcactgccccccagaaatacgtatactgtaggaatactcctaggaagtgacacaagtgaaagaaagaatattctttcaatatgctaaaaacatctacagtgcactaaaaaaaagtccctaaatttggcaatacatttcttccaaaaatgttattcaataacataaacattatgaagtagaactggctgtcccatatgttcagaataaaagggttaagtggagtcctgcataactagcaaagtggaagaataaatggtaagattaagacatacacatacaaacattaaaatcta

SEQ ID NO: 284357 - DNA, 3158 bp, Homo sapiens
ggaaacacaagcccggcctcggcgcgccatgtgtggtaacacgctcagccgctgccacgctatttaaacgcgggctatggatccaggaaccggcgcgaatcaatgagatcaaatgcgagggagatgcaccgtcaattacaaacacttggacaagtctaactttttttttcttctacaaaaacgctttcaaaagcaaccttagcaacgcccaaataagaagccacctctaagcaaaatagtatatgtataaacggagggcgaatatatacaagtatatatatatgtatattacagacgcacaggtttacacccggtgaactttttctttttctttttctttttcctttttttttaagaaaaactagtgacattgcagagaaggacgcttcctctctatcttttggcgcattagtgaagggggtattctattttgttaaagcgcccaagggggcgcagggaccttggagagaagagtggggaggaaagaggaagggtgggtggggggcagagggcgagtcggcggcggcgagggcaagctctttcttgcggcacgatgccgtctctgctggtgctcactttctccccgtgcgtactactcggctgggcgttgctggccggcggcaccggtggcggtggcgttggcggcggcggcggtggcgcgggcataggcggcggacgccaggagagagaggcgctgccgccacagaagatcgaggtgctggtgttactgccccaggatgactcgtacttgttttcactcacccgggtgcggccggccatcgagtatgctctgcgcagcgtggagggcaacgggactgggaggcggcttctgccgccgggcactcgcttccaggtggcttacgaggattcagactgtgggaaccgtgcgctcttcagcttggtggaccgcgtggcggcggcgcggggcgccaagccagaccttatcctggggccagtgtgcgagtatgcagcagcgccagtggcccggcttgcatcgcactgggacctgcccatgctgtcggctggggcgctggccgctggcttccagcacaaggactctgagtactcgcacctcacgcgcgtggcgcccgcctacgccaagatgggcgagatgatgctcgccctgttccgccaccaccactggagccgcgctgcactggtctacagcgacgacaagctggagcggaactgctacttcaccctcgagggggtccacgaggtcttccaggaggagggtttgcacacgtccatctacagtttcgacgagaccaaagacttggatctggaagacatcgtgcgcaatatccaggccagtgagagagtggtgatcatgtgtgcgagcagtgacaccatccggagcatcatgctggtggcgcacaggcatggcatgaccagtggagactacgccttcttcaacattgagctcttcaacagctcttcctatggagatggctcatggaagagaggagacaaacacgactttgaagctaagcaagcatactcgtccctccagacagtcactctactgaggacagtgaaacctgagtttgagaagttttccatggaggtgaaaagttcagttgagaaacaagggctcaatatggaggattacgttaacatgtttgttgaaggattccacgatgccatcctcctctacgtcttggctctacatgaagtactcagagctggttacagcaaaaaggatggagggaaaattatacagcagacttggaacagaacatttgaaggtatcgccgggcaggtgtccatagatgccaacggagaccgatatggggatttctctgtgattgccatgactgatgtggaggcgggcacccaggaggttattggtgattattttggaaaagaaggtcgttttgaaatgcggccgaatgtcaaatatccttggggccctttaaaactgagaatagatgaaaaccgaattgtagagcatacaaacagctctccctgcaaatcatcaggtggcctagaagaatcggcagtgacaggaattgtcgtgggggctttactaggagctggcttgctaatggccttctactttttcaggaagaaatacagaataaccattgagaggcgaacccagcaagaagaaagtaaccttggaaaacatcgggaattacgggaagattccatcagatcccatttttcagtagcttaaaggaagccccccactttttttttttctgcctgagattctttaaggagatagacgggttgaaagacatcaatgaaacagaaggggcgttcttgaagaattcataattttaagcagttagtaatttcattttaaaatttctgtagaagctcaggaattatgattaatcaccatctgcctccaggcctttcatctcatgacaaacaaatataataatgatatcgtgtcactctgttaaatgttcatactgtttcaagcccatatgattagatttatgtttttaaaatctgttgtctccatatcttgatggcttttgggagcatttcacacaaggatataaaatgcggttttcttaaatgaaatgttttgtagctagaataaaatcatttttacaagtacagcattcttggaaagaatttaacacccaaaaaggggaaaatgtaatgaaaaatctcaaggttggaaatacagccttactctctctagagctggaggacaggtttgtggttgaggacttctctgtccgatgtctacattcaggttctgacttcatatcttgaaaaaggatttcctccctgtctttttcagtgtctcataaacgctactctggattgttgtaaatattagtgagatgggaggatttacagaagaaaagcaagtcaaaaatatttcctttttgatgtaaaaaaaaaaagccctatttcgcactaacattttattttacaagtattttaatcttatattttggtattagaaaaatttgtctattttttcattttgaagattaaatgttgcttacattttaaaagcatgggtgaagtgtacaacaaaccaataatgataaaaaatccttctctttttctccctgtttccctttttcccttggccacagccaaatgctaattgctgctttaattacagagatgtgtaaatgtattcagattacaaactctacaggaatacatcaacattttaactcttt

SEQ ID NO: 284358 - DNA, 900 bp, Homo sapiens
gcttctttgcgtggcagcatggcagagggatgtgctgtgtacggaacctggccctggggagggatgttccagctgttccggccttctgcccttgctggcctctgctccataggactggtggtgatcatgtgtgcgagcagtgacaccatccggagcatcatgctggtggcgcacaggcatggcatgaccagtggagactacgccttcttcaacattgagctcttcaacagctcttcctatggagatggctcatggaagagaggagacaaacacgactttgaagctaagcaagcatactcgtccctccagacagtcactctactgaggacagtgaaacctgagtttgagaagttttccatggaggtgaaaagttcagttgagaaacaagggctcaatatggaggattacgttaacatgtttgttgaaggattccacgatgccatcctcctctacgtcttggctctacatgaagtactcagagctggttacagcaaaaaggatggagggaaaattatacagcagacttggaacagaacatttgaaggtatcgccgggcaggtgtccatagatgccaacggagaccgatatggggatttctctgtgattgccatgactgatgtggaggcgggcacccaggaggttattggtgattattttggaaaagaaggtcgttttgaaatgcggccgaatgtcaaatatccttggggccctttaaaactgagaatagatgaaaaccgaattgtagagcatacaaacagctctccctgcaaatcatgtggcttaaaaggaatcgggagtgacagaattgcgtgaggggcttactcagagcggttggaaatggcctctacattttcaggcgaacttcgaataccattggaggcgaaccagagaaagaagtac

SEQ ID NO: 284359 - DNA, 1897 bp, Homo sapiens
gaagccgcatggatgagaactgagatgttccagctgaccaccccgggtattctccagacattggtgatcatgtgtgcgagcagtgacaccatccggagcatcatgctggtggcgcacaggcatggcatgaccagtggagactacgccttcttcaacattgagctcttcaacagctcttcctatggagatggctcatggaagagaggagacaaacacgactttgaagctaagcaagcatactcgtccctccagacagtcactctactgaggacagtgaaacctgagtttgagaagttttccatggaggtgaaaagttcagttgagaaacaagggctcaatatggaggattacgttaacatgtttgttgaaggattccacgatgccatcctcctctacgtcttggctctacatgaagtactcagagctggttacagcaaaaaggatggagggaaaattatacagcagacttggaacagaacatttgaaggtatcgccgggcaggtgtccatagatgccaacggagaccgatatggggatttctctgtgattgccatgactgatgtggaggcgggcacccaggaggttattggtgattattttggaaaagaaggtcgttttgaaatgcggccgaatgtcaaatatccttggggccctttaaaactgagaatagatgaaaaccgaattgtagagcatacaaacagctctccctgcaaatcatcaggtggcctagaagaatcggcagtgacaggaattgtcgtgggggctttactaggagctggcttgctaatggccttctactttttcaggaagaaatacagaataaccattgagaggcgaacccagcaagaagaaagtaaccttggaaaacatcgggaattacgggaagattccatcagatcccatttttcagtagcttaaaggaagccccccactttttttttttctgcctgagattctttaaggagatagacgggttgaaagacatcaatgaaacagaaggggcgttcttgaagaattcataattttaagcagttagtaatttcattttaaaatttctgtagaagctcaggaattatgattaatcaccatctgcctccaggcctttcatctcatgacaaacaaatataataatgatatcgtgtcactctgttaaatgttcatactgtttcaagcccatatgattagatttatgtttttaaaatctgttgtctccatatcttgatggcttttgggagcatttcacacaaggatataaaatgcggttttcttaaatgaaatgttttgtagctagaataaaatcatttttacaagtacagcattcttggaaagaatttaacacccaaaaaggggaaaatgtaatgaaaaatctcaaggttggaaatacagccttactctctctagagctggaggacaggtttgtggttgaggacttctctgtccgatgtctacattcaggttctgacttcatatcttgaaaaaggatttcctccctgtctttttcagtgtctcataaacgctactctggattgttgtaaatattagtgagatgggaggatttacagaagaaaagcaagtcaaaaatatttcctttttgatgtaaaaaaaaaaagccctatttcgcactaacattttattttacaagtattttaatcttatattttggtattagaaaaatttgtctattttttcattttgaagattaaatgttgcttacattttaaaagcatgggtgaagtgtacaacaaaccaataatgataaaaaatccttctctttttctccctgtttccctttttcccttggccacagccaaatgctaattgctgctttaattacagagatgtgtaaatgtattcagattacaaactctacaggaatacatcaacattttaactcttt

SEQ ID NO: 284360 - DNA, 4301 bp, Homo sapiens
agcggggaagtgacgtcggagtgtcaacatgcaagatggcggcccatcaccggcagaacacagcagggcggaggaaagtgcaggtttcctatgttattcgagatgaagtggagaagtacaaccgaaatggagtcaatgctctgcagctggatccagcactaaatagacttttcacagccggtcgagactctatcataagaatatggagtgtcaatcagcacaagcaagatccatatatagcatctatggaacaccatactgattgggtaaacgacattgtactctgttgtaatgggaaaacattaatatctgcttcttctgacacgacagtaaaagtatggaatgcacacaagggattttgcatgtcaacattaaggacacataaggattacgtaaaggccttagcatatgccaaggataaagaactagtagcatcagctgggttggacagacaaatattcctttgggatgtgaatactctaacagcattgactgcctcaaataacactgtcacaacttcttctttaagtggaaacaaagattccatttatagcctggccatgaatcaactgggaacaatcattgtatcagggtccactgaaaaggtgttacgggtatgggatccaagaacatgtgcaaaactaatgaagcttaaagggcacacggataatgtgaaggcattgctattaaacagagatggcacgcaatgcctgtcaggcagttctgatgggacaattcgcctttggtcccttggccagcagagatgtatagcaacataccgagtccatgatgaaggtgtttgggcgctgcaagtcaatgatgccttcacacatgtgtattctggtggaagggacaggaagatttattgtacagacctaagaaaccctgacattcgggtgctaatttgtgaagaaaaagcaccagttctcaagatggagcttgatagatcagctgatcctcctcctgcaatttgggttgcaacaactaagtctacagtaaataaatggactttgaaaggaattcataattttagagcctctggagattatgacaatgactgtacaaatcctataacacctctttgtacacaacctgaccaggttattaaagggggtgctagtattattcagtgccacattcttaatgataagagacatatattaaccaaagataccaataataatgtggcatattgggatgtattgaaggcatgtaaagttgaagatctgggcaaagtggattttgaagatgaaattaagaaaagatttaaaatggtgtatgtgccaaattggttctcagtagacttaaaaacagggatgttaactattactttggatgaaagtgattgttttgctgcctgggtttctgcaaaagatgctggtttcagcagccctgatgggtcagatccaaaattgaatttaggaggacttttactccaagcactcctggaatattggcctagaacacatgtgaatccaatggatgaagaggaaaatgaagtaaaccatgtaaatggggagcaggagaaccgagtgcagaagggaaatggatattttcaagtgcccccacatacacccgtgatctttggtgaagctggaggtcgcacactgttcaggctgctctgccgagattccgggggtgagactgagtctatgcttcttaatgaaacagtgccacaatgggtaattgacatcactgtggataaaaatatgcccaaattcaacaaaattcctttctacctccaacctcatgcatcttcaggagcaaaaaccttaaaaaaagatagactctctgctagtgacatgctccaagtccgaaaagttatggaacatgtttatgaaaaaattatcaacttggataatgagtctcaaaccactagctcttctaataatgaaaaaccaggagaacaggaaaaagaagaagatattgctgtgttggcagaggagaaaattgaacttttgtgccaggaccaggttttggatccaaatatggaccttcgaacagtgaaacacttcatatggaagagcggtggagacctcaccctccattaccgtcagaagtccacgtgaaggctgggctaatgctcctggatattcatttacgaccttcctctatggccccaagagtagtcctaggaagcccactgatccccaacgggagcaagacttctaacggctgattggtatggaccgagattatctttcaattgaagtgactaatcgagatgtaatatagaaaccagtctccatgtgtagattaagctgtccccagggaagcagagtgcaagagcagaagagccccaagcagactatgtctttcaagatgtacagaagactgacaacaggccagtgcagactttgcttcctccttttgtttcaaaggaccttatctacccattaacacttgttagagacacctcagtcgggccacaactgtctctgtttcaactttaagcccacacactctgtagcttttctaaaacagtacattccattcatgcagtagatatgaaggctttttccaagtttgtcatataaagtaatcaaattgttttcaccgtttaagacagttatttttaatgggaatttgctgttgcacaatttgagaaccagcccatttcataataaaagattaatgttgggcttgttgttaatattgcatctcagatgtgttcttgtaggaagatctgttgaaattccaggtgctggatcatagcacttggactgttgggccggagtttgtgcagcccatgcctagcgatgctgcacctcccatgatgtcctggctttgtggcaaccccagggaggtgcagcagtttcactccttcctccactgtgtccagttttatttacacaaagcgagctgagaccacaggttcttgctctggatgagcagcatgacaccatcaaaatttaagaccatgatgaaatttcagtttcattcaaatgttacctaaaatttatggtgtcagaataaagggagatcatagtgagttaatttgatattcatatcctggaagtatacatatttgtttttccaaagttttatatgcaggtttttgttgtacctgtatccagatcttcttttcactgttctaacaatctaacactttcatagaatcatttggatcttgtatagagtgtaacttattggggataaacacttcaacttttggcagaaaatactttggattctccccaaggtcatttgtattcagagtaaatcagtggtccacccccataaaactgtaagacaagcctcctgtatgaagccagaagcacaagtgccttcagagggcagttgattccagtccagttgcctccctagcttgtgtgtggcctgcctccaccatagcagggactagggagggaggcagggaacgttttttcttttctacatcttcacaggttcggctgggggcagctgataggcctaaggccataccttactatttaagatactctgatcgcacaactgcagagacagggttccctcactgctagtcagcttcttttggaaactggacaggccattgccacctgcactttgaagaagtgagcaaagacgtggccacatttctaataagttgaaatggtctttctcccttcctcagagagcaaccagcttctttttttttaaaagtcctttctatctgttggatacaacagtgtgcttttggtgcacattttttagcaatagttgtgaattaatggcaaagaaaaaaaaaattatttaccagccctcagttgtgtttgcccgaggggcctttgagcaaagaaatgggttttgctgggtcattttgccctgtgtgctaagccttgggtggctgcattcccctcctgtcatagatctgacccccagcatgattgtatttctttcccctccagtcaaaccgtaatacagtttccagaaaattcgacagtctgcaatgccaaaagggtaaaaatctgtatttcacagttgtatagaataaaggctttagttaaaatatttcaaagtgtagtacacatttattttcatttgttattttctttcatagcagattacagagaaagaaagaaacctctggtttcatgttctccctggaaatattagcattgatacccattttatcctccaacttatgggggaagggaaagtaaaagtgagggagggaagagccagaacctttgggtgagggcaactttgggtcagactgccaggctacagagttaagggaagctggccccagaacagtcctgtggcgattctgttctacttcctgcattccagcagacttgacactgggctcccagacgatc

SEQ ID NO: 284361 - DNA, 5544 bp, Homo sapiens
  misc_feature (478)..(478): n is a, c, g, or t
  misc_feature (1002)..(1002): n is a, c, g, or t
  misc_feature (1024)..(1024): n is a, c, g, or t
  misc_feature (1063)..(1063): n is a, c, g, or t
  misc_feature (1089)..(1089): n is a, c, g, or t
  misc_feature (1104)..(1104): n is a, c, g, or t
  misc_feature (1133)..(1133): n is a, c, g, or t
  misc_feature (1152)..(1152): n is a, c, g, or t
  misc_feature (1198)..(1198): n is a, c, g, or t
  misc_feature (3151)..(3151): n is a, c, g, or t
agaaaaaccatccctaggaaagtttcagaagtgtttcagctaagacaaggactccctaaactaggtttgccttacagagttctttgccacaaaggaacaaagtgatttggctagtagggggattactttcaacaattaatttttttgctttaaatatgttccccaacaacctcttggtaaccttactaaaaaaagattgaatattcttttacatttctaattaatcttgaaaaaatattttattttcctcacttaaaagtaattaggatcctcacaaaccccacacggcctaactaggtaatacaaggttaggctgagcatggtggcccacgcctgcaatcccaacaatttcggaggccaaagtgaaaggattccttgagtccaggagttcgagaccagcctgggcaatgtgacaataccctgtctctgcaaaaaaaaaaacttaaaaattagctgggcatggtggcacacacctgtngtcccagctactcggggagctgaggtgggaggatcacttgattgagtatgggaggttgaggctgagtgagccgtgatcacaccactgcattccagcttgggcaacagagggagaccttgtctcaaataaataaataaagataataaaattggtgttaaaactatgaagacaacatgctccccttcaaagatttccctttcttaagcagggaacagggtttaaatatgtgtaaagataaatccccaggcaaatggtaacgagcccttttagtattttgttggaacacctatattgtgaatgacagagaaaagaagaatcagggaagaaaaaaagagcatttattgatcttctaattatgtgccatacgctctttgcattttcatatccaatgtgattttaattttcagtgtccctcaaggtacctattaggatccattttcttttttttctttttttttttttgagatggagtctcgctctgtcacccaggctggagtgcagtggcgcgatcttggctcactgcnacctcttgactcctggcttcantcaattttcctgcctcagcctcctcagcagctgggactncaggcacacgccaccacatccagctnatttttataattttngtagagacggggtttcaccatgtgggtcnggctggtctcaaacttctngactcagataatccaactgccttggcctcccaaagtgctggtattncaggcgtgagccaccgcgcctggccagatccattttcatagatgagaaaatgggctcagagaaacccatggttatgtggctaggaagtgacagagaattagtacccagcccaacttgaaaaccctagtgctagaccttgtatttttaaaagtttgtgtctttttagcaagttttacaagtctgatattcagttcagaaaaagaaccactactttatgcgcctataacttcagtctggcaggctttgaattctttagccaatggaccatgcagtggtggccaaatgtcaaaagcatgaaaagtaagaaaactatgtttggctttgaaatgctttttggtacttataattgaattggaatgtctcctttctgagcattcacagtatttcaaacaaattaagaaaaacacccaaaagaactaacctgaagaatctggaaatctgcctgtcttgccccaaacatcttttttctggtcttccttttatgacaagattgaatagcattatttgtcaaacagacttgtacagagctgttctgtttgcccataaagtgtctcaaacttgcctgttttaggtgtaggatgtaactaaatactgttctttaaaaggcctctcctggttattaagccaggtaagagaagtagaatctcgaatcacctaattgaaatggtgacacaggttgtcctttctcagccgttgggtttcctttcatctctgaaggcctgtaggtaccatgaggaaaacatttaattcagagggtgaacccaacagtaggaagctgaaagcagaagtgtttatctccctctgcattcagaccaggctccttagtgcactcatcagactcattgctgcccctgctgtctgctgttgagccttcaccaccactcattcaaatccccacagcctacagattcctacaagtcatgtcctttctagtgaaccctttttaaagggttttatgtcacacacagtgcctagtccagagcttgttgccttcactttaacaaggcaaaaaaaaaaaaaatgaagtatttgtcctggaaacctaagctttcagtaagagtaaaactgtcctgaaacaaaactgtttacatctgttatctggaagcatcacctatttggtgagattctactcagaattcaggtgttagttttaatgcctagagcagtatgtcacattaattgaagaatttaaccatatctatcatttgtaatatatttcattctctcatataaactcttaggatttttcttttaatttcagcaagatccatatatagcatctatggaacaccatactgattgggtaaacgacattgtactctgttgtaatgggaaaacatgtaagtatttctttggattattattgggcttctgatatattttttgttttttatataagcttttttattgaaacatacatacagaaaagtacacacacttcgagattgcagttcaacacaattttagaaagtgaatacccaaatcaagaaacaatattactagaagccctcttgtgccaccctttgccaccctttcagttattccctcttgccccaaggtaactgctcttctgtcttctgaacaccaaagggtagttttgccttcatttgaactgtatatagactcgtactatatgtattcttcttttagccttattaatacctctttttgttctaattttggtgagatccattccttggttttgcagtccgagttacaggaatttttctcaatcacattagttgagccttcaactggaacattaaaaatgtttgcactgcttgttttaaaaatatatttttttctttgaacatgtgtcttgagattttaaaaaattgaggcaatatacaataggttctagaaagagcttttaggtatgtttgtgtgtgtaagagagagaatatgttagtttgaaataatgttacattgttgtaagataagttttcaaagttntaagtcatactactaaggagtttgttaattctttgcttcttctagtaatatctgcttcttctgacacgacagtaaaagtatggaatgcacacaagggattttgcatgtcaacattaaggacacataaggattacgtaaaggccttagcatatgccaaggataaagaactagtagcatcagctgggttggacagacaaatattcctttgggatgtgaatactctaacagcattgactgcctcaaataacactgtcacaacttcttctttaagtggaaacaaagattccatttatagcctggccatgaatcaactgggaacaatcattgtatcagggtccactgaaaaggtgttacgggtatgggatccaagaacatgtgcaaaactaatgaagcttaaagggcacacggataatgtgaaggcattgctattaaacagagatggcacgcaatgcctgtcaggcagttctgatgggacaattcgcctttggtcccttggccagcagagatgtatagcaacataccgagtccatgatgaaggtgtttgggcgctgcaagtcaatgatgccttcacacatgtgtattctggtggaagggacaggaagatttattgtacagacctaagaaaccctgacattcgggtgctaatttgtgaagaaaaagcaccagttctcaagatggagcttgatagatcagctgatcctcctcctgcaatttgggttgcaacaactaagtctacagtaaataaatggactttgaaaggaattcataattttagagcctctggagattatgacaatgactgtacaaatcctataacacctctttgtacacaacctgaccaggttattaaagggggtgctagtattattcagtgccacattcttaatgataagagacatatattaaccaaagataccaataataatgtggcatattgggatgtattgaaggcatgtaaagttgaagatctgggcaaagtggattttgaagatgaaattaagaaaagatttaaaatggtgtatgtgccaaattggttctcagtagacttaaaaacagggatgttaactattactttggatgaaagtgattgttttgctgcctgggtttctgcaaaagatgctggtttcagcagccctgatgggtcagatccaaaattgaatttaggaggacttttactccaagcactcctggaatattggcctagaacacatgtgaatccaatggatgaagaggaaaatgaagtaaaccatgtaaatggggagcaggagaaccgagtgcagaagggaaatggatattttcaagtgcccccacatacacccgtgatctttggtgaagctggaggtcgcacactgttcaggctgctctgccgagattccgggggtgagactgagtctatgcttcttaatgaaacagtgccacaatgggtaattgacatcactgtggataaaaatatgcccaaattcaacaaaattcctttctacctccaacctcatgcatcttcaggagcaaaaaccttaaaaaaagatagactctctgctagtgacatgctccaagtccgaaaagttatggaacatgtttatgaaaaaattatcaacttggataatgagtctcaaaccactagctcttctaataatgaaaaaccaggagaacaggaaaaagaagaagatattgctgtgttggcagaggagaaaattgaacttttgtgccaggaccaggttttggatccaaatatggaccttcgaacagtgaaacacttcatatggaagagcggtggagacctcaccctccattaccgtcagaagtccacgtgaaggctgggctaatgctcctggatattcatttacgaccttcctctatggccccaagagtagtcctaggaagcccactgatccccaacgggagcaagacttctaacggctgattggtatggaccgagattatctttcaattgaagtgactaatcgagatgtaatatagaaaccagtctccatgtgtagattaagctgtccccagggaagcagagtgcaagagcagaagagccccaagcagactatgtctttcaagatgtacagaagactgacaacaggccagtgcagactttgcttcctccttttgtttcaaaggaccttatctacccattaacacttgttagagacacctcagtcgggccacaactgtctctgtttcaactttaagcccacacactctgtagcttttctaaaacagtacattccattcatgcagtagatatgaaggctttttccaagtttgtcatataaagtaatcaaattgttttcaccgtttaagacagttatttttaatgggaatttgctgttgcacaatttgagaaccagcccatttcataataaaagattaatgttgggcttgttgtt

SEQ ID NO: 284362 - DNA, 858 bp, Homo sapiens
tctgcaggttgtgcgatcactgctagtcagtttccaaaagaagctgactagcagtgagggaaccctgtctcgtcagcttcttttggaaactggacaggccattgccacctgcactttgaagaagtgagcaaagacgtggccacatttctaataagttgaaatggtctttctcccttcctcagagagcaaccagcttctttttttttaaaagtcctttctatctgttggatacaacagtgtgcttttggtgcacattttttagcaatagttgtgaattaatggcaaagaaaaaaaaaattatttaccagccctcagttgtgtttgcccgaggggcctttgagcaaagaaatgggttttgctgggtcattttgccctgtgtgctaagccttgggtggctgcattcccctcctgtcatagatctgacccccagcatgattgtatttctttcccctccagtcaaaccgtaatacagtttccagaaaattcgacagtctgcaatgccaaaagggtaaaaatctgtatttcacagttgtatagaataaaggctttagttaaccaaaaaaaaaaaagcagaataaacaaaaaaaaactaaaaacacacagtagagaatacaacttcaccattctgcatagaagataaaaataaaaacgagggggtccgcaccataactaagaaacacctcgagggagagacaagtcatgtttgccagacaccgtagtagtattatgacagcagatgtctcccaatgataaagatatcaaattaaactagagcgcgacggcccattatacaacacgccctcttccacacgaacaacgttccacttgtgccttttgaaagaaacaccaaatttgggg

SEQ ID NO: 284363 - DNA, 1021 bp, Homo sapiens
ggcttgaggaaggggcgggggtcggcttgcttgcccttgtggcccaggcccgggaccctcgtgggcggcattctgagcccgggattgcttgtcgccgctcttctgtaggagtggacttgcggggtcgggataggctcgttccccgcccacttgcctcccccttgccctgtctttcttcgaagcgctctgccctcgctgcgtcggagccgaggcctccaggggtttcccaggggggtgggcgttggaggagtgagcggcttgtgcgggggcgtggcgaggcggcggagcgccaacggccctgcggggtttctgctgaggattccgcacttgggagcccccagccctctcttatgtgggagctgtcccctgggtttcctatgttattcgagatgaagtggagaagtacaaccgaaatggagtcaatgctctgcagctggatccagcactaaatagacttttcacagccggtcgagactctatcataagaatatggagtgtcaatcagcacaagcaagatccatatatagcatctatggaacaccatactgattgggtaaacgacattgtactctgttgtaatgggaaaacattaatatctgcttcttctgacacgacagtaaaagtatggaatgcacacaagggattttgcatgtcaacattaaggacacataaggattacgtaaaggccttagcatatgccaaggataaagaactagtagcatcagctgggttggacagacaaatattcctttgggatgtgaatactctaacagcattgactgcctcaaataacactgtcacaacttcttctttaagtggaaacaaagattccatttatagcctggccatgaatcaactgggaacaatcattgtatcagggtccactgaaaaggtgttacgggtatgggatccaagaacatgtgcaaaactaatgaagcttaaagggcacacggataatgtgaaggcattgctattaaacagagatggcacgcaatgcctgtcagggagtctgatggggaca

SEQ ID NO: 284364 - DNA, 517 bp, Homo sapiens
aatatcagcacaattaaatacagtttcttcccaaatactattttgtgcttttttaatttaaattttttatagcagcagattgttattttaaaaaaggaccacattctttttgaaatgtattttagactgtttcacttagacacatgtgaaaatatgtaaaattttgaatagcaaagtcagaatcaagtgaattcaccacttaatattgatcattatactttcttttgatgtataggcatgtaaagttgaagatctgggcaaagtggattttgaagatgaaattaagaaaagatttaaaatggtgtatgtgccaaattggttctcagtagacttaaaaacaggggtaagttagcaattgatacttgtatgatttgggataattgaagattttcattatagcttataattattattagttacagagtcctgtgtttttaggtgtgaaaaaaaaaatttgtgttaaaacttaaaatgcaaaatggaataaaaaagaaaaaaacaaaattaaaaatatatt

SEQ ID NO: 284365 - DNA, 7194 bp, Homo sapiens
  misc_feature (478)..(478): n is a, c, g, or t
  misc_feature (1002)..(1002): n is a, c, g, or t
  misc_feature (1024)..(1024): n is a, c, g, or t
  misc_feature (1063)..(1063): n is a, c, g, or t
  misc_feature (1089)..(1089): n is a, c, g, or t
  misc_feature (1104)..(1104): n is a, c, g, or t
  misc_feature (1133)..(1133): n is a, c, g, or t
  misc_feature (1152)..(1152): n is a, c, g, or t
  misc_feature (1198)..(1198): n is a, c, g, or t
  misc_feature (3151)..(3151): n is a, c, g, or t
agaaaaaccatccctaggaaagtttcagaagtgtttcagctaagacaaggactccctaaactaggtttgccttacagagttctttgccacaaaggaacaaagtgatttggctagtagggggattactttcaacaattaatttttttgctttaaatatgttccccaacaacctcttggtaaccttactaaaaaaagattgaatattcttttacatttctaattaatcttgaaaaaatattttattttcctcacttaaaagtaattaggatcctcacaaaccccacacggcctaactaggtaatacaaggttaggctgagcatggtggcccacgcctgcaatcccaacaatttcggaggccaaagtgaaaggattccttgagtccaggagttcgagaccagcctgggcaatgtgacaataccctgtctctgcaaaaaaaaaaacttaaaaattagctgggcatggtggcacacacctgtngtcccagctactcggggagctgaggtgggaggatcacttgattgagtatgggaggttgaggctgagtgagccgtgatcacaccactgcattccagcttgggcaacagagggagaccttgtctcaaataaataaataaagataataaaattggtgttaaaactatgaagacaacatgctccccttcaaagatttccctttcttaagcagggaacagggtttaaatatgtgtaaagataaatccccaggcaaatggtaacgagcccttttagtattttgttggaacacctatattgtgaatgacagagaaaagaagaatcagggaagaaaaaaagagcatttattgatcttctaattatgtgccatacgctctttgcattttcatatccaatgtgattttaattttcagtgtccctcaaggtacctattaggatccattttcttttttttctttttttttttttgagatggagtctcgctctgtcacccaggctggagtgcagtggcgcgatcttggctcactgcnacctcttgactcctggcttcantcaattttcctgcctcagcctcctcagcagctgggactncaggcacacgccaccacatccagctnatttttataattttngtagagacggggtttcaccatgtgggtcnggctggtctcaaacttctngactcagataatccaactgccttggcctcccaaagtgctggtattncaggcgtgagccaccgcgcctggccagatccattttcatagatgagaaaatgggctcagagaaacccatggttatgtggctaggaagtgacagagaattagtacccagcccaacttgaaaaccctagtgctagaccttgtatttttaaaagtttgtgtctttttagcaagttttacaagtctgatattcagttcagaaaaagaaccactactttatgcgcctataacttcagtctggcaggctttgaattctttagccaatggaccatgcagtggtggccaaatgtcaaaagcatgaaaagtaagaaaactatgtttggctttgaaatgctttttggtacttataattgaattggaatgtctcctttctgagcattcacagtatttcaaacaaattaagaaaaacacccaaaagaactaacctgaagaatctggaaatctgcctgtcttgccccaaacatcttttttctggtcttccttttatgacaagattgaatagcattatttgtcaaacagacttgtacagagctgttctgtttgcccataaagtgtctcaaacttgcctgttttaggtgtaggatgtaactaaatactgttctttaaaaggcctctcctggttattaagccaggtaagagaagtagaatctcgaatcacctaattgaaatggtgacacaggttgtcctttctcagccgttgggtttcctttcatctctgaaggcctgtaggtaccatgaggaaaacatttaattcagagggtgaacccaacagtaggaagctgaaagcagaagtgtttatctccctctgcattcagaccaggctccttagtgcactcatcagactcattgctgcccctgctgtctgctgttgagccttcaccaccactcattcaaatccccacagcctacagattcctacaagtcatgtcctttctagtgaaccctttttaaagggttttatgtcacacacagtgcctagtccagagcttgttgccttcactttaacaaggcaaaaaaaaaaaaaatgaagtatttgtcctggaaacctaagctttcagtaagagtaaaactgtcctgaaacaaaactgtttacatctgttatctggaagcatcacctatttggtgagattctactcagaattcaggtgttagttttaatgcctagagcagtatgtcacattaattgaagaatttaaccatatctatcatttgtaatatatttcattctctcatataaactcttaggatttttcttttaatttcagcaagatccatatatagcatctatggaacaccatactgattgggtaaacgacattgtactctgttgtaatgggaaaacatgtaagtatttctttggattattattgggcttctgatatattttttgttttttatataagcttttttattgaaacatacatacagaaaagtacacacacttcgagattgcagttcaacacaattttagaaagtgaatacccaaatcaagaaacaatattactagaagccctcttgtgccaccctttgccaccctttcagttattccctcttgccccaaggtaactgctcttctgtcttctgaacaccaaagggtagttttgccttcatttgaactgtatatagactcgtactatatgtattcttcttttagccttattaatacctctttttgttctaattttggtgagatccattccttggttttgcagtccgagttacaggaatttttctcaatcacattagttgagccttcaactggaacattaaaaatgtttgcactgcttgttttaaaaatatatttttttctttgaacatgtgtcttgagattttaaaaaattgaggcaatatacaataggttctagaaagagcttttaggtatgtttgtgtgtgtaagagagagaatatgttagtttgaaataatgttacattgttgtaagataagttttcaaagttntaagtcatactactaaggagtttgttaattctttgcttcttctagtaatatctgcttcttctgacacgacagtaaaagtatggaatgcacacaagggattttgcatgtcaacattaaggacacataaggattacgtaaaggccttagcatatgccaaggataaagaactagtagcatcagctgggttggacagacaaatattcctttgggatgtgaatactctaacagcattgactgcctcaaataacactgtcacaacttcttctttaagtggaaacaaagattccatttatagcctggccatgaatcaactgggaacaatcattgtatcagggtccactgaaaaggtgttacgggtatgggatccaagaacatgtgcaaaactaatgaagcttaaagggcacacggataatgtgaaggcattgctattaaacagagatggcacgcaatgcctgtcaggcagttctgatgggacaattcgcctttggtcccttggccagcagagatgtatagcaacataccgagtccatgatgaaggtgtttgggcgctgcaagtcaatgatgccttcacacatgtgtattctggtggaagggacaggaagatttattgtacagacctaagaaaccctgacattcgggtgctaatttgtgaagaaaaagcaccagttctcaagatggagcttgatagatcagctgatcctcctcctgcaatttgggttgcaacaactaagtctacagtaaataaatggactttgaaaggaattcataattttagagcctctggagattatgacaatgactgtacaaatcctataacacctctttgtacacaacctgaccaggttattaaagggggtgctagtattattcagtgccacattcttaatgataagagacatatattaaccaaagataccaataataatgtggcatattgggatgtattgaaggcatgtaaagttgaagatctgggcaaagtggattttgaagatgaaattaagaaaagatttaaaatggtgtatgtgccaaattggttctcagtagacttaaaaacagggatgttaactattactttggatgaaagtgattgttttgctgcctgggtttctgcaaaagatgctggtttcagcagccctgatgggtcagatccaaaattgaatttaggaggacttttactccaagcactcctggaatattggcctagaacacatgtgaatccaatggatgaagaggaaaatgaagtaaaccatgtaaatggggagcaggagaaccgagtgcagaagggaaatggatattttcaagtgcccccacatacacccgtgatctttggtgaagctggaggtcgcacactgttcaggctgctctgccgagattccgggggtgagactgagtctatgcttcttaatgaaacagtgccacaatgggtaattgacatcactgtggataaaaatatgcccaaattcaacaaaattcctttctacctccaacctcatgcatcttcaggagcaaaaaccttaaaaaaagatagactctctgctagtgacatgctccaagtccgaaaagttatggaacatgtttatgaaaaaattatcaacttggataatgagtctcaaaccactagctcttctaataatgaaaaaccaggagaacaggaaaaagaagaagatattgctgtgttggcagaggagaaaattgaacttttgtgccaggaccaggttttggatccaaatatggaccttcgaacagtgaaacacttcatatggaagagcggtggagacctcaccctccattaccgtcagaagtccacgtgaaggctgggctaatgctcctggatattcatttacgaccttcctctatggccccaagagtagtcctaggaagcccactgatccccaacgggagcaagacttctaacggctgattggtatggaccgagattatctttcaattgaagtgactaatcgagatgtaatatagaaaccagtctccatgtgtagattaagctgtccccagggaagcagagtgcaagagcagaagagccccaagcagactatgtctttcaagatgtacagaagactgacaacaggccagtgcagactttgcttcctccttttgtttcaaaggaccttatctacccattaacacttgttagagacacctcagtcgggccacaactgtctctgtttcaactttaagcccacacactctgtagcttttctaaaacagtacattccattcatgcagtagatatgaaggctttttccaagtttgtcatataaagtaatcaaattgttttcaccgtttaagacagttatttttaatgggaatttgctgttgcacaatttgagaaccagcccatttcataataaaagattaatgttgggcttgttgttaatattgcatctcagatgtgttcttgtaggaagatctgttgaaattccaggtgctggatcatagcacttggactgttgggccggagtttgtgcagcccatgcctagcgatgctgcacctcccatgatgtcctggctttgtggcaaccccagggaggtgcagcagtttcactccttcctccactgtgtccagttttatttacacaaagcgagctgagaccacaggttcttgctctggatgagcagcatgacaccatcaaaatttaagaccatgatgaaatttcagtttcattcaaatgttacctaaaatttatggtgtcagaataaagggagatcatagtgagttaatttgatattcatatcctggaagtatacatatttgtttttccaaagttttatatgcaggtttttgttgtacctgtatccagatcttcttttcactgttctaacaatctaacactttcatagaatcatttggatcttgtatagagtgtaacttattggggataaacacttcaacttttggcagaaaatactttggattctccccaaggtcatttgtattcagagtaaatcagtggtccacccccataaaactgtaagacaagcctcctgtatgaagccagaagcacaagtgccttcagagggcagttgattccagtccagttgcctccctagcttgtgtgtggcctgcctccaccatagcagggactagggagggaggcagggaacgttttttcttttctacatcttcacaggttcggctgggggcagctgataggcctaaggccataccttactatttaagatactctgatcgcacaactgcagagacagggttccctcactgctagtcagcttcttttggaaactggacaggccattgccacctgcactttgaagaagtgagcaaagacgtggccacatttctaataagttgaaatggtctttctcccttcctcagagagcaaccagcttctttttttttaaaagtcctttctatctgttggatacaacagtgtgcttttggtgcacattttttagcaatagttgtgaattaatggcaaagaaaaaaaaaattatttaccagccctcagttgtgtttgcccgaggggcctttgagcaaagaaatgggttttgctgggtcattttgccctgtgtgctaagccttgggtggctgcattcccctcctgtcatagatctgacccccagcatgattgtatttctttcccctccagtcaaaccgtaatacagtttccagaaaattcgacagtctgcaatgccaaaagggtaaaaatctgtatttcacagttgtatagaataaaggctttagttaaaatatttcaaagtgtagtacacatttattttcatttgttattttctttcatagcagattacagagaaagaaagaaacctctggtttcatgttctccctggaaatattagcattgatacccattttatcctccaacttatgggggaagggaaagtaaaagtgagggagggaagagccagaacctttgggtgagggcaactttgggtcagactgccaggctacagagttaagggaagctggccccagaacagtcctgtggcgattctgttctacttcctgcattccagcagacttgacactgggctcccagacgatc

SEQ ID NO: 284366 - DNA, 4588 bp, Homo sapiens
ggcttgaggaaggggcgggggtcggcttgcttgcccttgtggcccaggcccgggaccctcgtgggcggcattctgagcccgggattgcttgtcgccgctcttctgtaggagtggacttgcggggtcgggataggctcgttccccgcccacttgcctcccccttgccctgtctttcttcgaagcgctctgccctcgctgcgtcggagccgaggcctccaggggtttcccaggggggtgggcgttggaggagtgagcggcttgtgcgggggcgtggcgaggcggcggagcgccaacggccctgcggggtttctgctgaggattccgcacttgggagcccccagccctctcttatgtgggagctgtcccctgggtttcctatgttattcgagatgaagtggagaagtacaaccgaaatggagtcaatgctctgcagctggatccagcactaaatagacttttcacagccggtcgagactctatcataagaatatggagtgtcaatcagcacaagcaagatccatatatagcatctatggaacaccatactgattgggtaaacgacattgtactctgttgtaatgggaaaacattaatatctgcttcttctgacacgacagtaaaagtatggaatgcacacaagggattttgcatgtcaacattaaggacacataaggattacgtaaaggccttagcatatgccaaggataaagaactagtagcatcagctgggttggacagacaaatattcctttgggatgtgaatactctaacagcattgactgcctcaaataacactgtcacaacttcttctttaagtggaaacaaagattccatttatagcctggccatgaatcaactgggaacaatcattgtatcagggtccactgaaaaggtgttacgggtatgggatccaagaacatgtgcaaaactaatgaagcttaaagggcacacggataatgtgaaggcattgctattaaacagagatggcacgcaatgcctgtcaggcagttctgatgggacaattcgcctttggtcccttggccagcagagatgtatagcaacataccgagtccatgatgaaggtgtttgggcgctgcaagtcaatgatgccttcacacatgtgtattctggtggaagggacaggaagatttattgtacagacctaagaaaccctgacattcgggtgctaatttgtgaagaaaaagcaccagttctcaagatggagcttgatagatcagctgatcctcctcctgcaatttgggttgcaacaactaagtctacagtaaataaatggactttgaaaggaattcataattttagagcctctggagattatgacaatgactgtacaaatcctataacacctctttgtacacaacctgaccaggttattaaagggggtgctagtattattcagtgccacattcttaatgataagagacatatattaaccaaagataccaataataatgtggcatattgggatgtattgaaggcatgtaaagttgaagatctgggcaaagtggattttgaagatgaaattaagaaaagatttaaaatggtgtatgtgccaaattggttctcagtagacttaaaaacagggatgttaactattactttggatgaaagtgattgttttgctgcctgggtttctgcaaaagatgctggtttcagcagccctgatgggtcagatccaaaattgaatttaggaggacttttactccaagcactcctggaatattggcctagaacacatgtgaatccaatggatgaagaggaaaatgaagtaaaccatgtaaatggggagcaggagaaccgagtgcagaagggaaatggatattttcaagtgcccccacatacacccgtgatctttggtgaagctggaggtcgcacactgttcaggctgctctgccgagattccgggggtgagactgagtctatgcttcttaatgaaacagtgccacaatgggtaattgacatcactgtggataaaaatatgcccaaattcaacaaaattcctttctacctccaacctcatgcatcttcaggagcaaaaaccttaaaaaaagatagactctctgctagtgacatgctccaagtccgaaaagttatggaacatgtttatgaaaaaattatcaacttggataatgagtctcaaaccactagctcttctaataatgaaaaaccaggagaacaggaaaaagaagaagatattgctgtgttggcagaggagaaaattgaacttttgtgccaggaccaggttttggatccaaatatggaccttcgaacagtgaaacacttcatatggaagagcggtggagacctcaccctccattaccgtcagaagtccacgtgaaggctgggctaatgctcctggatattcatttacgaccttcctctatggccccaagagtagtcctaggaagcccactgatccccaacgggagcaagacttctaacggctgattggtatggaccgagattatctttcaattgaagtgactaatcgagatgtaatatagaaaccagtctccatgtgtagattaagctgtccccagggaagcagagtgcaagagcagaagagccccaagcagactatgtctttcaagatgtacagaagactgacaacaggccagtgcagactttgcttcctccttttgtttcaaaggaccttatctacccattaacacttgttagagacacctcagtcgggccacaactgtctctgtttcaactttaagcccacacactctgtagcttttctaaaacagtacattccattcatgcagtagatatgaaggctttttccaagtttgtcatataaagtaatcaaattgttttcaccgtttaagacagttatttttaatgggaatttgctgttgcacaatttgagaaccagcccatttcataataaaagattaatgttgggcttgttgttaatattgcatctcagatgtgttcttgtaggaagatctgttgaaattccaggtgctggatcatagcacttggactgttgggccggagtttgtgcagcccatgcctagcgatgctgcacctcccatgatgtcctggctttgtggcaaccccagggaggtgcagcagtttcactccttcctccactgtgtccagttttatttacacaaagcgagctgagaccacaggttcttgctctggatgagcagcatgacaccatcaaaatttaagaccatgatgaaatttcagtttcattcaaatgttacctaaaatttatggtgtcagaataaagggagatcatagtgagttaatttgatattcatatcctggaagtatacatatttgtttttccaaagttttatatgcaggtttttgttgtacctgtatccagatcttcttttcactgttctaacaatctaacactttcatagaatcatttggatcttgtatagagtgtaacttattggggataaacacttcaacttttggcagaaaatactttggattctccccaaggtcatttgtattcagagtaaatcagtggtccacccccataaaactgtaagacaagcctcctgtatgaagccagaagcacaagtgccttcagagggcagttgattccagtccagttgcctccctagcttgtgtgtggcctgcctccaccatagcagggactagggagggaggcagggaacgttttttcttttctacatcttcacaggttcggctgggggcagctgataggcctaaggccataccttactatttaagatactctgatcgcacaactgcagagacagggttccctcactgctagtcagcttcttttggaaactggacaggccattgccacctgcactttgaagaagtgagcaaagacgtggccacatttctaataagttgaaatggtctttctcccttcctcagagagcaaccagcttctttttttttaaaagtcctttctatctgttggatacaacagtgtgcttttggtgcacattttttagcaatagttgtgaattaatggcaaagaaaaaaaaaattatttaccagccctcagttgtgtttgcccgaggggcctttgagcaaagaaatgggttttgctgggtcattttgccctgtgtgctaagccttgggtggctgcattcccctcctgtcatagatctgacccccagcatgattgtatttctttcccctccagtcaaaccgtaatacagtttccagaaaattcgacagtctgcaatgccaaaagggtaaaaatctgtatttcacagttgtatagaataaaggctttagttaaaatatttcaaagtgtagtacacatttattttcatttgttattttctttcatagcagattacagagaaagaaagaaacctctggtttcatgttctccctggaaatattagcattgatacccattttatcctccaacttatgggggaagggaaagtaaaagtgagggagggaagagccagaacctttgggtgagggcaactttgggtcagactgccaggctacagagttaagggaagctggccccagaacagtcctgtggcgattctgttctacttcctgcattccagcagacttgacactgggctcccagacgatc

SEQ ID NO: 284367 - DNA, 4319 bp, Homo sapiens
cggctaggatacgagggcccgggtgttgaaatcgggtcagaagattaccgtgagaacatatactagtggcggtgcgagagatgcgaggttccgatgtgatcagtaggatgatagtgggagaacctggaaccgactatggagtcacatgcgtcggcagatgggtcgagcactaaatagagagtccacatgccggtcgagtacgctatcgataagaagatgtgagtgacaatctcgaacacaagcaagatccatatatagcatctatggaacaccatactgattgggtaaacgacattgtactctgttgtaatgggaaaacattaatatctgcttcttctgacacgacagtaaaagtatggaatgcacacaagggattttgcatgtcaacattaaggacacataaggattacgtaaaggccttagcatatgccaaggataaagaactagtagcatcagctgggttggacagacaaatattcctttgggatgtgaatactctaacagcattgactgcctcaaataacactgtcacaacttcttctttaagtggaaacaaagattccatttatagcctggccatgaatcaactgggaacaatcattgtatcagggtccactgaaaaggtgttacgggtatgggatccaagaacatgtgcaaaactaatgaagcttaaagggcacacggataatgtgaaggcattgctattaaacagagatggcacgcaatgcctgtcaggcagttctgatgggacaattcgcctttggtcccttggccagcagagatgtatagcaacataccgagtccatgatgaaggtgtttgggcgctgcaagtcaatgatgccttcacacatgtgtattctggtggaagggacaggaagatttattgtacagacctaagaaaccctgacattcgggtgctaatttgtgaagaaaaagcaccagttctcaagatggagcttgatagatcagctgatcctcctcctgcaatttgggttgcaacaactaagtctacagtaaataaatggactttgaaaggaattcataattttagagcctctggagattatgacaatgactgtacaaatcctataacacctctttgtacacaacctgaccaggttattaaagggggtgctagtattattcagtgccacattcttaatgataagagacatatattaaccaaagataccaataataatgtggcatattgggatgtattgaaggcatgtaaagttgaagatctgggcaaagtggattttgaagatgaaattaagaaaagatttaaaatggtgtatgtgccaaattggttctcagtagacttaaaaacagggatgttaactattactttggatgaaagtgattgttttgctgcctgggtttctgcaaaagatgctggtttcagcagccctgatgggtcagatccaaaattgaatttaggaggacttttactccaagcactcctggaatattggcctagaacacatgtgaatccaatggatgaagaggaaaatgaagtaaaccatgtaaatggggagcaggagaaccgagtgcagaagggaaatggatattttcaagtgcccccacatacacccgtgatctttggtgaagctggaggtcgcacactgttcaggctgctctgccgagattccgggggtgagactgagtctatgcttcttaatgaaacagtgccacaatgggtaattgacatcactgtggataaaaatatgcccaaattcaacaaaattcctttctacctccaacctcatgcatcttcaggagcaaaaaccttaaaaaaagatagactctctgctagtgacatgctccaagtccgaaaagttatggaacatgtttatgaaaaaattatcaacttggataatgagtctcaaaccactagctcttctaataatgaaaaaccaggagaacaggaaaaagaagaagatattgctgtgttggcagaggagaaaattgaacttttgtgccaggaccaggttttggatccaaatatggaccttcgaacagtgaaacacttcatatggaagagcggtggagacctcaccctccattaccgtcagaagtccacgtgaaggctgggctaatgctcctggatattcatttacgaccttcctctatggccccaagagtagtcctaggaagcccactgatccccaacgggagcaagacttctaacggctgattggtatggaccgagattatctttcaattgaagtgactaatcgagatgtaatatagaaaccagtctccatgtgtagattaagctgtccccagggaagcagagtgcaagagcagaagagccccaagcagactatgtctttcaagatgtacagaagactgacaacaggccagtgcagactttgcttcctccttttgtttcaaaggaccttatctacccattaacacttgttagagacacctcagtcgggccacaactgtctctgtttcaactttaagcccacacactctgtagcttttctaaaacagtacattccattcatgcagtagatatgaaggctttttccaagtttgtcatataaagtaatcaaattgttttcaccgtttaagacagttatttttaatgggaatttgctgttgcacaatttgagaaccagcccatttcataataaaagattaatgttgggcttgttgttaatattgcatctcagatgtgttcttgtaggaagatctgttgaaattccaggtgctggatcatagcacttggactgttgggccggagtttgtgcagcccatgcctagcgatgctgcacctcccatgatgtcctggctttgtggcaaccccagggaggtgcagcagtttcactccttcctccactgtgtccagttttatttacacaaagcgagctgagaccacaggttcttgctctggatgagcagcatgacaccatcaaaatttaagaccatgatgaaatttcagtttcattcaaatgttacctaaaatttatggtgtcagaataaagggagatcatagtgagttaatttgatattcatatcctggaagtatacatatttgtttttccaaagttttatatgcaggtttttgttgtacctgtatccagatcttcttttcactgttctaacaatctaacactttcatagaatcatttggatcttgtatagagtgtaacttattggggataaacacttcaacttttggcagaaaatactttggattctccccaaggtcatttgtattcagagtaaatcagtggtccacccccataaaactgtaagacaagcctcctgtatgaagccagaagcacaagtgccttcagagggcagttgattccagtccagttgcctccctagcttgtgtgtggcctgcctccaccatagcagggactagggagggaggcagggaacgttttttcttttctacatcttcacaggttcggctgggggcagctgataggcctaaggccataccttactatttaagatactctgatcgcacaactgcagagacagggttccctcactgctagtcagcttcttttggaaactggacaggccattgccacctgcactttgaagaagtgagcaaagacgtggccacatttctaataagttgaaatggtctttctcccttcctcagagagcaaccagcttctttttttttaaaagtcctttctatctgttggatacaacagtgtgcttttggtgcacattttttagcaatagttgtgaattaatggcaaagaaaaaaaaaattatttaccagccctcagttgtgtttgcccgaggggcctttgagcaaagaaatgggttttgctgggtcattttgccctgtgtgctaagccttgggtggctgcattcccctcctgtcatagatctgacccccagcatgattgtatttctttcccctccagtcaaaccgtaatacagtttccagaaaattcgacagtctgcaatgccaaaagggtaaaaatctgtatttcacagttgtatagaataaaggctttagttaaaatatttcaaagtgtagtacacatttattttcatttgttattttctttcatagcagattacagagaaagaaagaaacctctggtttcatgttctccctggaaatattagcattgatacccattttatcctccaacttatgggggaagggaaagtaaaagtgagggagggaagagccagaacctttgggtgagggcaactttgggtcagactgccaggctacagagttaagggaagctggccccagaacagtcctgtggcgattctgttctacttcctgcattccagcagacttgacactgggctcccagacgatc

SEQ ID NO: 284368 - DNA, 4171 bp, Homo sapiens
agcggggaagtgacgtcggagtgtcaacatgcaagatggcggcccatcaccggcagaacacagcagggcggaggaaagtgcaggtttcctatgttattcgagatgaagtggagaagtacaaccgaaatggagtcaatgctctgcagctggatccagcactaaatagacttttcacagccggtcgagactctatcataagaatatggagtgtcaatcagcacaagcaagatccatatatagcatctatggaacaccatactgattgggtaaacgacattgtactctgttgtaatgggaaaacattaatatctgcttcttctgacacgacagtaaaagtatggaatgcacacaagggattttgcatgtcaacattaaggacacataagcttcttctttaagtggaaacaaagattccatttatagcctggccatgaatcaactgggaacaatcattgtatcagggtccactgaaaaggtgttacgggtatgggatccaagaacatgtgcaaaactaatgaagcttaaagggcacacggataatgtgaaggcattgctattaaacagagatggcacgcaatgcctgtcaggcagttctgatgggacaattcgcctttggtcccttggccagcagagatgtatagcaacataccgagtccatgatgaaggtgtttgggcgctgcaagtcaatgatgccttcacacatgtgtattctggtggaagggacaggaagatttattgtacagacctaagaaaccctgacattcgggtgctaatttgtgaagaaaaagcaccagttctcaagatggagcttgatagatcagctgatcctcctcctgcaatttgggttgcaacaactaagtctacagtaaataaatggactttgaaaggaattcataattttagagcctctggagattatgacaatgactgtacaaatcctataacacctctttgtacacaacctgaccaggttattaaagggggtgctagtattattcagtgccacattcttaatgataagagacatatattaaccaaagataccaataataatgtggcatattgggatgtattgaaggcatgtaaagttgaagatctgggcaaagtggattttgaagatgaaattaagaaaagatttaaaatggtgtatgtgccaaattggttctcagtagacttaaaaacagggatgttaactattactttggatgaaagtgattgttttgctgcctgggtttctgcaaaagatgctggtttcagcagccctgatgggtcagatccaaaattgaatttaggaggacttttactccaagcactcctggaatattggcctagaacacatgtgaatccaatggatgaagaggaaaatgaagtaaaccatgtaaatggggagcaggagaaccgagtgcagaagggaaatggatattttcaagtgcccccacatacacccgtgatctttggtgaagctggaggtcgcacactgttcaggctgctctgccgagattccgggggtgagactgagtctatgcttcttaatgaaacagtgccacaatgggtaattgacatcactgtggataaaaatatgcccaaattcaacaaaattcctttctacctccaacctcatgcatcttcaggagcaaaaaccttaaaaaaagatagactctctgctagtgacatgctccaagtccgaaaagttatggaacatgtttatgaaaaaattatcaacttggataatgagtctcaaaccactagctcttctaataatgaaaaaccaggagaacaggaaaaagaagaagatattgctgtgttggcagaggagaaaattgaacttttgtgccaggaccaggttttggatccaaatatggaccttcgaacagtgaaacacttcatatggaagagcggtggagacctcaccctccattaccgtcagaagtccacgtgaaggctgggctaatgctcctggatattcatttacgaccttcctctatggccccaagagtagtcctaggaagcccactgatccccaacgggagcaagacttctaacggctgattggtatggaccgagattatctttcaattgaagtgactaatcgagatgtaatatagaaaccagtctccatgtgtagattaagctgtccccagggaagcagagtgcaagagcagaagagccccaagcagactatgtctttcaagatgtacagaagactgacaacaggccagtgcagactttgcttcctccttttgtttcaaaggaccttatctacccattaacacttgttagagacacctcagtcgggccacaactgtctctgtttcaactttaagcccacacactctgtagcttttctaaaacagtacattccattcatgcagtagatatgaaggctttttccaagtttgtcatataaagtaatcaaattgttttcaccgtttaagacagttatttttaatgggaatttgctgttgcacaatttgagaaccagcccatttcataataaaagattaatgttgggcttgttgttaatattgcatctcagatgtgttcttgtaggaagatctgttgaaattccaggtgctggatcatagcacttggactgttgggccggagtttgtgcagcccatgcctagcgatgctgcacctcccatgatgtcctggctttgtggcaaccccagggaggtgcagcagtttcactccttcctccactgtgtccagttttatttacacaaagcgagctgagaccacaggttcttgctctggatgagcagcatgacaccatcaaaatttaagaccatgatgaaatttcagtttcattcaaatgttacctaaaatttatggtgtcagaataaagggagatcatagtgagttaatttgatattcatatcctggaagtatacatatttgtttttccaaagttttatatgcaggtttttgttgtacctgtatccagatcttcttttcactgttctaacaatctaacactttcatagaatcatttggatcttgtatagagtgtaacttattggggataaacacttcaacttttggcagaaaatactttggattctccccaaggtcatttgtattcagagtaaatcagtggtccacccccataaaactgtaagacaagcctcctgtatgaagccagaagcacaagtgccttcagagggcagttgattccagtccagttgcctccctagcttgtgtgtggcctgcctccaccatagcagggactagggagggaggcagggaacgttttttcttttctacatcttcacaggttcggctgggggcagctgataggcctaaggccataccttactatttaagatactctgatcgcacaactgcagagacagggttccctcactgctagtcagcttcttttggaaactggacaggccattgccacctgcactttgaagaagtgagcaaagacgtggccacatttctaataagttgaaatggtctttctcccttcctcagagagcaaccagcttctttttttttaaaagtcctttctatctgttggatacaacagtgtgcttttggtgcacattttttagcaatagttgtgaattaatggcaaagaaaaaaaaaattatttaccagccctcagttgtgtttgcccgaggggcctttgagcaaagaaatgggttttgctgggtcattttgccctgtgtgctaagccttgggtggctgcattcccctcctgtcatagatctgacccccagcatgattgtatttctttcccctccagtcaaaccgtaatacagtttccagaaaattcgacagtctgcaatgccaaaagggtaaaaatctgtatttcacagttgtatagaataaaggctttagttaaaatatttcaaagtgtagtacacatttattttcatttgttattttctttcatagcagattacagagaaagaaagaaacctctggtttcatgttctccctggaaatattagcattgatacccattttatcctccaacttatgggggaagggaaagtaaaagtgagggagggaagagccagaacctttgggtgagggcaactttgggtcagactgccaggctacagagttaagggaagctggccccagaacagtcctgtggcgattctgttctacttcctgcattccagcagacttgacactgggctcccagacgatc

SEQ ID NO: 284369 - DNA, 3420 bp, Homo sapiens
cggttgatgtagtggttgttgaggttttcttgtttgttttttgactttatttttcttgccactttaaacaggctggcaaagcttgtagagcataacatgatcaaataacaaattttgtaattttagactttgaaaggaattcataattttagagcctctggagattatgacaatgactgtacaaatcctataacacctctttgtacacaacctgaccaggttattaaagggggtgctagtattattcagtgccacattcttaatgataagagacatatattaaccaaagataccaataataatgtggcatattgggatgtattgaaggcatgtaaagttgaagatctgggcaaagtggattttgaagatgaaattaagaaaagatttaaaatggtgtatgtgccaaattggttctcagtagacttaaaaacagggatgttaactattactttggatgaaagtgattgttttgctgcctgggtttctgcaaaagatgctggtttcagcagccctgatgggtcagatccaaaattgaatttaggaggacttttactccaagcactcctggaatattggcctagaacacatgtgaatccaatggatgaagaggaaaatgaagtaaaccatgtaaatggggagcaggagaaccgagtgcagaagggaaatggatattttcaagtgcccccacatacacccgtgatctttggtgaagctggaggtcgcacactgttcaggctgctctgccgagattccgggggtgagactgagtctatgcttcttaatgaaacagtgccacaatgggtaattgacatcactgtggataaaaatatgcccaaattcaacaaaattcctttctacctccaacctcatgcatcttcaggagcaaaaaccttaaaaaaagatagactctctgctagtgacatgctccaagtccgaaaagttatggaacatgtttatgaaaaaattatcaacttggataatgagtctcaaaccactagctcttctaataatgaaaaaccaggagaacaggaaaaagaagaagatattgctgtgttggcagaggagaaaattgaacttttgtgccaggaccaggttttggatccaaatatggaccttcgaacagtgaaacacttcatatggaagagcggtggagacctcaccctccattaccgtcagaagtccacgtgaaggctgggctaatgctcctggatattcatttacgaccttcctctatggccccaagagtagtcctaggaagcccactgatccccaacgggagcaagacttctaacggctgattggtatggaccgagattatctttcaattgaagtgactaatcgagatgtaatatagaaaccagtctccatgtgtagattaagctgtccccagggaagcagagtgcaagagcagaagagccccaagcagactatgtctttcaagatgtacagaagactgacaacaggccagtgcagactttgcttcctccttttgtttcaaaggaccttatctacccattaacacttgttagagacacctcagtcgggccacaactgtctctgtttcaactttaagcccacacactctgtagcttttctaaaacagtacattccattcatgcagtagatatgaaggctttttccaagtttgtcatataaagtaatcaaattgttttcaccgtttaagacagttatttttaatgggaatttgctgttgcacaatttgagaaccagcccatttcataataaaagattaatgttgggcttgttgttaatattgcatctcagatgtgttcttgtaggaagatctgttgaaattccaggtgctggatcatagcacttggactgttgggccggagtttgtgcagcccatgcctagcgatgctgcacctcccatgatgtcctggctttgtggcaaccccagggaggtgcagcagtttcactccttcctccactgtgtccagttttatttacacaaagcgagctgagaccacaggttcttgctctggatgagcagcatgacaccatcaaaatttaagaccatgatgaaatttcagtttcattcaaatgttacctaaaatttatggtgtcagaataaagggagatcatagtgagttaatttgatattcatatcctggaagtatacatatttgtttttccaaagttttatatgcaggtttttgttgtacctgtatccagatcttcttttcactgttctaacaatctaacactttcatagaatcatttggatcttgtatagagtgtaacttattggggataaacacttcaacttttggcagaaaatactttggattctccccaaggtcatttgtattcagagtaaatcagtggtccacccccataaaactgtaagacaagcctcctgtatgaagccagaagcacaagtgccttcagagggcagttgattccagtccagttgcctccctagcttgtgtgtggcctgcctccaccatagcagggactagggagggaggcagggaacgttttttcttttctacatcttcacaggttcggctgggggcagctgataggcctaaggccataccttactatttaagatactctgatcgcacaactgcagagacagggttccctcactgctagtcagcttcttttggaaactggacaggccattgccacctgcactttgaagaagtgagcaaagacgtggccacatttctaataagttgaaatggtctttctcccttcctcagagagcaaccagcttctttttttttaaaagtcctttctatctgttggatacaacagtgtgcttttggtgcacattttttagcaatagttgtgaattaatggcaaagaaaaaaaaaattatttaccagccctcagttgtgtttgcccgaggggcctttgagcaaagaaatgggttttgctgggtcattttgccctgtgtgctaagccttgggtggctgcattcccctcctgtcatagatctgacccccagcatgattgtatttctttcccctccagtcaaaccgtaatacagtttccagaaaattcgacagtctgcaatgccaaaagggtaaaaatctgtatttcacagttgtatagaataaaggctttagttaaaatatttcaaagtgtagtacacatttattttcatttgttattttctttcatagcagattacagagaaagaaagaaacctctggtttcatgttctccctggaaatattagcattgatacccattttatcctccaacttatgggggaagggaaagtaaaagtgagggagggaagagccagaacctttgggtgagggcaactttgggtcagactgccaggctacagagttaagggaagctggccccagaacagtcctgtggcgattctgttctacttcctgcattccagcagacttgacactgggctcccagacgatc

SEQ ID NO: 284370 - DNA, 2466 bp, Homo sapiens
aactctacacgaacatattttgtcaccaagaccctacttctaacctcttctaataatgaaaaaccaggagaacaggaaaaagaagaagatattgctgtgttggcagaggagaaaattgaacttttgtgccaggaccaggttttggatccaaatatggaccttcgaacagtgaaacacttcatatggaagagcggtggagacctcaccctccattaccgtcagaagtccacgtgaaggctgggctaatgctcctggatattcatttacgaccttcctctatggccccaagagtagtcctaggaagcccactgatccccaacgggagcaagacttctaacggctgattggtatggaccgagattatctttcaattgaagtgactaatcgagatgtaatatagaaaccagtctccatgtgtagattaagctgtccccagggaagcagagtgcaagagcagaagagccccaagcagactatgtctttcaagatgtacagaagactgacaacaggccagtgcagactttgcttcctccttttgtttcaaaggaccttatctacccattaacacttgttagagacacctcagtcgggccacaactgtctctgtttcaactttaagcccacacactctgtagcttttctaaaacagtacattccattcatgcagtagatatgaaggctttttccaagtttgtcatataaagtaatcaaattgttttcaccgtttaagacagttatttttaatgggaatttgctgttgcacaatttgagaaccagcccatttcataataaaagattaatgttgggcttgttgttaatattgcatctcagatgtgttcttgtaggaagatctgttgaaattccaggtgctggatcatagcacttggactgttgggccggagtttgtgcagcccatgcctagcgatgctgcacctcccatgatgtcctggctttgtggcaaccccagggaggtgcagcagtttcactccttcctccactgtgtccagttttatttacacaaagcgagctgagaccacaggttcttgctctggatgagcagcatgacaccatcaaaatttaagaccatgatgaaatttcagtttcattcaaatgttacctaaaatttatggtgtcagaataaagggagatcatagtgagttaatttgatattcatatcctggaagtatacatatttgtttttccaaagttttatatgcaggtttttgttgtacctgtatccagatcttcttttcactgttctaacaatctaacactttcatagaatcatttggatcttgtatagagtgtaacttattggggataaacacttcaacttttggcagaaaatactttggattctccccaaggtcatttgtattcagagtaaatcagtggtccacccccataaaactgtaagacaagcctcctgtatgaagccagaagcacaagtgccttcagagggcagttgattccagtccagttgcctccctagcttgtgtgtggcctgcctccaccatagcagggactagggagggaggcagggaacgttttttcttttctacatcttcacaggttcggctgggggcagctgataggcctaaggccataccttactatttaagatactctgatcgcacaactgcagagacagggttccctcactgctagtcagcttcttttggaaactggacaggccattgccacctgcactttgaagaagtgagcaaagacgtggccacatttctaataagttgaaatggtctttctcccttcctcagagagcaaccagcttctttttttttaaaagtcctttctatctgttggatacaacagtgtgcttttggtgcacattttttagcaatagttgtgaattaatggcaaagaaaaaaaaaattatttaccagccctcagttgtgtttgcccgaggggcctttgagcaaagaaatgggttttgctgggtcattttgccctgtgtgctaagccttgggtggctgcattcccctcctgtcatagatctgacccccagcatgattgtatttctttcccctccagtcaaaccgtaatacagtttccagaaaattcgacagtctgcaatgccaaaagggtaaaaatctgtatttcacagttgtatagaataaaggctttagttaaaatatttcaaagtgtagtacacatttattttcatttgttattttctttcatagcagattacagagaaagaaagaaacctctggtttcatgttctccctggaaatattagcattgatacccattttatcctccaacttatgggggaagggaaagtaaaagtgagggagggaagagccagaacctttgggtgagggcaactttgggtcagactgccaggctacagagttaagggaagctggccccagaacagtcctgtggcgattctgttctacttcctgcattccagcagacttgacactgggctcccagacgatc

SEQ ID NO: 284371 - DNA, 1778 bp, Homo sapiens
agcggggaagtgacgtcggagtgtcaacatgcaagatggcggcccatcaccggcagaacacagcagggcggaggaaagtgcaggtttcctatgttattcgagatgaagtggagaagtacaaccgaaatggagtcaatgctctgcagctggatccagcactaaatagacttttcacagccggtcgagactctatcataagaatatggagtgtcaatcagcacaagcaagatccatatatagcatctatggaacaccatactgattgggtaaacgacattgtactctgttgtaatgggaaaacattaatatctgcttcttctgacacgacagtaaaagtatggaatgcacacaagggattttgcatgtcaacattaaggacacataaggattacgtaaaggccttagcatatgccaaggataaagaactagtagcatcagctgggttggacagacaaatattcctttgggatgtgaatactctaacagcattgactgcctcaaataacactgtcacaacttcttctttaagtggaaacaaagattccatttatagcctggccatgaatcaactgggaacaatcattgtatcagggtccactgaaaaggtgttacgggtatgggatccaagaacatgtgcaaaactaatgaagcttaaagggcacacggataatgtgaaggcattgctattaaacagagatggcacgcaatgcctgtcaggcagttctgatgggacaattcgcctttggtcccttggccagcagagatgtatagcaacataccgagtccatgatgaaggtgtttgggcgctgcaagtcaatgatgccttcacacatgtgtattctggtggaagggacaggaagatttattgtacagacctaagaaaccctgacattcgggtgctaatttgtgaagaaaaagcaccagttctcaagatggagcttgatagatcagctgatcctcctcctgcaatttgggttgcaacaactaagtctacagtaaataaatggactttgaaaggaattcataattttagagcctctggagattatgacaatgactgtacaaatcctataacacctctttgtacacaacctgaccaggttattaaagggggtgctagtattattcagtgccacattcttaatgataagagacatatattaaccaaagataccaataataatgtggcatattgggatgtattgaaggcatgtaaagttgaagatctgggcaaagtggattttgaagatgaaattaagaaaagatttaaaatggtgtatgtgccaaattggttctcagtagacttaaaaacagggatgttaactattactttggatgaaagtgattgttttgctgcctgggtttctgcaaaagatgctggtttcagcagccctgatgggtcagatccaaaattgaatttaggaggacttttactccaagcactcctggaatattggcctagaacacatgtgaatccaatggatgaagaggaaaatgaagtaaaccatgtaaatggggagcaggagaaccgagtgcagaagggaaatggatattttcaagtgcccccacatacacccgtgatctttggtgaagctggaggtcgcacactgttcaggctgctctgccgagattccgggggtgagactgagtctatgcttcttaatgaaacagtgccacaatgggtaattgacatcactgtggataaaatatgccaattcacaaattccttcacctcacccatgcacttagggcaaacctaaacggatgcctttcatgta

SEQ ID NO: 284372 - DNA, 4179 bp, Homo sapiens
agcggggaagtgacgtcggagtgtcaacatgcaagatggcggcccatcaccggcagaacacagcagggcggaggaaagtgcaggtttcctatgttattcgagatgaagtggagaagtacaaccgaaatggagtcaatgctctgcagctggatccagcactaaatagacttttcacagccggtcgagactctatcataagaatatggagtgtcaatcagcacaagcaagatccatatatagcatctatggaacaccatactgattgggtaaacgacattgtactctgttgtaatgggaaaacattaatatctgcttcttctgacacgacagtaaaagtatggaatgcacacaagggattttgcatgtcaacattaaggacacataaggattacgtaaaggccttagcatatgccaaggataaagaactagtagcatcagctgggttggacagacaaatattcctttgggatgtgaatactctaacagcattgactgcctcaaataacactgtcacaacttcttctttaagtggaaacaaagattccatttatagcctggccatgaatcaactgggaacaatcattgtatcagggtccactgaaaaggtgttacgggtatgggatccaagaacatgtgcaaaactaatgaagcttaaagggcacacggataatgtgaaggcattgctattaaacagagatggcacgcaatgcctgtcaggcagttctgatgggacaattcgcctttggtcccttggccagcagagatgtatagcaacataccgagtccatgatgaaggtgtttgggcgctgcaagtcaatgatgccttcacacatgtgtattctggtggaagggacaggaagatttattgtacagacctaagaaaccctgacattcgggtgctaatttgtgaagaaaaagcaccagttctcaagatggagcttgatagatcagctgatcctcctcctgcaatttgggttgcaacaactaagtctacagtaaataaatggactttgaaaggaattcataattttagagcctctggagattatgacaatgactgtacaaatcctataacacctctttgtacacaacctgaccaggttattaaagggggtgctagtattattcagtgccacattcttaatgataagagacatatattaaccaaagataccaataataatgtggcatattgggatgtattgaaggcatgtaaagttgaagatctgggcaaagtggattttgaagatgaaattaagaaaagatttaaaatggtgtatgtgccaaattggttctcagtagacttaaaaacagggatgttaactattactttggatgaaagtgattgttttgctgcctgggtttctgcaaaagatgctggtttcagcagccctgatgggtcagatccaaaattgaatttaggaggacttttactccaagcactcctggaatattggcctagaacacatgtgaatccaatggatgaagaggaaaatgaagtaaaccatgtaaatggggagcaggagaaccgagtgcagaagggaaatggatattttcaagtgcccccacatacacccgtgatctttggtgaagctggaggtcgcacactgttcaggctgctctgccgagattccgggggtgagactgagtctatgcttcttaatgaaacagtgccacaatgggtaattgacatcactgtggataaaaatatgcccaaattcaacaaaattcctttctacctccaacctcatgcatcttcaggagcaaaaaccttaaaaaaagatagactctctgctagtgacatgctccaagtccgaaaagttatggaacatgtttatgaaaaaattatcaacttggataatgagtctcaaaccactagctcttctaataatgaaaaaccaggagaacaggaaaaagaagaagatattgctgtgttggcagaggagaaaattgaacttttgtgccaggaccaggttttggatccaaatatggaccttcgaacagtgaaacacttcatatggaagagcggtggagacctcaccctccattaccgtcagaagtccacgtgaaggctgggctaatgctcctggatattcatttacgaccttcctctatggccccaagagtagtcctaggaagcccactgatccccaacgggagcaagacttctaacggctgattggtatggaccgagattatctttcaattgaagtgactaatcgagatgtaatatagaaaccagtctccatgtgtagattaagctgtccccagggaagcagagtgcaagagcagaagagccccaagcagactatgtctttcaagatgtacagaagactgacaacaggccagtgcagactttgcttcctccttttgtttcaaaggaccttatctacccattaacacttgttagagacacctcagtcgggccacaactgtctctgtttcaactttaagcccacacactctgtagcttttctaaaacagtacattccattcatgcagtagatatgaaggctttttccaagtttgtcatataaagtaatcaaattgttttcaccgtttaagacagttatttttaatgggaatttgctgttgcacaatttgagaaccagcccatttcataataaaagattaatgttgggcttgttgttaatattgcatctcagatgtgttcttgtaggaagatctgttgaaattccaggtgctggatcatagcacttggactgttgggccggagtttgtgcagcccatgcctagcgatgctgcacctcccatgatgtcctggctttgtggcaaccccagggaggtgcagcagtttcactccttcctccactgtgtccagttttatttacacaaagcgagctgagaccacaggttcttgctctggatgagcagcatgacaccatcaaaatttaagaccatgatgaaatttcagtttcattcaaatgttacctaaaatttatggtgtcagaataaagggagatcatagtgagttaatttgatattcatatcctggaagtatacatatttgtttttccaaagttttatatgcaggtttttgttgtacctgtatccagatcttcttttcactgttctaacaatctaacactttcatagaatcatttggatcttgtatagagtgtaacttattggggataaacacttcaacttttggcagaaaatactttggattctccccaaggtcatttgtattcagagtaaatcagtggtccacccccataaaactgtaagacaagcctcctgtatgaagccagaagcacaagtgccttcagagggcagttgattccagtccagttgcctccctagcttgtgtgtggcctgcctccaccatagcagggactagggagggaggcagggaacgttttttcttttctacatcttcacaggttcggctgggggcagctgataggcctaaggccataccttactatttaagatactctgatcgcacaactgcagagacagggttccctcactgctacttctttttttttaaaagtcctttctatctgttggatacaacagtgtgcttttggtgcacattttttagcaatagttgtgaattaatggcaaagaaaaaaaaaattatttaccagccctcagttgtgtttgcccgaggggcctttgagcaaagaaatgggttttgctgggtcattttgccctgtgtgctaagccttgggtggctgcattcccctcctgtcatagatctgacccccagcatgattgtatttctttcccctccagtcaaaccgtaatacagtttccagaaaattcgacagtctgcaatgccaaaagggtaaaaatctgtatttcacagttgtatagaataaaggctttagttaaaatatttcaaagtgtagtacacatttattttcatttgttattttctttcatagcagattacagagaaagaaagaaacctctggtttcatgttctccctggaaatattagcattgatacccattttatcctccaacttatgggggaagggaaagtaaaagtgagggagggaagagccagaacctttgggtgagggcaactttgggtcagactgccaggctacagagttaagggaagctggccccagaacagtcctgtggcgattctgttctacttcctgcattccagcagacttgacactgggctcccagacgatc

SEQ ID NO: 284373 - DNA, 879 bp, Homo sapiens
ggcttgaggaaggggcgggggtcggcttgcttgcccttgtggcccaggcccgggaccctcgtgggcggcattctgagcccgggattgcttgtcgccgctcttctgtaggagtggacttgcggggtcgggataggctcgttccccgcccacttgcctcccccttgccctgtctttcttcgaagcgctctgccctcgctgcgtcggagccgaggcctccaggggtttcccaggggggtgggcgttggaggagtgagcggcttgtgcgggggcgtggcgaggcggcggagcgccaacggccctgcggggtttctgctgaggattccgcacttgggagcccccagccctctcttatgtgggagctgtcccctgggtttcctatgttattcgagatgaagtggagaagtacaaccgaaatggagtcaatgctctgcagctggatccagcactaaatagacttttcacagccggtcgagactctatcataagaatatggagtgtcaatcagcacaagcaagatccatatatagcatctatggaacaccatactgattgggtaaacgacattgtactctgttgtaatgggaaaacattaatatctgcttcttctgacacgacagtaaaagtatggaatgcacacaagggattttgcatgtcaacattaaggacacataaggattacgtaaaggccttagcatatgccaaggataaagaactagtagcatcagctgggttggacagacaaatattcctttgggatgtgaatactctaacagcattgactgcctcaaataacactgtcacaagtaaggtgtttaaaagaaacttctttgaaagtgatccaagttaacataaataaagaatggtttataaaacattttt

SEQ ID NO: 284374 - DNA, 618 bp, Homo sapiens
  misc_feature (504)..(504): n is a, c, g, or t
caattcttatttatgtattagccaaaattattctacaaagagacatttctcctccaattcatttaccactgatagagtttacataagcaaagcacagtattataccttgaacacaccttaaaggactctttgtctccatcattcatttgaattcttagaccttatataatgtaatgtcttgatattatagcacttgccaaaggtccttgctcccaacctttttcacttcgagtctccattttacaactgttcttcctacttcgttgaaggcccttcccagtcttttttgcaaacttctctttttcatcctcatcttttgatgttaaagaggcccagcctcccaaatttatatctccagccttagcatccccacagagtcccacagccatttcaggatgtctaatattctcaggcttaacatggtctcctcttctccaaacctgcacccgttattccttctcgtctgaggagtcatcctcgtgcccgattcggcacgaggtttantggccgaaggttatgttatttcacatccacgagtcaagtatttttgctcttttttctccctctgcccccttaagacaatgtcactcaccctcccttggagaatcctgctcaacc

SEQ ID NO: 284375 - DNA, 1135 bp, Homo sapiens
ggcctcagaagcagtcagcccagggctctcggatgcagggagcctgggcccaaacagcagcttccggagtcggaaggagctgaggaagaagacagactgaaggagcttgcgacttttccgcctcggcaaccggacccagcagcaagcaggacgggcggcgctctgctactggtcccgttaagccagagtagcccaagccctgaagtcactgctcatccggaatggaaatcccgccgaccaactacccagcctccagggcggccttggtggcacagaactacatcaactaccagcaggggaccccgcacagggtgtttgaggtgcagaaggtcaaacaagccagcatggaggatattccaggaagaggacataagtatcgccttaaatttgctgttgaagaaattatacaaaaacaagttaaggtgaactgcacagctgaagtactttacccttcaacgggacaagaaactgcaccagaagtcaacttcacatttgaaggagaaactggaaagaatccagatgaagaagacaacacattttatcaaagacttaagtccatgaaggaaccgctagaagcacaaaatattccagacaattttggaaatgtatctccagaaatgacgctcgttctacatttagcctgggttgcctgtggttatataatatggcaaaattctactgaagacacatggtataaaatggtaaaaattcaaactgtcaagcaagtgcaaagaaatgatgactttattgaattagactacaccattctacttcataatatagcatctcaggagattattccctggcaaatgcaagttctctggcatccacaatacggcactaaagtaaaacataatagccgtctgccaaaggaagtacaactggaataaacaaaaaccctaacactggaagtgtaaacatgtctattgatgtgtatgccaatttcactggcatctagcttatgaggccaaataatcccaaagtgtcactttatataaatgtcttgattacagtatagaactttatagagtccataatacaaagtatcactacataaaaatgtctttaaaacagtaatagtggtatgtatatccaaaataaaaagcttcaatttcagcctcaaaaaaaaaaatta

SEQ ID NO: 284376 - DNA, 1120 bp, Homo sapiens
gtatcaacgcagagtggccatttgccgggggggcccaaacagcagcttccggagtcggaaggagctgaggaagaagacagactgaaggagcttgcgacttttccgcctcggcaaccggacccagcagcaagcaggacgggcggcgctctgctactggtcccgttaagccagagtagcccaagccctgaagtcactgctcatccggaatggaaatcccgccgaccaactacccagcctccagggcggccttggtggcacagaactacatcaactaccagcaggggaccccgcacagggtgtttgaggtgcagaaggtcaaacaagccagcatggaggatattccaggaagaggacataagtatcgccttaaatttgctgttgaagaaattatacaaaaacaagttaaggtgaactgcacagctgaagtactttacccttcaacgggacaagaaactgcaccagaagtcaacttcacatttgaaggagaaactggaaagaatccagatgaagaagacaacacattttatcaaagacttaagtccatgaaggaaccgctagaagcacaaaatattccagacaattttggaaatgtatctccagaaatgacgctcgttctacatttagcctgggttgcctgtggttatataatatggcaaaattctactgaagacacatggtataaaatggtaaaaattcaaactgtcaagcaagtgcaaagaaatgatgactttattgaattagactacaccattctacttcataatatagcatctcaggagattattccctggcaaatgcaagttctctggcatccacaatacggcactaaagtaaaacataatagccgtctgccaaaggaagtacaactggaataaacaaaaaccctaacactggaagtgtaaacatgtctattgatgtgtatgccaatttcactggcatctagcttatgaggccaaataatcccaaagtgtcactttatataaatgtcttgattacagtatagaactttatagagtccataatacaaagtatcactacataaaaatgtctttaaaacagtaatagtggtatgtatatccaaaataaaaagcttcaatttcagcctcaaaaaaaaaaatta

SEQ ID NO: 284377 - DNA, 1179 bp, Homo sapiens
ggcctcagaagcagtcagcccagggctctcggatgcagggagcctgggcccaaacagcagcttccggagtcggaaggagctgaggaagaagacagactgaaggagcttgcgacttttccgcctcggcaaccggacccagcagcaagcaggacgggcggcgctctgctactggtcccgttaagccagagtagcccaagccctgaagtcactgctcatccggaatggaaatcccgccgaccaactacccagcctccagggcggccttggtggcacagaactacatcaactaccagcaggggaccccgcacagggtgtttgaggtgcagaaggtcaaacaagccagcatggaggatattccaggaagaggacataagtatcgccttaaatttgctgttgaagaaattatacaaaaacaagttaaggtgaactgcacagctgaagtactttacccttcaacgggacaagaaactgcaccagaagtcaacttcacatttgaaggagaaactggaaagaatccagatgaagaagacaacacattttatcaaagacttaagtccatgaaggaaccgctagaagcacaaaatattccagacaattttggaaatgtatctccagaaatgacgctcgttctacatttagcctgggttgcctgtggttatataatatggcaaaattctactgaagacacatggtataaaatggtaaaaattcaaactgtcaagcaagtgcaaagaaatgatgactttattgaattagactacaccattctacttcataatatagcatctcagttccatggaatccatgacagcaccaactccatctttacctttcacctaaacacaagcacagcaattcagactttctctgtccctgcattccaagaaggaaagaaatcttaactgaaatggaaacagttgccaggtgcagtggctcatgcctataatcccagcactgtgggagactgaggcaggatgataatttgagcccaagagtttgagaccagcctgagcaacaaagtgagacctcttctataaaaaataaaaataaaaccagaacacagatacttaacttaagcaactttcagataagcctaactgtcaaaagtccgctgttaccattgttttaatctttcaggtttataagctttattaaataatagcaacaaaacaattaaaa

SEQ ID NO: 284378 - DNA, 785 bp, Homo sapiens
ggcctcagaagcagtcagcccagggctctcggatgcagggagcctgggcccaaacagcagcttccggagtcggaaggagctgaggaagaagacagactgaaggagcttgcgacttttccgcctcggcaaccggacccagcagcaagcaggacgggcggcgctctgctactggtcccgttaagccagagtagcccaagccctgaagtcactgctcatccggaatggaaatcccgccgaccaactacccagcctccagggcggccttggtggcacagaactacatcaactaccagcaggggaccccgcacagggtgtttgaggtgcagaaggtcaaacaagccagcatggaggatattccaggaagaggacataagtatcgccttaaatttgctgttgaagaaattatacaaaaacaagttaaggtgaactgcacagctgaagtactttacccttcaacgggacaagaaactgcaccagaagtcaacttcacatttgaaggagaaactggaaagaatccagatgaagaagacaacacattttatcaaagacttaagtccatgaaggaaccgctagaagcacaaaatattccagacaattttggaaatgtatctccagaaatgacgctcgttctacatttagcctgggttgcctgtggttatataatatggcaaaattctactgaagacacatggtataaaatggtaaaaattcaaactgtcaagcaagtggtaagtagtttctataaaatacactattaatggggttaatatttatcgaaagtattg

SEQ ID NO: 284379 - DNA, 614 bp, Homo sapiens
ttttttaaaatgcatcttgaaagaacactttatttagtgtaagagaatagattttgtcacattaaattgaaattatgacattcaatttttatttttacctaaatggaaatattatattcatctaatcaaagatgattttcaaaattaaatataatttttgccaaagatattaagttttaaacaacacgtttttattttttgtcatagcaaagaaatgatgactttattgaattagactacaccattctacttcataatatagcatctcaggagattattccctggcaaatgcaagttctctggcatccacaatacggcactaaagtaaaacataatagccgtctgccaaaggaagtacaactggaataaacaaaaaccctaacactggaagtgtaaacatgtctattgatgtgtatgccaatttcactggcatctagcttatgaggccaaataatcccaaagtgtcactttatataaatgtcttgattacagtatagaactttatagagtccataatacaaagtatcactacataaaaatgtctttaaaacagtaatagtggtatgtatatccaaaataaaaagcttcaatttcagcctcaaaaaaaaaaatta

SEQ ID NO: 284380 - DNA, 881 bp, Homo sapiens
ttttttaaaatgcatcttgaaagaacactttatttagtgtaagagaatagattttgtcacattaaattgaaattatgacattcaatttttatttttacctaaatggaaatattatattcatctaatcaaagatgattttcaaaattaaatataatttttgccaaagatattaagttttaaacaacacgtttttattttttgtcatagcaaagaaatgatgactttattgaattagactacaccattctacttcataatatagcatctcaggtaaagtataatttacctttatttgatgccattctgaaaactgagactccttgtatagccacagtatgctttattaattttgactctaaatcagaattcatgtaaatccagataggcaccagatttaagtatattataattgcagcaatttaacaaaagtactattctttgtgaagactgttttatctctaacaaaacataaacccaactacgttttcctaaatgttttctgaattttatcatggcattaattttcttcacttgcaggagattattccctggcaaatgcaagttctctggcatccacaatacggcactaaagtaaaacataatagccgtctgccaaaggaagtacaactggaataaacaaaaaccctaacactggaagtgtaaacatgtctattgatgtgtatgccaatttcactggcatctagcttatgaggccaaataatcccaaagtgtcactttatataaatgtcttgattacagtatagaactttatagagtccataatacaaagtatcactacataaaaatgtctttaaaacagtaatagtggtatgtatatccaaaataaaaagcttcaatttcagcctcaaaaaaaaaaatta

SEQ ID NO: 284381 - DNA, 1529 bp, Homo sapiens
aaaatgactttttcttcgctagttaaaaatcaaatggatctgatgagatattacttatttaaattctgtctccctcccgtttccctctctgtatccccttaagtcttgattagaagaggcacgttacgtattgtttagttataatggtgattaagtgggatgaatcgttggataaaaatagcagttatttaaaatgcgctttaaatttcactgacttaagtgatcttttagggacccactcttcttttcatagaaattttaacagattattgtcttcaaatgaacacaaaggcacaaaaatactttttgcattcataactagaaaaacgcaaaattttaattgcagactacttgagggtaattttcgtgttttgcttttgtgtaatttagtgtgttaagagttgaatttctggagaatttgcttaaggaaatatagcatgttggaaccacagaagtgcccattttgagagctggtctcttacagttggtctccaaggtgtgttattgtagaggcataaatggtacattaccctactgtctcaagggtagagaagtttaagcattagttttgtttaactgtggcaaatgagaataaactttctaaatagtctgcttgaattggaattcatgagatttgtgctcatgaaactacttggttaaaagatagtttttaagtgaggtaggataaattactagagtttttttgaatttgagatataattattccttgaaacgtctctaatttctcttgtagatgaatttatgttcccagggtaaatcccgttaaaatttttttaaaagcttaggagagacaagaatatgtatagcttatggtgctttctaaaatatcttaaaaagagtagctaagccaatttgcataggagggagtcttgggactttaatatggataaagtaagtattccagaagccatttgtagtttttgttgaagtgttagtatggatattggtttgttgaagaaaataggctttttttctttttttgttactgtgcaaatactttaatagcaaacctgattaatatttttcagatgtagaatgtgtgagccactgtgcccagccttgtattttgatttttaaattaatttatatgaatatttccttttaccctataatgtatcagggcttaatatttttaaacttcattataaaaagttgattacagaaagtggtatcttctagttgggagccatctttgcacatctctctccaactctgcctttagtgatatgtcaataacaaattggccatggcaggagtattttacaccatggaaagtgataaatgcagcaaatcaaggaattcccctcctgttgtcccctcagaaagccagcttcccagcacctcatcaatttcaaatataaaaaaagaatagtaaattttcatgtacacatcactcagcttcagtaattgtcgtctcatagccagtttttcctctcctatcctcaaggtataccaggtacactggaggtgtattctctagcctgatacccagtggcatcgtataaaca

SEQ ID NO: 284382 - DNA, 289 bp, Homo sapiens
cggtacccggtgtttatcgatgccaccatggcaggagtattttacaccatggaaagtgataaatgcagcaaatcaaggaattcccctcctgttgtcccctcagaaagccagcttcccagcacctcatcaatttcaaatataaaaaaagaatagtaaattttcatgtacacatcactcagcttcagtaattgtcgtctcatagccagtttttcctctcctatcctcaaggtataccaggtacactggaggtgtattctctagcctgatacccagtggcatcgtataaaca

SEQ ID NO: 284383 - DNA, 5985 bp, Homo sapiens
cgagcatggagagctgccgccgcggccggccggcgacgctggcgacgctttcgcccctgaggtagtttggcgaccgcgaagaaggaaaaagggcgggcgggcggctgtcctctcaccgtcctcaccccgcgaggcccggcccgctcctccgtcgtggatttcgcggcgatccccccggcagctctttgcaaagctgcttgaaacttctcccaaactcggcatggatacgactgcggcggcggcgctgcctgcttttgtggcgctcttgctcctctctccttggcctctcctgggatcggcccaaggccagttctccgcaggtggctgtacttttgatgatggtccaggggcctgtgattaccaccaggatctgtatgatgactttgaatgggtgcatgttagtgctcaagagcctcattatctaccacccgagatgccccaaggttcctatatgatagtggactcttcagatcacgaccctggagaaaaagccagacttcagctgcctacaatgaaggagaacgacactcactgcattgatttcagttacctattatatagccagaaaggactgaatcctggcactttgaacatattagttagggtgaataaaggacctcttgccaatccaatttggaatgtgactggattcacgggtagagattggcttcgggctgagctagcagtgagcaccttttggcccaatgaatatcaggtaatatttgaagctgaagtctcaggagggagaagtggttatattgccattgatgacatccaagtactgagttatccttgtgataaatctcctcatttcctccgtctaggggatgtagaggtgaatgcagggcaaaacgctacatttcagtgcattgccacagggagagatgctgtgcataacaagttatggctccagagacgaaatggagaagatataccagtagcccagactaagaacatcaatcatagaaggtttgccgcttccttcagattgcaagaagtgacaaaaactgaccaggatttgtatcgctgtgtaactcagtcagaacgaggttccggtgtgtccaattttgctcaacttattgtgagagaaccgccaagacccattgctcctcctcagcttcttggtgttgggcctacatatttgctgatccaactaaatgccaactcgatcattggcgatggtcctatcatcctgaaagaagtagagtaccgaatgacatcaggatcctggacagaaacccatgcagtcaatgctccaacttacaaattatggcatttagatccagataccgaatatgagatccgagttctacttacaagacctggtgaaggtggaacggggctcccaggacctccactaatcaccagaacaaaatgtgcagaacctatgagaaccccaaagacattaaagattgctgaaatacaggcaagacggattgctgtggactgggaatccttgggttacaacattacgcgttgccacacttttaatgtcactatctgctaccattacttccgtggtcacaacgagagcaaggcagactgtttggacatggaccccaaagcccctcagcatgttgtgaaccatctgccaccttatacaaatgtcagcctcaagatgatcctaaccaatccagagggaaggaaggagagtgaagagacaattattcaaactgatgaagatgtgcctggtcccgtaccagtaaaatctcttcaaggaacatcctttgaaaataagatcttcttgaactggaaagaacctttggatccaaatggaatcatcactcaatatgagatcagctatagcagtataagatcatttgatcctgcagttccagtggctggacctccccagactgtatcaaatttatggaacagtacacaccatgtctttatgcatctccaccctggaaccacgtaccagtttttcataagagccagcacggtcaaaggctttggtccagccacagccatcaatgtcaccaccaatatctcagctccaactttacctgactatgaaggagttgatgcctctctcaatgaaactgccaccacaataactgtattgttgagaccagcacaagccaaaggtgctcctatcagtgcttatcagattgttgtggaagaactgcacccacaccgaaccaagagagaagccggagccatggaatgctaccaggttcctgtcacataccaaaatgccatgagtgggggtgcaccgtattactttgctgcagaactccccccgggaaacctacctgagcctgccccgttcactgtgggtgacaatcggacctaccaaggcttttggaaccctcctttggctccgcgcaaaggatacaacatctatttccaggcgatgagcagtgtggagaaggaaactaaaacccagtgcgtacgcattgctacaaaagcagcagcaacagaagaaccagaagtgatcccagatcccgccaagcagacagacagagtggtgaaaatagcaggaattagtgctggaattttggtgttcatcctccttctcctagttgtcatattaattgtaaaaaagagcaaacttgctaaaaaacgcaaagatgccatggggaatacccggcaggagatgactcacatggtgaatgcaatggatcgaagttatgctgatcagagcactctgcatgcagaagatcctctttccatcaccttcatggaccaacataactttagtccaagatatgagaaccacagtgctacagcagagtccagtcgccttctagacgtacctcgctacctctgtgaggggacggaatccccttaccagacaggacagctgcatccagccatcagggtagctgatttactgcagcacattaatctcatgaagacatcagacagctatgggttcaaagaggaatatgagagcttttttgaaggacagtcagcatcttgggatgtagctaaaaaagatcaaaatagagcaaaaaaccgatatggaaacattatagcatatgatcactccagagtgattttgcaacccgtagaggatgatccttcctcagattatattaatgccaactatattgatggctaccagagaccaagtcattacattgcaacccaaggtcccgttcatgaaacagtgtatgatttctggaggatgatttggcaagaacaatctgcttgcattgtgatggttacaaatttagttgaggttggccgggttaaatgctataaatattggcctgatgatactgaagtttatggtgacttcaaagtaacgtgtgtagaaatggaaccacttgctgaatatgtagttaggacattcaccctggaaaggagggggtacaatgaaatccgtgaagttaaacagttccatttcacgggctggcctgaccatggagtgccctaccatgctacagggctgctttcctttatccggcgagtcaagttatcaaaccctcccagtgctggccccatcgttgtacattgcagtgctggtgctggacgaactggctgctacattgtgattgacatcatgctagacatggctgaaagagagggtgttgttgatatttacaattgtgtcaaagccttaagatctcggcgtattaatatggtccagacagaggaacagtacatttttattcatgatgccattttagaagcctgcttatgtggagaaactgccatacctgtctgtgaatttaaagctgcatattttgatatgattagaatagactcccagactaactcttcacatctcaaggatgaatttcagactctgaattcagtcacccctcgactacaagctgaagactgcagtatagcgtgcctgccaaggaaccatgacaagaaccgtttcatggacatgctgccacctgacagatgtctgccttttttaattacaattgatggggagagcagtaactacatcaatgctgctcttatggacagctacaggcaaccagctgctttcatcgtcacacaataccctctgccaaacactgtaaaagacttctggagattagtgtatgattatggctgtacctccattgtgatgttaaacgaagtcgacttgtcccagggctgccctcagtactggccagaggaagggatgctacgatatggccccatccaagtggaatgtatgtcttgttcaatggactgtgatgtgatcaaccggatttttaggatatgcaatctaacaagaccacaggaaggttatctgatggtgcaacagtttcagtacctaggatgggcttctcatcgagaagtgcctggatccaaaaggtcattcttgaaactgatacttcaggtggaaaagtggcaggaggaatgcaaggagggggaaggccggacgattatccactgcctaaatggtggcgggcgaagtggcatgttctgtgctataggcatcgttgttgaaatggtgaaacggcaaaatgttgtcgatgttttccatgcagtaaagacactgaggaacagcaagccaaacatggtggaagccccggagcaataccgtttctgctatgatgtagctttggagtacctggaatcatcttagttgggtgagactctttaaagtgcatccatgaagaaacctgtccatctattgagccagcagctgttgtacctgttacacttgtgcagaaagattttaatgtggggggtgggagacttttacatttgagaggtaaaagtattttttttatgaagttgtgtatcttaataaaaaggactgaattagtttttattactatattaaagcatcaacatttcatgccacataaattatatttaataagaaccagattgaaatgagaacgtattggtgtttgtacagtgaacatgccaccttttttctcatggtttcagtagagcagctaccacatgttgcatgagttcatactttctacgtggcatttttctccctttctaaaatgaaagctgatgaatcttaaaaggaagaagaaaagaaaagctgtgcaaattcatagtaaagttcgttttttatatgtttccagtgtagcagatctctatataaatatataaatatatataactggcttattttcttttaatgtgcaatgatggctggatcatttaaagttctttttagaaaataacataagccaaagactcaagtgtaaatatgtctatatggagaaagcacattatatttattggttacttacattccttttttgatggctaaaatactaccaccacacaatcatcttttttttcctgaagaaagctttttctttagctaaaatcaattgtaaacgatttttgtagattattttttgtatgttttagtgtaagtagaagataaactttttattcataaaccaggaagcaatgttctttatagtgattctcttgtgtacatgcttgtgaattaaatttgtgtaaaatcccttggcaattgggtcttttaatataggaccaaattaaaacattttgctgaatatgtatagtttttcacaatttcattaggtaaataatggtttggtgatcatacatgagaaatgtacacattaaaaggccttgctgacaacttgcacaatgttgaacatagcctttaagcatcatttaaattttaaaggaatggagtttttcagcctgtggcccagcactggtcaagaaaacaagatggcaacatatatgctttcagggtcaaatttgagcaaactgtaaactgtcagggtgataaaatgtttctcttgatgtttacatgcacaagctttgcgttctgactataaaaagtgtgaacaaatcaatgccagattcctgttttgcgcattgtcatgggattcttaagtgaacctttctaaatgtggtcttgttcacatgctccacgtagctgtaacttcacatcatcagcttgcagtttgtaattgactaaagcattccagtgtcctctttctagattgccagctcatgacatggtgcttataaagatttaattaaagtaagaatgaaataaagtttttataattataa

SEQ ID NO: 284384 - DNA, 1064 bp, Homo sapiens
cgagcatggagagctgccgccgcggccggccggcgacgctggcgacgctttcgcccctgaggtagtttggcgaccgcgaagaaggaaaaagggcgggcgggcggctgtcctctcaccgtcctcaccccgcgaggcccggcccgctcctccgtcgtggatttcgcggcgatccccccggcagctctttgcaaagctgcttgaaacttctcccaaactcggcatggatacgactgcggcggcggcgctgcctgcttttgtggcgctcttgctcctctctccttggcctctcctgggatcggcccaaggccagttctccgcagtgtctgtgcttgtggtcggtaacttttgctgctgttgttctgctgctgtctgccattccattcgccatctatcacgcacacagaaccctggccaggatcatgaagggcgattgaaaaggtggctgtacttttgatgatggtccaggggcctgtgattaccaccaggatctgtatgatgactttgaatgggtgcatgttagtgctcaagagcctcattatctaccacccgagatgccccaaggttcctatatgatagtggactcttcagatcacgaccctggagaaaaagccagacttcagctgcctacaatgaaggagaacgacactcactgcattgatttcagttacctattatatagccagaaaggactgaatcctggcactttgaacatattagttagggtgaataaaggacctcttgccaatccaatttggaatgtgactggattcacgggtagagattggcttcgggctgagctagcagtgagcaccttttggcccaatgaatatcaggtaatatttgaagctgaagtctcaggagggagaagtggttatattgccattgatgacatccaagtactgagttatccttgtgataaatctcctcatttcctccgtctaggggatgtagaggtgaatgcagggcaaaacgctacatttcagtgcattgccacagggagagatgctgtgcataacaagttatggctccaggtaaggccaagttggcagctgagctaaagagta

SEQ ID NO: 284385 - DNA, 700 bp, Homo sapiens
cctgtctctaaaataataaaataaaatatatatgaagtgcttaaatagtgcttaacatattataaacagtacatgtgttaactatcttatcattatgctaataattttgtacttaagagggacataacttatgttagacagttatgaatgaaatatgtataaaaacaaatctaaattttcgtgatcgagattgctaggacaggggagaaactaagggttttttgttcgcttgttttttaatgtttctgccctggtctaatatattttcttctctgaacctttagcattttttccacatatgaaaagctaaccctgtttctacaaaaactaaaaaaaatgagccaggcatggtgacttgtgcctgtagctccagctacttggaagatgggaagattgcttcagcctaggaatttgaggctgcagtgagctatgattgtaccactgcactccagcctgggtgacagagtgagactatgtctcaaaaggaaaaaaaaaagaaaagaaaagaaatgaaaaagaaaaactaccacatttgttaaagtaacatcaacttattgcctgactacattttaaactaacatgcaagtatggtcagctttggtgtgaaatttttcaatatgaaaataaaaagttttctgacagggcgttttgaagaaacatttaatagtcaaaatggcataatcatatgactgggaagagg

SEQ ID NO: 284386 - DNA, 534 bp, Homo sapiens
cgagcatggagagctgccgccgcggccggccggcgacgctggcgacgctttcgcccctgaggtagtttggcgaccgcgaagaaggaaaaagggcgggcgggcggctgtcctctcaccgtcctcaccccgcgaggcccggcccgctcctccgtcgtggatttcgcggcgatccccccggcagctctttgcaaagctgcttgaaacttctcccaaactcggcatggatacgactgcggcggcggcgctgcctgcttttgtggcgctcttgctcctctctccttggcctctcctgggatcggcccaaggccagttctccgcagcttcgcttggctggcgagcgcatctgctgctggggttcgcggtgcagatggagacgcagtggtggccagagggtgatggagaagacgggaaaagcgacagccacgctcctggctgaagccgcaggacgcaaataacttactttgtacctgacagtttctcacgttgttgtggaggccctgtttcctggaaataaactcaaattgttgttttctg

SEQ ID NO: 284387 - DNA, 6396 bp, Homo sapiens
cgagcatggagagctgccgccgcggccggccggcgacgctggcgacgctttcgcccctgaggtagtttggcgaccgcgaagaaggaaaaagggcgggcgggcggctgtcctctcaccgtcctcaccccgcgaggcccggcccgctcctccgtcgtggatttcgcggcgatccccccggcagctctttgcaaagctgcttgaaacttctcccaaactcggcatggatacgactgcggcggcggcgctgcctgcttttgtggcgctcttgctcctctctccttggcctctcctgggatcggcccaaggccagttctccgcaggtggctgtacttttgatgatggtccaggggcctgtgattaccaccaggatctgtatgatgactttgaatgggtgcatgttagtgctcaagagcctcattatctaccacccgagatgccccaaggttcctatatgatagtggactcttcagatcacgaccctggagaaaaagccagacttcagctgcctacaatgaaggagaacgacactcactgcattgatttcagttacctattatatagccagaaaggactgaatcctggcactttgaacatattagttagggtgaataaaggacctcttgccaatccaatttggaatgtgactggattcacgggtagagattggcttcgggctgagctagcagtgagcaccttttggcccaatgaatatcaggtaatatttgaagctgaagtctcaggagggagaagtggttatattgccattgatgacatccaagtactgagttatccttgtgataaatctcctcatttcctccgtctaggggatgtagaggtgaatgcagggcaaaacgctacatttcagtgcattgccacagggagagatgctgtgcataacaagttatggctccagagacgaaatggagaagatataccagtagcccagactaagaacatcaatcatagaaggtttgccgcttccttcagattgcaagaagtgacaaaaactgaccaggatttgtatcgctgtgtaactcagtcagaacgaggttccggtgtgtccaattttgctcaacttattgtgagagaaccgccaagacccattgctcctcctcagcttcttggtgttgggcctacatatttgctgatccaactaaatgccaactcgatcattggcgatggtcctatcatcctgaaagaagtagagtaccgaatgacatcaggatcctggacagaaacccatgcagtcaatgctccaacttacaaattatggcatttagatccagataccgaatatgagatccgagttctacttacaagacctggtgaaggtggaacggggctcccaggacctccactaatcaccagaacaaaatgtgcagaacctatgagaaccccaaagacattaaagattgctgaaatacaggcaagacggattgctgtggactgggaatccttgggttacaacattacgcgttgccacacttttaatgtcactatctgctaccattacttccgtggtcacaacgagagcaaggcagactgtttggacatggaccccaaagcccctcagcatgttgtgaaccatctgccaccttatacaaatgtcagcctcaagatgatcctaaccaatccagagggaaggaaggagagtgaagagacaattattcaaactgatgaagatgtgcctggtcccgtaccagtaaaatctcttcaaggaacatcctttgaaaataagatcttcttgaactggaaagaacctttggatccaaatggaatcatcactcaatatgagatcagctatagcagtataagatcatttgatcctgcagttccagtggctggacctccccagactgtatcaaatttatggaacagtacacaccatgtctttatgcatctccaccctggaaccacgtaccagtttttcataagagccagcacggtcaaaggctttggtccagccacagccatcaatgtcaccaccaatatctcagctccaactttacctgactatgaaggagttgatgcctctctcaatgaaactgccaccacaataactgtattgttgagaccagcacaagccaaaggtgctcctatcagtgcttatcagattgttgtggaagaactgcacccacaccgaaccaagagagaagccggagccatggaatgctaccaggttcctgtcacataccaaaatgccatgagtgggggtgcaccgtattactttgctgcagaactccccccgggaaacctacctgagcctgccccgttcactgtgggtgacaatcggacctaccaaggcttttggaaccctcctttggctccgcgcaaaggatacaacatctatttccaggcgatgagcagtgtggagaaggaaactaaaacccagtgcgtacgcattgctacaaaagcagcagcaacagaagaaccagaagtgatcccagatcccgccaagcagacagacagagtggtgaaaatagcaggaattagtgctggaattttggtgttcatcctccttctcctagttgtcatattaattgtaaaaaagagcaaacttgctaaaaaacgcaaagatgccatggggaatacccggcaggagatgactcacatggtgaatgcaatggatcgaagttatgctgatcagagcactctgcatgcagaagatcctctttccatcaccttcatggaccaacataactttagtccaagatatgagaaccacagtgctacagcagagtccagtcgccttctagacgtacctcgctacctctgtgaggggacggaatccccttaccagacaggacagctgcatccagccatcagggtagctgatttactgcagcacattaatctcatgaagacatcagacagctatgggttcaaagaggaatatgagagcttttttgaaggacagtcagcatcttgggatgtagctaaaaaagatcaaaatagagcaaaaaaccgatatggaaacattatagcatatgatcactccagagtgattttgcaacccgtagaggatgatccttcctcagattatattaatgccaactatattgatggctaccagagaccaagtcattacattgcaacccaaggtcccgttcatgaaacagtgtatgatttctggaggatgatttggcaagaacaatctgcttgcattgtgatggttacaaatttagttgaggttggccgggttaaatgctataaatattggcctgatgatactgaagtttatggtgacttcaaagtaacgtgtgtagaaatggaaccacttgctgaatatgtagttaggacattcaccctggaaaggagggggtacaatgaaatccgtgaagttaaacagttccatttcacgggctggcctgaccatggagtgccctaccatgctacagggctgctttcctttatccggcgagtcaagttatcaaaccctcccagtgctggccccatcgttgtacattgcagtgctggtgctggacgaactggctgctacattgtgattgacatcatgctagacatggctgaaagagagggtgttgttgatatttacaattgtgtcaaagccttaagatctcggcgtattaatatggtccagacagaggaacagtacatttttattcatgatgccattttagaagcctgcttatgtggagaaactgccatacctgtctgtgaatttaaagctgcatattttgatatgattagaatagactcccagactaactcttcacatctcaaggatgaatttcagactctgaattcagtcacccctcgactacaagctgaagactgcagtatagcgtgcctgccaaggaaccatgacaagaaccgtttcatggacatgctgccacctgacagatgtctgccttttttaattacaattgatggggagagcagtaactacatcaatgctgctcttatggacagctacaggcaaccagctgctttcatcgtcacacaataccctctgccaaacactgtaaaagacttctggagattagtgtatgattatggctgtacctccattgtgatgttaaacgaagtcgacttgtcccagggctgccctcagtactggccagaggaagggatgctacgatatggccccatccaagtggaatgtatgtcttgttcaatggactgtgatgtgatcaaccggatttttaggatatgcaatctaacaagaccacaggaaggttatctgatggtgcaacagtttcagtacctaggatgggcttctcatcgagaagtgcctggatccaaaaggtcattcttgaaactgatacttcaggtggaaaagtggcaggaggaatgcaaggagggggaaggccggacgattatccactgcctaaatggtggcgggcgaagtggcatgttctgtgctataggcatcgttgttgaaatggtgaaacggcaaaatgttgtcgatgttttccatgcagtaaagacactgaggaacagcaagccaaacatggtggaagccccggagcaataccgtttctgctatgatgtagctttggagtacctggaatcatcttagttgggtgagactctttaaagtgcatccatgaagaaacctgtccatctattgagccagcagctgttgtacctgttacacttgtgcagaaagattttaatgtggggggtgggagacttttacatttgagaggtaaaagtattttttttatgaagttgtgtatcttaataaaaaggactgaattagtttttattactatattaaagcatcaacatttcatgccacataaattatatttaataagaaccagattgaaatgagaacgtattggtgtttgtacagtgaacatgccaccttttttctcatggtttcagtagagcagctaccacatgttgcatgagttcatactttctacgtggcatttttctccctttctaaaatgaaagctgatgaatcttaaaaggaagaagaaaagaaaagctgtgcaaattcatagtaaagttcgttttttatatgtttccagtgtagcagatctctatataaatatataaatatatataactggcttattttcttttaatgtgcaatgatggctggatcatttaaagttctttttagaaaataacataagccaaagactcaagtgtaaatatgtctatatggagaaagcacattatatttattggttacttacattccttttttgatggctaaaatactaccaccacacaatcatcttttttttcctgaagaaagctttttctttagctaaaatcaattgtaaacgatttttgtagattattttttgtatgttttagtgtaagtagaagataaactttttattcataaaccaggaagcaatgttctttatagtgattctcttgtgtacatgcttgtgaattaaatttgtgtaaaatcccttggcaattgggtcttttaatataggaccaaattaaaacattttgctgaatatgtatagtttttcacaatttcattaggtaaataatggtttggtgatcatacatgagaaatgtacacattaaaaggccttgctgacaacttgcacaatgttgaacatagcctttaagcatcatttaaattttaaaggaatggagtttttcagcctgtggcccagcactggtcaagaaaacaagatggcaacatatatgctttcagggtcaaatttgagcaaactgtaaactgtcagggtgataaaatgtttctcttgatgtttacatgcacaagctttgcgttctgactataaaaagtgtgaacaaatcaatgccagattcctgttttgcgcattgtcatgggattcttaagtgaacctttctaaatgtggtcttgttcacatgctccacgtagctgtaacttcacatcatcagcttgcagtttgtaattgactaaagcattccagtgtcctctttctagattgccagctcatgacatggtgcttataaagatttaattaaagtaagaatgaaataaagtttttataattataacaaaaaaaaaaaaaaaaaaaaaaaaaaaaaaaaaacatctttgcgcggcgcgcgcccgggccccgggaaaaggcttttcaaaacacaccgcgggtgggggcgcgcgggggccccggggggaagagggaacacggggcccaaagcgggtctcccaagagaagaaacccgcgggacacagagaaaaaggcgcgcggggactttctccccccataaaaacaacgcgccgcggggcggaaacccgagagaggggctaccgagagaacacatcctccacagagatgagggagcttttgagagagcgcgacatataacacggggagacctatatattacacaaccgagggaggcaccaagaggagagagcccgcgcgaaatatcaaagattaaagcgcccccggggaccagggggga

SEQ ID NO: 284388 - DNA, 5268 bp, Homo sapiens
tgggataggaaccgaaggagaaggatcttactgaagtggaaggttcaccatgaggagtggaggactatacaagcctggcagtcatggaagttcaaggattgctttttatcgatatctagaaataatttacttctctttctgtgcaagaacaatatgctctcctgtttgcagagctgccccttcagtgtgtttctagagacgaaatggagaagatataccagtagcccagactaagaacatcaatcatagaaggtttgccgcttccttcagattgcaagaagtgacaaaaactgaccaggatttgtatcgctgtgtaactcagtcagaacgaggttccggtgtgtccaattttgctcaacttattgtgagagaaccgccaagacccattgctcctcctcagcttcttggtgttgggcctacatatttgctgatccaactaaatgccaactcgatcattggcgatggtcctatcatcctgaaagaagtagagtaccgaatgacatcaggatcctggacagaaacccatgcagtcaatgctccaacttacaaattatggcatttagatccagataccgaatatgagatccgagttctacttacaagacctggtgaaggtggaacggggctcccaggacctccactaatcaccagaacaaaatgtgcagaacctatgagaaccccaaagacattaaagattgctgaaatacaggcaagacggattgctgtggactgggaatccttgggttacaacattacgcgttgccacacttttaatgtcactatctgctaccattacttccgtggtcacaacgagagcaaggcagactgtttggacatggaccccaaagcccctcagcatgttgtgaaccatctgccaccttatacaaatgtcagcctcaagatgatcctaaccaatccagagggaaggaaggagagtgaagagacaattattcaaactgatgaagatgtgcctggtcccgtaccagtaaaatctcttcaaggaacatcctttgaaaataagatcttcttgaactggaaagaacctttggatccaaatggaatcatcactcaatatgagatcagctatagcagtataagatcatttgatcctgcagttccagtggctggacctccccagactgtatcaaatttatggaacagtacacaccatgtctttatgcatctccaccctggaaccacgtaccagtttttcataagagccagcacggtcaaaggctttggtccagccacagccatcaatgtcaccaccaatatctcagctccaactttacctgactatgaaggagttgatgcctctctcaatgaaactgccaccacaataactgtattgttgagaccagcacaagccaaaggtgctcctatcagtgcttatcagattgttgtggaagaactgcacccacaccgaaccaagagagaagccggagccatggaatgctaccaggttcctgtcacataccaaaatgccatgagtgggggtgcaccgtattactttgctgcagaactccccccgggaaacctacctgagcctgccccgttcactgtgggtgacaatcggacctaccaaggcttttggaaccctcctttggctccgcgcaaaggatacaacatctatttccaggcgatgagcagtgtggagaaggaaactaaaacccagtgcgtacgcattgctacaaaagcagcagcaacagaagaaccagaagtgatcccagatcccgccaagcagacagacagagtggtgaaaatagcaggaattagtgctggaattttggtgttcatcctccttctcctagttgtcatattaattgtaaaaaagagcaaacttgctaaaaaacgcaaagatgccatggggaatacccggcaggagatgactcacatggtgaatgcaatggatcgaagttatgctgatcagagcactctgcatgcagaagatcctctttccatcaccttcatggaccaacataactttagtccaagatatgagaaccacagtgctacagcagagtccagtcgccttctagacgtacctcgctacctctgtgaggggacggaatccccttaccagacaggacagctgcatccagccatcagggtagctgatttactgcagcacattaatctcatgaagacatcagacagctatgggttcaaagaggaatatgagagcttttttgaaggacagtcagcatcttgggatgtagctaaaaaagatcaaaatagagcaaaaaaccgatatggaaacattatagcatatgatcactccagagtgattttgcaacccgtagaggatgatccttcctcagattatattaatgccaactatattgatggctaccagagaccaagtcattacattgcaacccaaggtcccgttcatgaaacagtgtatgatttctggaggatgatttggcaagaacaatctgcttgcattgtgatggttacaaatttagttgaggttggccgggttaaatgctataaatattggcctgatgatactgaagtttatggtgacttcaaagtaacgtgtgtagaaatggaaccacttgctgaatatgtagttaggacattcaccctggaaaggagggggtacaatgaaatccgtgaagttaaacagttccatttcacgggctggcctgaccatggagtgccctaccatgctacagggctgctttcctttatccggcgagtcaagttatcaaaccctcccagtgctggccccatcgttgtacattgcagtgctggtgctggacgaactggctgctacattgtgattgacatcatgctagacatggctgaaagagagggtgttgttgatatttacaattgtgtcaaagccttaagatctcggcgtattaatatggtccagacagaggaacagtacatttttattcatgatgccattttagaagcctgcttatgtggagaaactgccatacctgtctgtgaatttaaagctgcatattttgatatgattagaatagactcccagactaactcttcacatctcaaggatgaatttcagactctgaattcagtcacccctcgactacaagctgaagactgcagtatagcgtgcctgccaaggaaccatgacaagaaccgtttcatggacatgctgccacctgacagatgtctgccttttttaattacaattgatggggagagcagtaactacatcaatgctgctcttatggacagctacaggcaaccagctgctttcatcgtcacacaataccctctgccaaacactgtaaaagacttctggagattagtgtatgattatggctgtacctccattgtgatgttaaacgaagtcgacttgtcccagggctgccctcagtactggccagaggaagggatgctacgatatggccccatccaagtggaatgtatgtcttgttcaatggactgtgatgtgatcaaccggatttttaggatatgcaatctaacaagaccacaggaaggttatctgatggtgcaacagtttcagtacctaggatgggcttctcatcgagaagtgcctggatccaaaaggtcattcttgaaactgatacttcaggtggaaaagtggcaggaggaatgcaaggagggggaaggccggacgattatccactgcctaaatggtggcgggcgaagtggcatgttctgtgctataggcatcgttgttgaaatggtgaaacggcaaaatgttgtcgatgttttccatgcagtaaagacactgaggaacagcaagccaaacatggtggaagccccggagcaataccgtttctgctatgatgtagctttggagtacctggaatcatcttagttgggtgagactctttaaagtgcatccatgaagaaacctgtccatctattgagccagcagctgttgtacctgttacacttgtgcagaaagattttaatgtggggggtgggagacttttacatttgagaggtaaaagtattttttttatgaagttgtgtatcttaataaaaaggactgaattagtttttattactatattaaagcatcaacatttcatgccacataaattatatttaataagaaccagattgaaatgagaacgtattggtgtttgtacagtgaacatgccaccttttttctcatggtttcagtagagcagctaccacatgttgcatgagttcatactttctacgtggcatttttctccctttctaaaatgaaagctgatgaatcttaaaaggaagaagaaaagaaaagctgtgcaaattcatagtaaagttcgttttttatatgtttccagtgtagcagatctctatataaatatataaatatatataactggcttattttcttttaatgtgcaatgatggctggatcatttaaagttctttttagaaaataacataagccaaagactcaagtgtaaatatgtctatatggagaaagcacattatatttattggttacttacattccttttttgatggctaaaatactaccaccacacaatcatcttttttttcctgaagaaagctttttctttagctaaaatcaattgtaaacgatttttgtagattattttttgtatgttttagtgtaagtagaagataaactttttattcataaaccaggaagcaatgttctttatagtgattctcttgtgtacatgcttgtgaattaaatttgtgtaaaatcccttggcaattgggtcttttaatataggaccaaattaaaacattttgctgaatatgtatagtttttcacaatttcattaggtaaataatggtttggtgatcatacatgagaaatgtacacattaaaaggccttgctgacaacttgcacaatgttgaacatagcctttaagcatcatttaaattttaaaggaatggagtttttcagcctgtggcccagcactggtcaagaaaacaagatggcaacatatatgctttcagggtcaaatttgagcaaactgtaaactgtcagggtgataaaatgtttctcttgatgtttacatgcacaagctttgcgttctgactataaaaagtgtgaacaaatcaatgccagattcctgttttgcgcattgtcatgggattcttaagtgaacctttctaaatgtggtcttgttcacatgctccacgtagctgtaacttcacatcatcagcttgcagtttgtaattgactaaagcattccagtgtcctctttctagattgccagctcatgacatggtgcttataaagatttaattaaagtaagaatgaaataaagtttttataattataa

SEQ ID NO: 284389 - DNA, 4292 bp, Homo sapiens
cgagcatggagagctgccgccgcggccggccggcgacgctggcgacgctttcgcccctgaggtagtttggcgaccgcgaagaaggaaaaagggcgggcgggcggctgtcctctcaccgtcctcaccccgcgaggcccggcccgctcctccgtcgtggatttcgcggcgatccccccggcagctctttgcaaagctgcttgaaacttctcccaaactcggcatggatacgactgcggcggcggcgctgcctgcttttgtggcgctcttgctcctctctccttggcctctcctgggatcggcccaaggccagttctccgcaggtggctgtacttttgatgatggtccaggggcctgtgattaccaccaggatctgtatgatgactttgaatgggtgcatgttagtgctcaagagcctcattatctaccacccgagatgccccaaggttcctatatgatagtggactcttcagatcacgaccctggagaaaaagccagacttcagctgcctacaatgaaggagaacgacactcactgcattgatttcagttacctattatatagccagaaaggactgaatcctggcactttgaacatattagttagggtgaataaaggacctcttgccaatccaatttggaatgtgactggattcacgggtagagattggcttcgggctgagctagcagtgagcaccttttggcccaatgaatatcaggtaatatttgaagctgaagtctcaggagggagaagtggttatattgccattgatgacatccaagtactgagttatccttgtgataaatctcctcatttcctccgtctaggggatgtagaggtgaatgcagggcaaaacgctacatttcagtgcattgccacagggagagatgctgtgcataacaagttatggctccagagacgaaatggagaagatataccagtagcccagactaagaacatcaatcatagaaggtttgccgcttccttcagattgcaagaagtgacaaaaactgaccaggatttgtatcgctgtgtaactcagtcagaacgaggttccggtgtgtccaattttgctcaacttattgtgagagaaccgccaagacccattgctcctcctcagcttcttggtgttgggcctacatatttgctgatccaactaaatgccaactcgatcattggcgatggtcctatcatcctgaaagaagtagagtaccgaatgacatcaggatcctggacagaaacccatgcagtcaatgctccaacttacaaattatggcatttagatccagataccgaatatgagatccgagttctacttacaagacctggtgaaggtggaacggggctcccaggacctccactaatcaccagaacaaaatgtgcagaacctatgagaaccccaaagacattaaagattgctgaaatacaggcaagacggattgctgtggactgggaatccttgggttacaacattacgcgttgccacacttttaatgtcactatctgctaccattacttccgtggtcacaacgagagcaaggcagactgtttggacatggaccccaaagcccctcagcatgttgtgaaccatctgccaccttatacaaatgtcagcctcaagatgatcctaaccaatccagagggaaggaaggagagtgaagagacaattattcaaactgatgaagatgtgcctggtcccgtaccagtaaaatctcttcaaggaacatcctttgaaaataagatcttcttgaactggaaagaacctttggatccaaatggaatcatcactcaatatgagatcagctatagcagtataagatcatttgatcctgcagttccagtggctggacctccccagactgtatcaaatttatggaacagtacacaccatgtctttatgcatctccaccctggaaccacgtaccagtttttcataagagccagcacggtcaaaggctttggtccagccacagccatcaatgtcaccaccaatatctcagctccaactttacctgactatgaaggagttgatgcctctctcaatgaaactgccaccacaataactgtattgttgagaccagcacaagccaaaggtgctcctatcagtgcttatcagattgttgtggaagaactgcacccacaccgaaccaagagagaagccggagccatggaatgctaccaggttcctgtcacataccaaaatgccatgagtgggggtgcaccgtattactttgctgcagaactccccccgggaaacctacctgagcctgccccgttcactgtgggtgacaatcggacctaccaaggcttttggaaccctcctttggctccgcgcaaaggatacaacatctatttccaggcgatgagcagtgtggagaaggaaactaaaacccagtgcgtacgcattgctacaaaagcagcagcaacagaagaaccagaagtgatcccagatcccgccaagcagacagacagagtggtgaaaatagcaggaattagtgctggaattttggtgttcatcctccttctcctagttgtcatattaattgtaaaaaagagcaaacttgctaaaaaacgcaaagatgccatggggaatacccggcaggagatgactcacatggtgaatgcaatggatcgaagttatgctgatcagagcactctgcatgcagaagatcctctttccatcaccttcatggaccaacataactttagtccaagatatgagaaccacagtgctacagcagagtccagtcgccttctagacgtacctcgctacctctgtgaggggacggaatccccttaccagacaggacagctgcatccagccatcagggtagctgatttactgcagcacattaatctcatgaagacatcagacagctatgggttcaaagaggaatatgagagcttttttgaaggacagtcagcatcttgggatgtagctaaaaaagatcaaaatagagcaaaaaaccgatatggaaacattatagcatatgatcactccagagtgattttgcaacccgtagaggatgatccttcctcagattatattaatgccaactatattgatggctaccagagaccaagtcattacattgcaacccaaggtcccgttcatgaaacagtgtatgatttctggaggatgatttggcaagaacaatctgcttgcattgtgatggttacaaatttagttgaggttggccgggttaaatgctataaatattggcctgatgatactgaagtttatggtgacttcaaagtaacgtgtgtagaaatggaaccacttgctgaatatgtagttaggacattcaccctggaaaggagggggtacaatgaaatccgtgaagttaaacagttccatttcacgggctggcctgaccatggagtgccctaccatgctacagggctgctttcctttatccggcgagtcaagttatcaaaccctcccagtgctggccccatcgttgtacattgcagtgctggtgctggacgaactggctgctacattgtgattgacatcatgctagacatggctgaaagagagggtgttgttgatatttacaattgtgtcaaagccttaagatctcggcgtattaatatggtccagacagaggaacagtacatttttattcatgatgccattttagaagcctgcttatgtggagaaactgccatacctgtctgtgaatttaaagctgcatattttgatatgattagaatagactcccagactaactcttcacatctcaaggatgaatttcagactctgaattcagtcacccctcgactacaagctgaagactgcagtatagcgtgcctgccaaggaaccatgacaagaaccgtttcatggacatgctgccacctgacagatgtctgccttttttaattacaattgatggggagagcagtaactacatcaatgctgctcttatggacagctacaggcaaccagctgctttcatcgtcacacaataccctctgccaaacactgtaaaagacttctggagattagtgtatgattatggctgtacctccattgtgatgttaaacgaagtcgacttgtcccagggctgccctcagtactggccagaggaagggatgctacgatatggccccatccaagtggaatgtatgtcttgttcacatgctccacgtagctgtaacttcacatcatcagcttgcagtttgtaattgactaaagcattccagtgtcctctttctagattgccagctcatgacatggtgcttataaagatttaattaaagtaagaatgaaataaagtttttataattataa

SEQ ID NO: 284390 - DNA, 2442 bp, Homo sapiens
cgagcatggagagctgccgccgcggccggccggcgacgctggcgacgctttcgcccctgaggtagtttggcgaccgcgaagaaggaaaaagggcgggcgggcggctgtcctctcaccgtcctcaccccgcgaggcccggcccgctcctccgtcgtggatttcgcggcgatccccccggcagctctttgcaaagctgcttgaaacttctcccaaactcggcatggatacgactgcggcggcggcgctgcctgcttttgtggcgctcttgctcctctctccttggcctctcctgggatcggcccaaggccagttctccgcaggtggctgtacttttgatgatggtccaggggcctgtgattaccaccaggatctgtatgatgactttgaatgggtgcatgttagtgctcaagagcctcattatctaccacccgagatgccccaaggttcctatatgatagtggactcttcagatcacgaccctggagaaaaagccagacttcagctgcctacaatgaaggagaacgacactcactgcattgatttcagttacctattatatagccagaaaggactgaatcctggcactttgaacatattagttagggtgaataaaggacctcttgccaatccaatttggaatgtgactggattcacgggtagagattggcttcgggctgagctagcagtgagcaccttttggcccaatgaatatcaggtaatatttgaagctgaagtctcaggagggagaagtggttatattgccattgatgacatccaagtactgagttatccttgtgataaatctcctcatttcctccgtctaggggatgtagaggtgaatgcagggcaaaacgctacatttcagtgcattgccacagggagagatgctgtgcataacaagttatggctccagagacgaaatggagaagatataccagtagcccagactaagaacatcaatcatagaaggtttgccgcttccttcagattgcaagaagtgacaaaaactgaccaggatttgtatcgctgtgtaactcagtcagaacgaggttccggtgtgtccaattttgctcaacttattgtgagagaaccgccaagacccattgctcctcctcagcttcttggtgttgggcctacatatttgctgatccaactaaatgccaactcgatcattggcgatggtcctatcatcctgaaagaagtagagtaccgaatgacatcaggatcctggacagaaacccatgcagtcaatgctccaacttacaaattatggcatttagatccagataccgaatatgagatccgagttctacttacaagacctggtgaaggtggaacggggctcccaggacctccactaatcaccagaacaaaatgtgcagaacctatgagaaccccaaagacattaaagattgctgaaatacaggcaagacggattgctgtggactgggaatccttgggttacaacattacgcgttgccacacttttaatgtcactatctgctaccattacttccgtggtcacaacgagagcaaggcagactgtttggacatggaccccaaagcccctcagcatgttgtgaaccatctgccaccttatacaaatgtcagcctcaagatgatcctaaccaatccagagggaaggaaggagagtgaagagacaattattcaaactgatgaagatgtgcctggtcccgtaccagtaaaatctcttcaaggaacatcctttgaaaataagatcttcttgaactggaaagaacctttggatccaaatggaatcatcactcaatatgagatcagctatagcagtataagatcatttgatcctgcagttccagtggctggacctccccagactgtatcaaatttatggaacagtacacaccatgtctttatgcatctccaccctggaaccacgtaccagtttttcataagagccagcacggtcaaaggctttggtccagccacagccatcaatgtcaccaccaatatctcagctccaactttacctgactatgaaggagttgatgcctctctcaatgaaactgccaccacaataactgtattgttgagaccagcacaagccaaaggtgctcctatcagtgcttatcagattgttgtggaagaactgcacccacaccgaaccaagagagaagccggagccatggaatgctaccaggttcctgtcacataccaaaatgccatgagtgggggtgcaccgtattactttgctgcagaactccccccgggaaacctacctgagcctgccccgttcactgtgggtgacaatcggacctaccaaggcttttggaaccctcctttggctccgcgcaaaggatacaacatctatttccaggcgatgagcagtgtggagaaggaaactaaacccagtgcgtacgcattgctacataagcagcagctacacgagaaccagtacttagg

SEQ ID NO: 284391 - DNA, 1140 bp, Homo sapiens
cgagcatggagagctgccgccgcggccggccggcgacgctggcgacgctttcgcccctgaggtagtttggcgaccgcgaagaaggaaaaagggcgggcgggcggctgtcctctcaccgtcctcaccccgcgaggcccggcccgctcctccgtcgtggatttcgcggcgatccccccggcagctctttgcaaagctgcttgaaacttctcccaaactcggcatggatacgactgcggcggcggcgctgcctgcttttgtggcgctcttgctcctctctccttggcctctcctgggatcggcccaaggccagttctccgcaggtggctgtacttttgatgatggtccaggggcctgtgattaccaccaggatctgtatgatgactttgaatgggtgcatgttagtgctcaagagcctcattatctaccacccgagatgccccaaggttcctatatgatagtggactcttcagatcacgaccctggagaaaaagccagacttcagctgcctacaatgaaggagaacgacactcactgcattgatttcagttacctattatatagccagaaaggactgaatcctggcactttgaacatattagttagggtgaataaaggacctcttgccaatccaatttggaatgtgactggattcacgggtagagattggcttcgggctgagctagcagtgagcaccttttggcccaatgaatatcaggtaatatttgaagctgaagtctcaggagggagaagtggttatattgccattgatgacatccaagtactgagttatccttgtgataaatctcctcatttcctccgtctaggggatgtagaggtgaatgcagggcaaaacgctacatttcagtgcattgccacagggagagatgctgtgcataacaagttatggctccagattttcagactgtgattgacagaaggtaactgcaactgcccaaagtgcgaccttggataaggaaggatgtctgtattcctgaggaacgttcaatgatacggaatttgtgattcataacttgaagctatgataaagctctacttatgggaaataagatcaaaagtgaaattataacatataatttatactgaaatgaaataataaaaagcatttggttatattcttga

SEQ ID NO: 284392 - DNA, 347 bp, Homo sapiens
accaggatctgtatgatgactttgaatgggtgcatgttagtgctcaagagcctcattatctaccacccgagatgccccaaggtgagagtcactctgtttagtcagtgttgggggaatagttttgcagtatctatgattttcttatttaaagtgtaacaacaataatttaatggttataataagctaaattattgtgctactggatcacttctaagagccttattctttgcctttcccttaataactttctgtaattctgtattccttgttgtctttgaaaaaaaaaagataagtattagtgtttttttctatttaataaaaacccaagtgacaaaccaaaaatcaaa

SEQ ID NO: 284393 - DNA, 748 bp, Homo sapiens
ctttttttcttttccccaaagtgcttatcagattgttgtggaagaactgcacccacaccgaaccaagagagaagccggagccatggaatgctaccaggttcctgtcacataccaaaatgccatgagtgggggtgcaccgtattactttgctgcagaactccccccgggaaacctacctgagcctgccccgttcactgtgggtgacaatcggacctaccaaggcttttggaaccctcctttggctccgcgcaaaggatacaacatctatttccaggcgatgagcagtgtggagaaggaaactaaaacccagtgcgtacgcattgctacaaaagcattttttccacatatgaaaagctaaccctgtttctacaaaaactaaaaaaaatgagccaggcatggtgacttgtgcctgtagctccagctacttggaagatgggaagattgcttcagcctaggaatttgaggctgcagtgagctatgattgtaccactgcactccagcctgggtgacagagtgagactatgtctcaaaaggaaaaaaaaaagaaaagaaaagaaatgaaaaagaaaaactaccacatttgttaaagtaacatcaacttattgcctgactacattttaaactaacatgcaagtatggtcagctttggtgtgaaatttttcaatatgaaaataaaaagttttctgacagggcgttttgaagaaacatttaatagtcaaaatggcataatcatatgactgggaagagg

SEQ ID NO: 284394 - DNA, 757 bp, Homo sapiens
tagagttcgtaaattgagaactgctgctttagttcatgttctaactcaagaattccttattttaaatctcttcctgagagataaatctcctcatttcctccgtctaggggatgtagaggtgaatgcagggcaaaacgctacatttcagtgcattgccacagggagagatgctgtgcataacaagttatggctccagagacgaaatggagaagatataccagtagcccagactaagaacatcaatcatagaaggtttgccgcttccttcagattgcaagaagtgacaaaaactgaccaggatttgtatcgctgtgtaactcagtcagaacgaggttccggtgtgtccaattttgctcaacttattgtgagagaaccgccaagacccattgctcctcctcagcttcttggtgttgggcctacatatttgctgatccaactaaatgccaactcgatcattggcgatggtcctatcatcctgaaagaagtagagtaccgaatgacatcaggatcctggacagaaacccatgcagtcaatgctccaacttacaaattatggcatttagatccagataccgaatatgagatccgagttctacttacaagacctggtgaaggtggaacggggctcccaggacctccactaatcaccagaacaaaatgtgcaggtctttgagatattcccacactgtcttccacaatggttgacctaatttacactcctaccaacaagtggcttttaacagattaacaccgaatc

SEQ ID NO: 284395 - DNA, 6104 bp, Homo sapiens
  misc_feature (5994)..(5994): n is a, c, g, or t
cgagcatggagagctgccgccgcggccggccggcgacgctggcgacgctttcgcccctgaggtagtttggcgaccgcgaagaaggaaaaagggcgggcgggcggctgtcctctcaccgtcctcaccccgcgaggcccggcccgctcctccgtcgtggatttcgcggcgatccccccggcagctctttgcaaagctgcttgaaacttctcccaaactcggcatggatacgactgcggcggcggcgctgcctgcttttgtggcgctcttgctcctctctccttggcctctcctgggatcggcccaaggccagttctccgcaggtggctgtacttttgatgatggtccaggggcctgtgattaccaccaggatctgtatgatgactttgaatgggtgcatgttagtgctcaagagcctcattatctaccacccgagatgccccaaggttcctatatgatagtggactcttcagatcacgaccctggagaaaaagccagacttcagctgcctacaatgaaggagaacgacactcactgcattgatttcagttacctattatatagccagaaaggactgaatcctggcactttgaacatattagttagggtgaataaaggacctcttgccaatccaatttggaatgtgactggattcacgggtagagattggcttcgggctgagctagcagtgagcaccttttggcccaatgaatatcaggtaatatttgaagctgaagtctcaggagggagaagtggttatattgccattgatgacatccaagtactgagttatccttgtgataaatctcctcatttcctccgtctaggggatgtagaggtgaatgcagggcaaaacgctacatttcagtgcattgccacagggagagatgctgtgcataacaagttatggctccagagacgaaatggagaagatataccagtagcccagactaagaacatcaatcatagaaggtttgccgcttccttcagattgcaagaagtgacaaaaactgaccaggatttgtatcgctgtgtaactcagtcagaacgaggttccggtgtgtccaattttgctcaacttattgtgagagaaccgccaagacccattgctcctcctcagcttcttggtgttgggcctacatatttgctgatccaactaaatgccaactcgatcattggcgatggtcctatcatcctgaaagaagtagagtaccgaatgacatcaggatcctggacagaaacccatgcagtcaatgctccaacttacaaattatggcatttagatccagataccgaatatgagatccgagttctacttacaagacctggtgaaggtggaacggggctcccaggacctccactaatcaccagaacaaaatgtgcagaacctatgagaaccccaaagacattaaagattgctgaaatacaggcaagacggattgctgtggactgggaatccttgggttacaacattacgcgttgccacacttttaatgtcactatctgctaccattacttccgtggtcacaacgagagcaaggcagactgtttggacatggaccccaaagcccctcagcatgttgtgaaccatctgccaccttatacaaatgtcagcctcaagatgatcctaaccaatccagagggaaggaaggagagtgaagagacaattattcaaactgatgaagatgtgcctggtcccgtaccagtaaaatctcttcaaggaacatcctttgaaaataagatcttcttgaactggaaagaacctttggatccaaatggaatcatcactcaatatgagatcagctatagcagtataagatcatttgatcctgcagttccagtggctggacctccccagactgtatcaaatttatggaacagtacacaccatgtctttatgcatctccaccctggaaccacgtaccagtttttcataagagccagcacggtcaaaggctttggtccagccacagccatcaatgtcaccaccaatatctcagctccaactttacctgactatgaaggagttgatgcctctctcaatgaaactgccaccacaataactgtattgttgagaccagcacaagccaaaggtgctcctatcagtgcttatcagattgttgtggaagaactgcacccacaccgaaccaagagagaagccggagccatggaatgctaccaggttcctgtcacataccaaaatgccatgagtgggggtgcaccgtattactttgctgcagaactccccccgggaaacctacctgagcctgccccgttcactgtgggtgacaatcggacctaccaaggcttttggaaccctcctttggctccgcgcaaaggatacaacatctatttccaggcgatgagcagtgtggagaaggaaactaaaacccagtgcgtacgcattgctacaaaagcagcagcaacagaagaaccagaagtgatcccagatcccgccaagcagacagacagagtggtgaaaatagcaggaattagtgctggaattttggtgttcatcctccttctcctagttgtcatattaattgtaaaaaagagcaaacttgctaaaaaacgcaaagatgccatggggaatacccggcaggagatgactcacatggtgaatgcaatggatcgaagttatgctgatcagagcactctgcatgcagaagatcctctttccatcaccttcatggaccaacataactttagtccaagatatgagaaccacagtgctacagcagagtccagtcgccttctagacgtacctcgctacctctgtgaggggacggaatccccttaccagacaggacagctgcatccagccatcagggtagctgatttactgcagcacattaatctcatgaagacatcagacagctatgggttcaaagaggaatatgagagcttttttgaaggacagtcagcatcttgggatgtagctaaaaaagatcaaaatagagcaaaaaaccgatatggaaacattatagcatatgatcactccagagtgattttgcaacccgtagaggatgatccttcctcagattatattaatgccaactatattgatggctaccagagaccaagtcattacattgcaacccaaggtcccgttcatgaaacagtgtatgatttctggaggatgatttggcaagaacaatctgcttgcattgtgatggttacaaatttagttgaggttggccgggttaaatgctataaatattggcctgatgatactgaagtttatggtgacttcaaagtaacgtgtgtagaaatggaaccacttgctgaatatgtagttaggacattcaccctggaaaggagggggtacaatgaaatccgtgaagttaaacagttccatttcacgggctggcctgaccatggagtgccctaccatgctacagggctgctttcctttatccggcgagtcaagttatcaaaccctcccagtgctggccccatcgttgtacattgcagtgctggtgctggacgaactggctgctacattgtgattgacatcatgctagacatggctgaaagagagggtgttgttgatatttacaattgtgtcaaagccttaagatctcggcgtattaatatggtccagacagaggaacagtacatttttattcatgatgccattttagaagcctgcttatgtggagaaactgccatacctgtctgtgaatttaaagctgcatattttgatatgattagaatagactcccagactaactcttcacatctcaaggatgaatttcagactctgaattcagtcacccctcgactacaagctgaagactgcagtatagcgtgcctgccaaggaaccatgacaagaaccgtttcatggacatgctgccacctgacagatgtctgccttttttaattacaattgatggggagagcagtaactacatcaatgctgctcttatggacagctacaggcaaccagctgctttcatcgtcacacaataccctctgccaaacactgtaaaagacttctggagattagtgtatgattatggctgtacctccattgtgatgttaaacgaagtcgacttgtcccagggctgccctcagtactggccagaggaagggatgctacgatatggccccatccaagtggaatgtatgtcttgttcaatggactgtgatgtgatcaaccggatttttaggatatgcaatctaacaagaccacaggaaggttatctgatggtgcaacagtttcagtacctaggatgggcttctcatcgagaagtgcctggatccaaaaggtcattcttgaaactgatacttcaggtggaaaagtggcaggaggaatgcaaggagggggaaggccggacgattatccactgcctaaatggtggcgggcgaagtggcatgttctgtgctataggcatcgttgttgaaatggtgaaacggcaaaatgttgtcgatgttttccatgcagtaaagacactgaggaacagcaagccaaacatggtggaagccccggagcaataccgtttctgctatgatgtagctttggagtacctggaatcatcttagttgggtgagactctttaaagtgcatccatgaagaaacctgtccatctattgagccagcagctgttgtacctgttacacttgtgcagaaagattttaatgtggggggtgggagacttttacatttgagaggtaaaagtattttttttatgaagttgtgtatcttaataaaaaggactgaattagtttttattactatattaaagcatcaacatttcatgccacataaattatatttaataagaaccagattgaaatgagaacgtattggtgtttgtacagtgaacatgccaccttttttctcatggtttcagtagagcagctaccacatgttgcatgagttcatactttctacgtggcatttttctccctttctaaaatgaaagctgatgaatcttaaaaggaagaagaaaagaaaagctgtgcaaattcatagtaaagttcgttttttatatgtttccagtgtagcagatctctatataaatatataaatatatataactggcttattttcttttaatgtgcaatgatggctggatcatttaaagttctttttagaaaataacataagccaaagactcaagtgtaaatatgtctatatggagaaagcacattatatttattggttacttacattccttttttgatggctaaaatactaccaccacacaatcatcttttttttcctgaagaaagctttttctttagctaaaatcaattgtaaacgatttttgtagattattttttgtatgttttagtgtaagtagaagataaactttttattcataaaccaggaagcaatgttctttatagtgattctcttgtgtacatgcttgtgaattaaatttgtgtaaaatcccttggcaattgggtcttttaatataggaccaaattaaaacattttgctgaatatgtatagtttttcacaatttcattaggtaaataatggtttggtgatcatacatgagaaatgtacacattaaaaggccttgctgacaacttgcacaatgttgaacatagcctttaagcatcatttaaattttaaaggaatggagtttttcagcctgtggcccagcactggtcaagaaaacaagatggcaacatatatgctttcagggtcaaatttgagcaaactgtaaactgtcagggtgataaaatgtttctcttgatgtttacatgcacaagctttgcgttctgactataaaaagtgtgaacaaatcaatgccagattcctgttttgcgcattgtcatgggattcttaagtgaacctttctaaatgtggtcttgttcacatgctccacgtagctgtaacttcacatcatcagcttgcagtttgtaattgactaaagcattccagtgtcctctttctagattgccagctcatgacatggtgcttataaagatttaattaaagtaagaatgaaataaagtttttataattataaaaaaaaaanaaaaaaaactctagggggggccccgttacccaatttttctcttttatggattgtatttacaattacatgggccgctggtttaaaacaatattaattgggaaaaacctggt

SEQ ID NO: 284396 - DNA, 6103 bp, Homo sapiens
cgagcatggagagctgccgccgcggccggccggcgacgctggcgacgctttcgcccctgaggtagtttggcgaccgcgaagaaggaaaaagggcgggcgggcggctgtcctctcaccgtcctcaccccgcgaggcccggcccgctcctccgtcgtggatttcgcggcgatccccccggcagctctttgcaaagctgcttgaaacttctcccaaactcggcatggatacgactgcggcggcggcgctgcctgcttttgtggcgctcttgctcctctctccttggcctctcctgggatcggcccaaggccagttctccgcagtgtctgtgcttgtggtcggtaacttttgctgctgttgttctgctgctgtctgccattccattcgccatctatcacgcacacagaaccctggccaggatcatgaagggcgattgaaaaggtggctgtacttttgatgatggtccaggggcctgtgattaccaccaggatctgtatgatgactttgaatgggtgcatgttagtgctcaagagcctcattatctaccacccgagatgccccaaggttcctatatgatagtggactcttcagatcacgaccctggagaaaaagccagacttcagctgcctacaatgaaggagaacgacactcactgcattgatttcagttacctattatatagccagaaaggactgaatcctggcactttgaacatattagttagggtgaataaaggacctcttgccaatccaatttggaatgtgactggattcacgggtagagattggcttcgggctgagctagcagtgagcaccttttggcccaatgaatatcaggtaatatttgaagctgaagtctcaggagggagaagtggttatattgccattgatgacatccaagtactgagttatccttgtgataaatctcctcatttcctccgtctaggggatgtagaggtgaatgcagggcaaaacgctacatttcagtgcattgccacagggagagatgctgtgcataacaagttatggctccagagacgaaatggagaagatataccagtagcccagactaagaacatcaatcatagaaggtttgccgcttccttcagattgcaagaagtgacaaaaactgaccaggatttgtatcgctgtgtaactcagtcagaacgaggttccggtgtgtccaattttgctcaacttattgtgagagaaccgccaagacccattgctcctcctcagcttcttggtgttgggcctacatatttgctgatccaactaaatgccaactcgatcattggcgatggtcctatcatcctgaaagaagtagagtaccgaatgacatcaggatcctggacagaaacccatgcagtcaatgctccaacttacaaattatggcatttagatccagataccgaatatgagatccgagttctacttacaagacctggtgaaggtggaacggggctcccaggacctccactaatcaccagaacaaaatgtgcagaacctatgagaaccccaaagacattaaagattgctgaaatacaggcaagacggattgctgtggactgggaatccttgggttacaacattacgcgttgccacacttttaatgtcactatctgctaccattacttccgtggtcacaacgagagcaaggcagactgtttggacatggaccccaaagcccctcagcatgttgtgaaccatctgccaccttatacaaatgtcagcctcaagatgatcctaaccaatccagagggaaggaaggagagtgaagagacaattattcaaactgatgaagatgtgcctggtcccgtaccagtaaaatctcttcaaggaacatcctttgaaaataagatcttcttgaactggaaagaacctttggatccaaatggaatcatcactcaatatgagatcagctatagcagtataagatcatttgatcctgcagttccagtggctggacctccccagactgtatcaaatttatggaacagtacacaccatgtctttatgcatctccaccctggaaccacgtaccagtttttcataagagccagcacggtcaaaggctttggtccagccacagccatcaatgtcaccaccaatatctcagctccaactttacctgactatgaaggagttgatgcctctctcaatgaaactgccaccacaataactgtattgttgagaccagcacaagccaaaggtgctcctatcagtgcttatcagattgttgtggaagaactgcacccacaccgaaccaagagagaagccggagccatggaatgctaccaggttcctgtcacataccaaaatgccatgagtgggggtgcaccgtattactttgctgcagaactccccccgggaaacctacctgagcctgccccgttcactgtgggtgacaatcggacctaccaaggcttttggaaccctcctttggctccgcgcaaaggatacaacatctatttccaggcgatgagcagtgtggagaaggaaactaaaacccagtgcgtacgcattgctacaaaagcagcagcaacagaagaaccagaagtgatcccagatcccgccaagcagacagacagagtggtgaaaatagcaggaattagtgctggaattttggtgttcatcctccttctcctagttgtcatattaattgtaaaaaagagcaaacttgctaaaaaacgcaaagatgccatggggaatacccggcaggagatgactcacatggtgaatgcaatggatcgaagttatgctgatcagagcactctgcatgcagaagatcctctttccatcaccttcatggaccaacataactttagtccaagatatgagaaccacagtgctacagcagagtccagtcgccttctagacgtacctcgctacctctgtgaggggacggaatccccttaccagacaggacagctgcatccagccatcagggtagctgatttactgcagcacattaatctcatgaagacatcagacagctatgggttcaaagaggaatatgagagcttttttgaaggacagtcagcatcttgggatgtagctaaaaaagatcaaaatagagcaaaaaaccgatatggaaacattatagcatatgatcactccagagtgattttgcaacccgtagaggatgatccttcctcagattatattaatgccaactatattgatggctaccagagaccaagtcattacattgcaacccaaggtcccgttcatgaaacagtgtatgatttctggaggatgatttggcaagaacaatctgcttgcattgtgatggttacaaatttagttgaggttggccgggttaaatgctataaatattggcctgatgatactgaagtttatggtgacttcaaagtaacgtgtgtagaaatggaaccacttgctgaatatgtagttaggacattcaccctggaaaggagggggtacaatgaaatccgtgaagttaaacagttccatttcacgggctggcctgaccatggagtgccctaccatgctacagggctgctttcctttatccggcgagtcaagttatcaaaccctcccagtgctggccccatcgttgtacattgcagtgctggtgctggacgaactggctgctacattgtgattgacatcatgctagacatggctgaaagagagggtgttgttgatatttacaattgtgtcaaagccttaagatctcggcgtattaatatggtccagacagaggaacagtacatttttattcatgatgccattttagaagcctgcttatgtggagaaactgccatacctgtctgtgaatttaaagctgcatattttgatatgattagaatagactcccagactaactcttcacatctcaaggatgaatttcagactctgaattcagtcacccctcgactacaagctgaagactgcagtatagcgtgcctgccaaggaaccatgacaagaaccgtttcatggacatgctgccacctgacagatgtctgccttttttaattacaattgatggggagagcagtaactacatcaatgctgctcttatggacagctacaggcaaccagctgctttcatcgtcacacaataccctctgccaaacactgtaaaagacttctggagattagtgtatgattatggctgtacctccattgtgatgttaaacgaagtcgacttgtcccagggctgccctcagtactggccagaggaagggatgctacgatatggccccatccaagtggaatgtatgtcttgttcaatggactgtgatgtgatcaaccggatttttaggatatgcaatctaacaagaccacaggaaggttatctgatggtgcaacagtttcagtacctaggatgggcttctcatcgagaagtgcctggatccaaaaggtcattcttgaaactgatacttcaggtggaaaagtggcaggaggaatgcaaggagggggaaggccggacgattatccactgcctaaatggtggcgggcgaagtggcatgttctgtgctataggcatcgttgttgaaatggtgaaacggcaaaatgttgtcgatgttttccatgcagtaaagacactgaggaacagcaagccaaacatggtggaagccccggagcaataccgtttctgctatgatgtagctttggagtacctggaatcatcttagttgggtgagactctttaaagtgcatccatgaagaaacctgtccatctattgagccagcagctgttgtacctgttacacttgtgcagaaagattttaatgtggggggtgggagacttttacatttgagaggtaaaagtattttttttatgaagttgtgtatcttaataaaaaggactgaattagtttttattactatattaaagcatcaacatttcatgccacataaattatatttaataagaaccagattgaaatgagaacgtattggtgtttgtacagtgaacatgccaccttttttctcatggtttcagtagagcagctaccacatgttgcatgagttcatactttctacgtggcatttttctccctttctaaaatgaaagctgatgaatcttaaaaggaagaagaaaagaaaagctgtgcaaattcatagtaaagttcgttttttatatgtttccagtgtagcagatctctatataaatatataaatatatataactggcttattttcttttaatgtgcaatgatggctggatcatttaaagttctttttagaaaataacataagccaaagactcaagtgtaaatatgtctatatggagaaagcacattatatttattggttacttacattccttttttgatggctaaaatactaccaccacacaatcatcttttttttcctgaagaaagctttttctttagctaaaatcaattgtaaacgatttttgtagattattttttgtatgttttagtgtaagtagaagataaactttttattcataaaccaggaagcaatgttctttatagtgattctcttgtgtacatgcttgtgaattaaatttgtgtaaaatcccttggcaattgggtcttttaatataggaccaaattaaaacattttgctgaatatgtatagtttttcacaatttcattaggtaaataatggtttggtgatcatacatgagaaatgtacacattaaaaggccttgctgacaacttgcacaatgttgaacatagcctttaagcatcatttaaattttaaaggaatggagtttttcagcctgtggcccagcactggtcaagaaaacaagatggcaacatatatgctttcagggtcaaatttgagcaaactgtaaactgtcagggtgataaaatgtttctcttgatgtttacatgcacaagctttgcgttctgactataaaaagtgtgaacaaatcaatgccagattcctgttttgcgcattgtcatgggattcttaagtgaacctttctaaatgtggtcttgttcacatgctccacgtagctgtaacttcacatcatcagcttgcagtttgtaattgactaaagcattccagtgtcctctttctagattgccagctcatgacatggtgcttataaagatttaattaaagtaagaatgaaataaagtttttataattataa

SEQ ID NO: 284397 - DNA, 2821 bp, Homo sapiens
cgagcatggagagctgccgccgcggccggccggcgacgctggcgacgctttcgcccctgaggtagtttggcgaccgcgaagaaggaaaaagggcgggcgggcggctgtcctctcaccgtcctcaccccgcgaggcccggcccgctcctccgtcgtggatttcgcggcgatccccccggcagctctttgcaaagctgcttgaaacttctcccaaactcggcatggatacgactgcggcggcggcgctgcctgcttttgtggcgctcttgctcctctctccttggcctctcctgggatcggcccaaggccagttctccgcaggtggctgtacttttgatgatggtccaggggcctgtgattaccaccaggatctgtatgatgactttgaatgggtgcatgttagtgctcaagagcctcattatctaccacccgagatgccccaaggttcctatatgatagtggactcttcagatcacgaccctggagaaaaagccagacttcagctgcctacaatgaaggagaacgacactcactgcattgatttcagttacctattatatagccagaaaggactgaatcctggcactttgaacatattagttagggtgaataaaggacctcttgccaatccaatttggaatgtgactggattcacgggtagagattggcttcgggctgagctagcagtgagcaccttttggcccaatgaatatcaggtaatatttgaagctgaagtctcaggagggagaagtggttatattgccattgatgacatccaagtactgagttatccttgtgataaatctcctcatttcctccgtctaggggatgtagaggtgaatgcagggcaaaacgctacatttcagtgcattgccacagggagagatgctgtgcataacaagttatggctccagagacgaaatggagaagatataccagtagcccagactaagaacatcaatcatagaaggtttgccgcttccttcagattgcaagaagtgacaaaaactgaccaggatttgtatcgctgtgtaactcagtcagaacgaggttccggtgtgtccaattttgctcaacttattgtgagagaaccgccaagacccattgctcctcctcagcttcttggtgttgggcctacatatttgctgatccaactaaatgccaactcgatcattggcgatggtcctatcatcctgaaagaagtagagtaccgaatgacatcaggatcctggacagaaacccatgcagtcaatgctccaacttacaaattatggcatttagatccagataccgaatatgagatccgagttctacttacaagacctggtgaaggtggaacggggctcccaggacctccactaatcaccagaacaaaatgtgcagaacctatgagaaccccaaagacattaaagattgctgaaatacaggcaagacggattgctgtggactgggaatccttgggttacaacattacgcgttgccacacttttaatgtcactatctgctaccattacttccgtggtcacaacgagagcaaggcagactgtttggacatggaccccaaagcccctcagcatgttgtgaaccatctgccaccttatacaaatgtcagcctcaagatgatcctaaccaatccagagggaaggaaggagagtgaagagacaattattcaaactgatgaagatgtgcctggtcccgtaccagtaaaatctcttcaaggaacatcctttgaaaataagatcttcttgaactggaaagaacctttggatccaaatggaatcatcactcaatatgagatcagctatagcagtataagatcatttgatcctgcagttccagtggctggacctccccagactgtatcaaatttatggaacagtacacaccatgtctttatgcatctccaccctggaaccacgtaccagtttttcataagagccagcacggtcaaaggctttggtccagccacagccatcaatgtcaccaccaatatctcagctccaactttacctgactatgaaggagttgatgcctctctcaatgaaactgccaccacaataactgtattgttgagaccagcacaagccaaaggtgctcctatcagtgcttatcagattgttgtggaagaactgcacccacaccgaaccaagagagaagccggagccatggaatgctaccaggttcctgtcacataccaaaatgccatgagtgggggtgcaccgtattactttgctgcagaactccccccgggaaacctacctgagcctgccccgttcactgtgggtgacaatcggacctaccaaggcttttggaaccctcctttggctccgcgcaaaggatacaacatctatttccaggcgatgagcagtgtggagaaggaaactaaaacccagtgcgtacgcattgctacaaaagcagcagcaacagaagaaccagaagtgatcccagatcccgccaagcagacagacagagtggtgaaaatagcaggaattagtgctggaattttggtgttcatcctccttctcctagttgtcatattaattgtaaaaaagagcaaacttgctaaaaaacgcaaagatgccatggggaatacccggcaggagatgactcacatggtgaatgcaatggatcgaagttatgctgatcagagcactctgcatgcagaagatcctctttccatcaccttcatggaccaacataactttagtccaagatgtaagtttttcattaaaattttaataaatgatgttacaactcatttcactttgaattctacacgataccttttgagtaatgagagagagtaggaaagtgaggggaga

SEQ ID NO: 284398 - DNA, 2830 bp, Homo sapiens
cgagcatggagagctgccgccgcggccggccggcgacgctggcgacgctttcgcccctgaggtagtttggcgaccgcgaagaaggaaaaagggcgggcgggcggctgtcctctcaccgtcctcaccccgcgaggcccggcccgctcctccgtcgtggatttcgcggcgatccccccggcagctctttgcaaagctgcttgaaacttctcccaaactcggcatggatacgactgcggcggcggcgctgcctgcttttgtggcgctcttgctcctctctccttggcctctcctgggatcggcccaaggccagttctccgcaggtggctgtacttttgatgatggtccaggggcctgtgattaccaccaggatctgtatgatgactttgaatgggtgcatgttagtgctcaagagcctcattatctaccacccgagatgccccaaggttcctatatgatagtggactcttcagatcacgaccctggagaaaaagccagacttcagctgcctacaatgaaggagaacgacactcactgcattgatttcagttacctattatatagccagaaaggactgaatcctggcactttgaacatattagttagggtgaataaaggacctcttgccaatccaatttggaatgtgactggattcacgggtagagattggcttcgggctgagctagcagtgagcaccttttggcccaatgaatatcaggtaatatttgaagctgaagtctcaggagggagaagtggttatattgccattgatgacatccaagtactgagttatccttgtgataaatctcctcatttcctccgtctaggggatgtagaggtgaatgcagggcaaaacgctacatttcagtgcattgccacagggagagatgctgtgcataacaagttatggctccagagacgaaatggagaagatataccagtagcccagactaagaacatcaatcatagaaggtttgccgcttccttcagattgcaagaagtgacaaaaactgaccaggatttgtatcgctgtgtaactcagtcagaacgaggttccggtgtgtccaattttgctcaacttattgtgagagaaccgccaagacccattgctcctcctcagcttcttggtgttgggcctacatatttgctgatccaactaaatgccaactcgatcattggcgatggtcctatcatcctgaaagaagtagagtaccgaatgacatcaggatcctggacagaaacccatgcagtcaatgctccaacttacaaattatggcatttagatccagataccgaatatgagatccgagttctacttacaagacctggtgaaggtggaacggggctcccaggacctccactaatcaccagaacaaaatgtgcagaacctatgagaaccccaaagacattaaagattgctgaaatacaggcaagacggattgctgtggactgggaatccttgggttacaacattacgcgttgccacacttttaatgtcactatctgctaccattacttccgtggtcacaacgagagcaaggcagactgtttggacatggaccccaaagcccctcagcatgttgtgaaccatctgccaccttatacaaatgtcagcctcaagatgatcctaaccaatccagagggaaggaaggagagtgaagagacaattattcaaactgatgaagatgtgcctggtcccgtaccagtaaaatctcttcaaggaacatcctttgaaaataagatcttcttgaactggaaagaacctttggatccaaatggaatcatcactcaatatgagatcagctatagcagtataagatcatttgatcctgcagttccagtggctggacctccccagactgtatcaaatttatggaacagtacacaccatgtctttatgcatctccaccctggaaccacgtaccagtttttcataagagccagcacggtcaaaggctttggtccagccacagccatcaatgtcaccaccaatatctcagctccaactttacctgactatgaaggagttgatgcctctctcaatgaaactgccaccacaataactgtattgttgagaccagcacaagccaaaggtgctcctatcagtgcttatcagattgttgtggaagaactgcacccacaccgaaccaagagagaagccggagccatggaatgctaccaggttcctgtcacataccaaaatgccatgagtgggggtgcaccgtattactttgctgcagaactccccccgggaaacctacctgagcctgccccgttcactgtgggtgacaatcggacctaccaaggcttttggaaccctcctttggctccgcgcaaaggatacaacatctatttccaggcgatgagcagtgtggagaaggaaactaaaacccagtgcgtacgcattgctacaaaagcattttttccacatatgaaaagctaaccctgtttctacaaaaactaaaaaaaatgagccaggcatggtgacttgtgcctgtagctccagctacttggaagatgggaagattgcttcagcctaggaatttgaggctgcagtgagctatgattgtaccactgcactccagcctgggtgacagagtgagactatgtctcaaaaggaaaaaaaaaagaaaagaaaagaaatgaaaaagaaaaactaccacatttgttaaagtaacatcaacttattgcctgactacattttaaactaacatgcaagtatggtcagctttggtgtgaaatttttcaatatgaaaataaaaagttttctgacagggcgttttgaagaaacatttaatagtcaaaatggcataatcatatgactgggaagagg

SEQ ID NO: 284399 - DNA, 2333 bp, Homo sapiens
  misc_feature (2249)..(2249): n is a, c, g, or t
  misc_feature (2254)..(2254): n is a, c, g, or t
cgagcatggagagctgccgccgcggccggccggcgacgctggcgacgctttcgcccctgaggtagtttggcgaccgcgaagaaggaaaaagggcgggcgggcggctgtcctctcaccgtcctcaccccgcgaggcccggcccgctcctccgtcgtggatttcgcggcgatccccccggcagctctttgcaaagctgcttgaaacttctcccaaactcggcatggatacgactgcggcggcggcgctgcctgcttttgtggcgctcttgctcctctctccttggcctctcctgggatcggcccaaggccagttctccgcaggtggctgtacttttgatgatggtccaggggcctgtgattaccaccaggatctgtatgatgactttgaatgggtgcatgttagtgctcaagagcctcattatctaccacccgagatgccccaaggttcctatatgatagtggactcttcagatcacgaccctggagaaaaagccagacttcagctgcctacaatgaaggagaacgacactcactgcattgatttcagttacctattatatagccagaaaggactgaatcctggcactttgaacatattagttagggtgaataaaggacctcttgccaatccaatttggaatgtgactggattcacgggtagagattggcttcgggctgagctagcagtgagcaccttttggcccaatgaatatcaggtaatatttgaagctgaagtctcaggagggagaagtggttatattgccattgatgacatccaagtactgagttatccttgtgataaatctcctcatttcctccgtctaggggatgtagaggtgaatgcagggcaaaacgctacatttcagtgcattgccacagggagagatgctgtgcataacaagttatggctccagagacgaaatggagaagatataccagtagcccagactaagaacatcaatcatagaaggtttgccgcttccttcagattgcaagaagtgacaaaaactgaccaggatttgtatcgctgtgtaactcagtcagaacgaggttccggtgtgtccaattttgctcaacttattgtgagagaaccgccaagacccattgctcctcctcagcttcttggtgttgggcctacatatttgctgatccaactaaatgccaactcgatcattggcgatggtcctatcatcctgaaagaagtagagtaccgaatgacatcaggatcctggacagaaacccatgcagtcaatgctccaacttacaaattatggcatttagatccagataccgaatatgagatccgagttctacttacaagacctggtgaaggtggaacggggctcccaggacctccactaatcaccagaacaaaatgtgcagaacctatgagaaccccaaagacattaaagattgctgaaatacaggcaagacggattgctgtggactgggaatccttgggttacaacattacgcgttgccacacttttaatgtcactatctgctaccattacttccgtggtcacaacgagagcaaggcagactgtttggacatggaccccaaagcccctcagcatgttgtgaaccatctgccaccttatacaaatgtcagcctcaagatgatcctaaccaatccagagggaaggaaggagagtgaagagacaattattcaaactgatgaagatgtgcctggtcccgtaccagtaaaatctcttcaaggaacatcctttgaaaataagatcttcttgaactggaaagaacctttggatccaaatggaatcatcactcaatatgagatcagctatagcagtataagatcatttgatcctgcagttccagtggctggacctccccagactgtatcaaatttatggaacagtacacaccatgtctttatgcatctccaccctggaaccacgtaccagtttttcataagagccagcacggtcaaaggctttggtccagccacagccatcaatgtcaccaccaatatctcagctccaactttacctgactatgaaggagttgatgcctctctcaatgaaactgccaccacaataactgtattgttgagaccagcacaagccaaaggtgctcctatcagtgcttatcagattgttgtggaagaactgcacccacaccgaaccaagagagaagccggagccatggaatgctaccaggttcctgtcacataccaaaatgccatgagtgggggtgcaccgtattactttgctgcagaactcccccccncgtgncgaacttggcacgaccggaggctgggtggggcctcagtggggctgctgcctgacccccagcacaataaaaatgaaacgt

SEQ ID NO: 284400 - DNA, 3669 bp, Homo sapiens
tcggagtgccgcccgcggccccgagtcggtctcgagccgccggccggccgtgccggtgtccgtaggcgctgcgccctcggccgggcccatgtgtgtgcggcccgcccgaggccgcccgggctttgcctccaccagcgccctggcctccgctcgggcctccacacgggcctccgaagagctgccgcgacgcccggcccgcagggcaggtaaagagattataaatcttccactgaatgaaaaaaattttcttaaagctgcatatactccaagaaaaaaaccacaaatgtttttctgttttgcctgaatacatgatttaaacaagagatttccacagaagggcgctttcatggaactatatgatcatatgggcaacattctgttgcagtctaccttctgtctgacggatatgccatcctgaaaaaggaaagaagctgaacttcaagttcctttcatttagccttgggcttccaccttctctgtggctagaaacaggaccgtccagaagtcacctgtaactgccctatcttgcaagttctgattttggcaaaaaaaaaaaaaaaaagccttgacaaggttggattcacttctttccctggattgtgtgtcatccaactctgcggccgtcacgatgttctggaagtttgacttgaacaccacgtcccatgttgacaagctgctggacaaggagcatgtgacgctgcaggagttaatggatgaagatgacatcttgcaggagtgtaaggctcagaaccagaagctgctggacttcctgtgcaggcagcagtgcatggaggagctggtgagcctcatcacacaggatccgcccctggacatggaggagaaggtccgcttcaaatatccaaacacagcctgtgagcttctgacttgtgatgtgccgcagatcagcgaccgcctcggtggggacgagagcctgctgagcctcctgtacgacttcttggaccatgagccgcctctcaatcctctgctcgccagttttttcagcaagaccattggcaatctcattgcaagaaaaaccgaacaggtgattacgtttttgaagaagaaggacaagttcatcagcctggtgttgaagcacatcggcacctcagcgcttatggacctgctgctgcgcctggtcagctgtgtggagccagccgggctccggcaggacgtcctgcactggctgaatgaagagaaggtcatccagaggcttgtggagttgatccacccgagccaggatgaagataggcagtcaaatgcttctcagactctctgtgacatagttaggctgggcagagaccagggcagtcagctgcaagaggctctggagccagacccgctcctcacagcgctggagtcgcaggactgtgtggagcagcttctgaagaacatgtttgatggagaccggacggagagctgcctcgtcagtgggactcaggtgttactcaccttgctggaaaccaggcgggttgggacagagggcttggtggactccttttctcagggactggaaaggtcatacgctgtcagcagcagcgtactacacggcatcgagcctcggctgaaggacttccaccagctcctgctcaacccgcccaagaagaaagcgatcctgaccaccattggtgtgctggaggagcccctggggaatgcccgtctgcatggcgcccgcctcatggcagcactgctgcacacaaacacacccagcatcaaccaggagctctgccggctcaacacgatggacttactgctggacttgttctttaagtacacctggaataactttttgcacttccaagtggaactatgcatagccgctattctctcccacgctgcccgtgaggagaggacagaagccagcggatccgagagcagggtggagcctccgcatgagaacgggaaccggagcctggagactccccagccggccgccagcctccctgacaacacaatggtgacccacctgttccagaagtgctgcctggtgcagaggatcctggaggcctgggaagccaacgaccacacgcaggcagcgggtggcatgagacgtgggaacatgggccacctcacacggatcgccaacgcggtggtgcagaacctggagcggggccctgtgcagacgcacatcagcgaggtcatccgagggctccctgcggactgccgtggccgctgggagagcttcgtggaggagacgctgacggagacgaaccgcaggaacactgtggacctggtgagcactcaccaccttcactcctcaagtgaggacgaggacattgagggtgctttccctaacgagctgtcccttcagcaggccttctctgactaccagatccagcagatgacagccaacttcgtggatcagtttggcttcaatgatgaggagtttgccgaccaggacgacaacatcaatgccccgtttgacaggatcgcagagatcaacttcaacatcgacgctgacgaggacagtcccagcgcagctctgtttgaggcctgctgcagtgaccgcatccagccctttgatgatgatgaggacgaggacatctgggaggacagtgacactcgctgtgctgcccgggtgatggccagacccaggtttggagccccccatgcttcagagagttgctcaaagaatggcccagagcgtggaggccaggatgggaaggcgagcttggaagcacacagagatgcacctggggcaggtgccccaccggcccccgggaagaaggaagccccccctgtggagggtgactcagaaggcgccatgtggacggcagtgtttgatgagccagcgaactcaacgcccacagccccaggagtggtgagggacgtgggttccagtgtgtgggcagctggcacctcagctccagaggagaaaggctgggccaagttcactgacttccaacctttctgctgctccgagtcagggcccaggtgcagctctccggtggacacagaatgcagccatgctgagggcagccggagccaaggccctgagaaagcctcacaggcctcctactttgcagtcagcccggcttctccatgtgcctggaacgtgtgtgtcaccaggaaggcccccctgctggcctctgacagtagctcctctgggggctcccacagcgaggatggcgaccagaaggcagcgagtgccatggatgcggtgagcaggggtcccggccgggaggcccccccgctgcccacagtggccaggacagaggaggctgtcggcagggtcgggtgtgctgacagccggctgttaagccctgcctgccccgcgccaaaggaagtgactgctgccccagccgtggctgtgccccccgaggctactgtggccatcaccacagcactgagcaaggctggccccgccatacccaccccagcagtctcttctgcactggccgtggcggtccccctagggcccatcatggcagtcacagcagccccagccatggtggccaccctggggacagtgacaaaggacgggaagacagatgccccgccagaaggagctgccttaaatggcccagtgtgatgctgctgccgcccggccacggcccaccctggtcaggctgcctccttaatcgagaaaactacctggtgatgcaatctttttttttttaatttaatttaattttaaaataaatgctgcattggtaaagctggcagttgaaa

SEQ ID NO: 284401 - DNA, 523 bp, Homo sapiens
tgtccagctggtccttgggcatgaggcggggtggcactgagggtgggggtgcccgtaaccggagtccatgtttgccacacagggtcgggtgtgctgacagccggctgttaagccctgcctgccccgcgccaaaggaagtgactgctgccccagccgtggctgtgccccccgaggctactgtggccatcaccacagcactgagcaaggctggccccgccatacccaccccagcagtctcttctgcactggccgtggcggtccccctagggcccatcatggcagtcacagcagccccagccatggtggccaccctggggacagtgacaaaggacgggaagacagatgccccgccagaaggagctgccttaaatggcccagtgtgatgctgctgccgcccggccacggcccaccctggtcaggctgcctccttaatcgagaaaactacctggtgatgcaatctttttttttttaatttaatttaattttaaaataaatgctgcattggtaaagctggcagttgaaa

SEQ ID NO: 284402 - DNA, 4074 bp, Homo sapiens
tcggagtgccgcccgcggccccgagtcggtctcgagccgccggccggccgtgccggtgtccgtaggcgctgcgccctcggccgggcccatgtgtgtgcggcccgcccgaggccgcccgggctttgcctccaccagcgccctggcctccgctcgggcctccacacgggcctccgaagagctgccgcgacgcccggcccgcagggcaggtaaagagattataaatcttccactgaatgaaaaaaattttcttaaagctgcatatactccaagaaaaaaaccacaaatgtttttctgttttgcctgaatacatgatttaaacaagagatttccacagaagctctgcggccgtcacgatgttctggaagtttgacttgaacaccacgtcccatgttgacaagctgctggacaaggagcatgtgacgctgcaggagttaatggatgaagatgacatcttgcaggagtgtaaggctcagaaccagaagctgctggacttcctgtgcaggcagcagtgcatggaggagctggtgagcctcatcacacaggatccgcccctggacatggaggagaaggtccgcttcaaatatccaaacacagcctgtgagcttctgacttgtgatgtgccgcagatcagcgaccgcctcggtggggacgagagcctgctgagcctcctgtacgacttcttggaccatgagccgcctctcaatcctctgctcgccagttttttcagcaagaccattggcaatctcattgcaagaaaaaccgaacaggtgattacgtttttgaagaagaaggacaagttcatcagcctggtgttgaagcacatcggcacctcagcgcttatggacctgctgctgcgcctggtcagctgtgtggagccagccgggctccggcaggacgtcctgcactggctgaatgaagagaaggtcatccagaggcttgtggagttgatccacccgagccaggatgaagataggcagtcaaatgcttctcagactctctgtgacatagttaggctgggcagagaccagggcagtcagctgcaagaggctctggagccagacccgctcctcacagcgctggagtcgcaggactgtgtggagcagcttctgaagaacatgtttgatggagaccggacggagagctgcctcgtcagtgggactcaggtgttactcaccttgctggaaaccaggcgggttgggacagagggcttggtggactccttttctcagggactggaaaggtcatacgctgtcagcagcagcgtactacacggcatcgagcctcggctgaaggacttccaccagctcctgctcaacccgcccaagaagaaagcgatcctgaccaccattggtgtgctggaggagcccctggggaatgcccgtctgcatggcgcccgcctcatggcagcactgctgcacacaaacacacccagcatcaaccaggagctctgccggctcaacacgatggacttactgctggacttgttctttaagtacacctggaataactttttgcacttccaagtggaactatgcatagccgctattctctcccacgctgcccgtgaggagaggacagaagccagcggatccgagagcagggtggagcctccgcatgagaacgggaaccggagcctggagactccccagccggccgccagcctccctgacaacacaatggtgacccacctgttccagaagtgctgcctggtgcagaggatcctggaggcctgggaagccaacgaccacacgcaggcagcgggtggcatgagacgtgggaacatgggccacctcacacggatcgccaacgcggtggtgcagaacctggagcggggccctgtgcagacgcacatcagcgaggtcatccgagggctccctgcggactgccgtggccgctgggagagcttcgtggaggagacgctgacggagacgaaccgcaggaacactgtggacctggtgagcactcaccaccttcactcctcaagtgaggacgaggacattgagggtgctttccctaacgagctgtcccttcagcaggccttctctgactaccagatccagcagatgacagccaacttcgtggatcagtttggcttcaatgatgaggagtttgccgaccaggacgacaacatcaatgccccgtttgacaggatcgcagagatcaacttcaacatcgacgctgacgaggacagtcccagcgcagctctgtttgaggcctgctgcagtgaccgcatccagccctttgatgatgatgaggacgaggacatctgggaggacagtgacactcgctgtgctgcccgggtgatggccagacccaggtttggagccccccatgcttcagagagttgctcaaagaatggcccagagcgtggaggccaggatgggaaggcgagcttggaagcacacagagatgcacctggggcaggtgccccaccggcccccgggaagaaggaagccccccctgtggagggtgactcagaaggcgccatgtggacggcagtgtttgatgagccagcgaactcaacgcccacagccccaggagtggtgagggacgtgggttccagtgtgtgggcagctggcacctcagctccagaggagaaaggctgggccaagttcactgacttccaacctttctgctgctccgagtcagggcccaggtgcagctctccggtggacacagaatgcagccatgctgagggcagccggagccaaggccctgagaaagccttcagcccggcttctccatgtgcctggaacgtgtgtgtcaccaggaaggcccccctgctggcctctgacagtagctcctctgggggctcccacagcgaggatggcgaccagaaggcagcgagtgccatggatgcggtgagcaggggtcccggccgggaggcccccccgctgcccacagtggccaggacagaggaggctgtcggcagggtcgggtgtgctgacagccggctgttaagccctgcctgccccgcgccaaaggaagtgactgctgccccagccgtggctgtgccccccgaggctactgtggccatcaccacagcactgagcaaggctggccccgccatacccaccccagcagtctcttctgcactggccgtggcggtccccctagggcccatcatggcagtcacagcagccccagccatggtggccaccctggggacagtgacaaaggacgggaagacagatgccccgccagaaggagctgccttaaatggcccagtgtgatgctgctgccgcccggccacggcccaccctggtcaggctgcctccttaatcgagaaaactacctggtgatgcaatctttttttttttaatttaatttaattttaaaataaatgctgcattggtaaagctggcagttgaaaccagttggacggcccagcttgcgtctcttctgcctgagtgggcctctcaggtcactcgtgccctgctggaggacagaggggcacctcagccgcccccaagcccagagcacagcaataaggtcggcctgcaggagccggggtgggggtgggggtggggggggcaggaccctgagatgccaccaggacctgatgggccaggaagggcgtggacatggaggctgtttttacagtttttttttgttgttgttttgtttttaaagaatacagaaggagccaagcttttttgcactttgtatccagctgcaagctcagggcagagtcaagggcctgggttggaaaaacctgactcacaggaatgcataattgacccttgcagctacccaatagcccttggagctggcactgaaccaggctgcaagatttgactgccttaaaaacacaaggccctctaggcctggcagggatgtccctgtgcccagcacagggtgcctggcagggggagaccacaggtatgcaggtggggggacatggtgtggcactgggggctcgaagactggtttctagcactaccggtcacggccatgtcgtcctagaagggtccagaagattattttacgttgagtccatttttaatgttctgatcacctgacagggcaccccaaacccccaactcccaataaaagccgtgacgttcggacaaa

SEQ ID NO: 284403 - DNA, 4178 bp, Homo sapiens
tcggagtgccgcccgcggccccgagtcggtctcgagccgccggccggccgtgccggtgtccgtaggcgctgcgccctcggccgggcccatgtgtgtgcggcccgcccgaggccgcccgggctttgcctccaccagcgccctggcctccgctcgggcctccacacgggcctccgaagagctgccgcgacgcccggcccgcagggcaggtaaagagattataaatcttccactgaatgaaaaaaattttcttaaagctgcatatactccaagaaaaaaaccacaaatgtttttctgttttgcctgaatacatgatttaaacaagagatttccacagaagctctgcggccgtcacgatgttctggaagtttgacttgaacaccacgtcccatgttgacaagctgctggacaaggagcatgtgacgctgcaggagttaatggatgaagatgacatcttgcaggagtgtaaggctcagaaccagaagctgctggacttcctgtgcaggcagcagtgcatggaggagctggtgagcctcatcacacaggatccgcccctggacatggaggagaaggtccgcttcaaatatccaaacacagcctgtgagcttctgacttgtgatgtgccgcagatcagcgaccgcctcggtggggacgagagcctgctgagcctcctgtacgacttcttggaccatgagccgcctctcaatcctctgctcgccagttttttcagcaagaccattggcaatctcattgcaagaaaaaccgaacaggtgattacgtttttgaagaagaaggacaagttcatcagcctggtgttgaagcacatcggcacctcagcgcttatggacctgctgctgcgcctggtcagctgtgtggagccagccgggctccggcaggacgtcctgcactggctgaatgaagagaaggtcatccagaggcttgtggagttgatccacccgagccaggatgaagataggcagtcaaatgcttctcagactctctgtgacatagttaggctgggcagagaccagggcagtcagctgcaagaggctctggagccagacccgctcctcacagcgctggagtcgcaggactgtgtggagcagcttctgaagaacatgtttgatggagaccggacggagagctgcctcgtcagtgggactcaggtgttactcaccttgctggaaaccaggcgggttgggacagagggcttggtggactccttttctcagggactggaaaggtcatacgctgtcagcagcagcgtactacacggcatcgagcctcggctgaaggacttccaccagctcctgctcaacccgcccaagaagaaagcgatcctgaccaccattggtgtgctggaggagcccctggggaatgcccgtctgcatggcgcccgcctcatggcagcactgctgcacacaaacacacccagcatcaaccaggagctctgccggctcaacacgatggacttactgctggacttgttctttaagtacacctggaataactttttgcacttccaagtggaactatgcatagccgctattctctcccacgctgcccgtgaggagaggacagaagccagcggatccgagagcagggtggagcctccgcatgagaacgggaaccggagcctggagactccccagccggccgccagcctccctgacaacacaatggtgacccacctgttccagaagtgctgcctggtgcagaggatcctggaggcctgggaagccaacgaccacacgcaggcagcgggtggcatgagacgtgggaacatgggccacctcacacggatcgccaacgcggtggtgcagaacctggagcggggccctgtgcagacgcacatcagcgaggtcatccgagggctccctgcggactgccgtggccgctgggagagcttcgtggaggagacgctgacggagacgaaccgcaggaacactgtggacctggtgagcactcaccaccttcactcctcaagtgaggacgaggacattgagggtgctttccctaacgagctgtcccttcagcaggccttctctgactaccagatccagcagatgacagccaacttcgtggatcagtttggcttcaatgatgaggagtttgccgaccaggacgacaacatcaatgccccgtttgacaggatcgcagagatcaacttcaacatcgacgctgacgaggacagtcccagcgcagctctgtttgaggcctgctgcagtgaccgcatccagccctttgatgatgatgaggacgaggacatctgggaggacagtgacactcgctgtgctgcccgggtgatggccagacccaggtttggagccccccatgcttcagagagttgctcaaagaatggcccagagcgtggaggccaggatgggaaggcgagcttggaagcacacagagatgcacctggggcaggtgccccaccggcccccgggaagaaggaagccccccctgtggagggtgactcagaaggcgccatgtggacggcagtgtttgatgagccagcgaactcaacgcccacagccccaggagtggtgagggacgtgggttccagtgtgtgggcagctggcacctcagctccagaggagaaaggctgggccaagttcactgacttccaacctttctgctgctccgagtcagggcccaggtgcagctctccggtggacacagaatgcagccatgctgagggcagccggagccaaggccctgagaaagccttcagcccggcttctccatgtgcctggaacgtgtgtgtcaccaggaaggcccccctgctggcctctgacagtagctcctctgggggctcccacagcgaggatggcgaccagaaggcagcgagtgccatggatgcggtgagcaggggtcccggccgggaggcccccccgctgcccacagtggccaggacagaggaggctgtcggcagggtcgggtgtgctgacagccggctgttaagccctgcctgccccgcgccaaaggaagtgactgctgccccagccgtggctgtgccccccgaggctactgtggccatcaccacagcactgagcaaggctggccccgccatacccaccccagcagtctcttctgcactggccgtggcggtccccctagggcccatcatggcagtcacagcagccccagccatggtggccaccctggggacagtgacaaaggacgggaagacagatgccccgccagaaggagctgccttaaatggcccagtgtgatgctgctgccgcccggccacggcccaccctggtcaggctgcctccttaatcgagaaaactacctggtgatgcaatctttttttttttaatttaatttaattttaaaataaatgctgcattggtaaagctggcagttgaaaccagttggacggcccagcttgcgtctcttctgcctgagtgggcctctcaggtcactcgtgccctgctggaggacagaggggcacctcagccgcccccaagcccagagcacagcaataaggtcggcctgcaggagccggggtgggggtgggggtggggggggcaggaccctgagatgccaccaggacctgatgggccaggaagggcgtggacatggaggctgtttttacagtttttttttgttgttgttttgtttttaaagaatacagaaggagccaagcttttttgcactttgtatccagctgcaagctcagggcagagtcaagggcctgggttggaaaaacctgactcacaggaatgcataattgacccttgcagctacccaatagcccttggagctggcactgaaccaggctgcaagatttgactgccttaaaaacacaaggccctctaggcctggcagggatgtccctgtgcccagcacagggtgcctggcagggggagaccacaggtatgcaggtggggggacatggtgtggcactgggggctcgaagactggtttctagcactaccggtcacggccatgtcgtcctagaagggtccagaagattattttacgttgagtccatttttaatgttctgatcacctgacagggcacttcgcctaacgctcaaacacatcaaccccaggacttccttttgtgccagctccccctcccagaagcctgggccccaccttgtcctcagtggctgagtgggaggggcaggtggagaccagacccccaccccgccccagcgagcttgtct

SEQ ID NO: 284404 - DNA, 2987 bp, Homo sapiens
agcgggaaagtcaaaagggctctttctggaagaagcgggtgcactgagttgctggtgaggttggacagggtcctggtgtccccggtctccatctgctttcctcatccacaggacagagggcttggtggactccttttctcagggactggaaaggtcatacgctgtcagcagcagcgtactacacggcatcgagcctcggctgaaggacttccaccagctcctgctcaacccgcccaagaagaaagcgatcctgaccaccattggtgtgctggaggagcccctggggaatgcccgtctgcatggcgcccgcctcatggcagcactgctgcacacaaacacacccagcatcaaccaggagctctgccggctcaacacgatggacttactgctggacttgttctttaagtacacctggaataactttttgcacttccaagtggaactatgcatagccgctattctctcccacgctgcccgtgaggagaggacagaagccagcggatccgagagcagggtggagcctccgcatgagaacgggaaccggagcctggagactccccagccggccgccagcctccctgacaacacaatggtgacccacctgttccagaagtgctgcctggtgcagaggatcctggaggcctgggaagccaacgaccacacgcaggcagcgggtggcatgagacgtgggaacatgggccacctcacacggatcgccaacgcggtggtgcagaacctggagcggggccctgtgcagacgcacatcagcgaggtcatccgagggctccctgcggactgccgtggccgctgggagagcttcgtggaggagacgctgacggagacgaaccgcaggaacactgtggacctggtgagcactcaccaccttcactcctcaagtgaggacgaggacattgagggtgctttccctaacgagctgtcccttcagcaggccttctctgactaccagatccagcagatgacagccaacttcgtggatcagtttggcttcaatgatgaggagtttgccgaccaggacgacaacatcaatgccccgtttgacaggatcgcagagatcaacttcaacatcgacgctgacgaggacagtcccagcgcagctctgtttgaggcctgctgcagtgaccgcatccagccctttgatgatgatgaggacgaggacatctgggaggacagtgacactcgctgtgctgcccgggtgatggccagacccaggtttggagccccccatgcttcagagagttgctcaaagaatggcccagagcgtggaggccaggatgggaaggcgagcttggaagcacacagagatgcacctggggcaggtgccccaccggcccccgggaagaaggaagccccccctgtggagggtgactcagaaggcgccatgtggacggcagtgtttgatgagccagcgaactcaacgcccacagccccaggagtggtgagggacgtgggttccagtgtgtgggcagctggcacctcagctccagaggagaaaggctgggccaagttcactgacttccaacctttctgctgctccgagtcagggcccaggtgcagctctccggtggacacagaatgcagccatgctgagggcagccggagccaaggccctgagaaagccttcagcccggcttctccatgtgcctggaacgtgtgtgtcaccaggaaggcccccctgctggcctctgacagtagctcctctgggggctcccacagcgaggatggcgaccagaaggcagcgagtgccatggatgcggtgagcaggggtcccggccgggaggcccccccgctgcccacagtggccaggacagaggaggctgtcggcagggtcgggtgtgctgacagccggctgttaagccctgcctgccccgcgccaaaggaagtgactgctgccccagccgtggctgtgccccccgaggctactgtggccatcaccacagcactgagcaaggctggccccgccatacccaccccagcagtctcttctgcactggccgtggcggtccccctagggcccatcatggcagtcacagcagccccagccatggtggccaccctggggacagtgacaaaggacgggaagacagatgccccgccagaaggagctgccttaaatggcccagtgtgatgctgctgccgcccggccacggcccaccctggtcaggctgcctccttaatcgagaaaactacctggtgatgcaatctttttttttttaatttaatttaattttaaaataaatgctgcattggtaaagctggcagttgaaaccagttggacggcccagcttgcgtctcttctgcctgagtgggcctctcaggtcactcgtgccctgctggaggacagaggggcacctcagccgcccccaagcccagagcacagcaataaggtcggcctgcaggagccggggtgggggtgggggtggggggggcaggaccctgagatgccaccaggacctgatgggccaggaagggcgtggacatggaggctgtttttacagtttttttttgttgttgttttgtttttaaagaatacagaaggagccaagcttttttgcactttgtatccagctgcaagctcagggcagagtcaagggcctgggttggaaaaacctgactcacaggaatgcataattgacccttgcagctacccaatagcccttggagctggcactgaaccaggctgcaagatttgactgccttaaaaacacaaggccctctaggcctggcagggatgtccctgtgcccagcacagggtgcctggcagggggagaccacaggtatgcaggtggggggacatggtgtggcactgggggctcgaagactggtttctagcactaccggtcacggccatgtcgtcctagaagggtccagaagattattttacgttgagtccatttttaatgttctgatcacctgacagggcaccccaaacccccaactcccaataaaagccgtgacgttcggacaaa

SEQ ID NO: 284405 - DNA, 3292 bp, Homo sapiens
tcggagtgccgcccgcggccccgagtcggtctcgagccgccggccggccgtgccggtgtccgtaggcgctgcgccctcggccgggcccatgtgtgtgcggcccgcccgaggccgcccgggctttgcctccaccagcgccctggcctccgctcgggcctccacacgggcctccgaagagctgccgcgacgcccggcccgcagggcaggtaaagagattataaatcttccactgaatgaaaaaaattttcttaaagctgcatatactccaagaaaaaaaccacaaatgtttttctgttttgcctgaatacatgatttaaacaagagatttccacagaagctctgcggccgtcacgatgttctggaagtttgacttgaacaccacgtcccatgttgacaagctgctggacaaggagcatgtgacgctgcaggagttaatggatgaagatgacatcttgcaggagtgtaaggctcagaaccagaagctgctggacttcctgtgcaggcagcagtgcatggaggagctggtgagcctcatcacacaggatccgcccctggacatggaggagaaggtccgcttcaaatatccaaacacagcctgtgagcttctgacttgtgatgtgccgcagatcagcgaccgcctcggtggggacgagagcctgctgagcctcctgtacgacttcttggaccatgagccgcctctcaatcctctgctcgccagttttttcagcaagaccattggcaatctcattgcaagaaaaaccgaacaggtgattacgtttttgaagaagaaggacaagttcatcagcctggtgttgaagcacatcggcacctcagcgcttatggacctgctgctgcgcctggtcagctgtgtggagccagccgggctccggcaggacgtcctgcactggctgaatgaagagaaggtcatccagaggcttgtggagttgatccacccgagccaggatgaagataggcagtcaaatgcttctcagactctctgtgacatagttaggctgggcagagaccagggcagtcagctgcaagaggctctggagccagacccgctcctcacagcgctggagtcgcaggactgtgtggagcagcttctgaagaacatgtttgatggagaccggacggagagctgcctcgtcagtgggactcaggtgttactcaccttgctggaaaccaggcgggttgggacagagggcttggtggactccttttctcagggactggaaaggtcatacgctgtcagcagcagcgtactacacggcatcgagcctcggctgaaggacttccaccagctcctgctcaacccgcccaagaagaaagcgatcctgaccaccattggtgtgctggaggagcccctggggaatgcccgtctgcatggcgcccgcctcatggcagcactgctgcacacaaacacacccagcatcaaccaggagctctgccggctcaacacgatggacttactgctggacttgttctttaagtacacctggaataactttttgcacttccaagtggaactatgcatagccgctattctctcccacgctgcccgtgaggagaggacagaagccagcggatccgagagcagggtggagcctccgcatgagaacgggaaccggagcctggagactccccagccggccgccagcctccctgacaacacaatggtgacccacctgttccagaagtgctgcctggtgcagaggatcctggaggcctgggaagccaacgaccacacgcaggcagcgggtggcatgagacgtgggaacatgggccacctcacacggatcgccaacgcggtggtgcagaacctggagcggggccctgtgcagacgcacatcagcgaggtcatccgagggctccctgcggactgccgtggccgctgggagagcttcgtggaggagacgctgacggagacgaaccgcaggaacactgtggacctggccttctctgactaccagatccagcagatgacagccaacttcgtggatcagtttggcttcaatgatgaggagtttgccgaccaggacgacaacatcaatgccccgtttgacaggatcgcagagatcaacttcaacatcgacgctgacgaggacagtcccagcgcagctctgtttgaggcctgctgcagtgaccgcatccagccctttgatgatgatgaggacgaggacatctgggaggacagtgacactcgctgtgctgcccgggtgatggccagacccaggtttggagccccccatgcttcagagagttgctcaaagaatggcccagagcgtggaggccaggatgggaaggcgagcttggaagcacacagagatgcacctggggcaggtgccccaccggcccccgggaagaaggaagccccccctgtggagggtgactcagaaggcgccatgtggacggcagtgtttgatgagccagcgaactcaacgcccacagccccaggagtggtgagggacgtgggttccagtgtgtgggcagctggcacctcagctccagaggagaaaggctgggccaagttcactgacttccaacctttctgctgctccgagtcagggcccaggtgcagctctccggtggacacagaatgcagccatgctgagggcagccggagccaaggccctgagaaagccttcagcccggcttctccatgtgcctggaacgtgtgtgtcaccaggaaggcccccctgctggcctctgacagtagctcctctgggggctcccacagcgaggatggcgaccagaaggcagcgagtgccatggatgcggtgagcaggggtcccggccgggaggcccccccgctgcccacagtggccaggacagaggaggctgtcggcagggtcgggtgtgctgacagccggctgttaagccctgcctgccccgcgccaaaggaagtgactgctgccccagccgtggctgtgccccccgaggctactgtggccatcaccacagcactgagcaaggctggccccgccatacccaccccagcagtctcttctgcactggccgtggcggtccccctagggcccatcatggcagtcacagcagccccagccatggtggccaccctggggacagtgacaaaggacgggaagacagatgccccgccagaaggagctgccttaaatggcccagtgtgatgctgctgccgcccggccacggcccaccctggtcaggctgcctccttaatcgagaaaactacctggtgatgcaatctttttttttttaatttaatttaattttaaaataaatgctgcattggtaaagctggcagttgaaa

SEQ ID NO: 284406 - DNA, 2057 bp, Homo sapiens
gggagaggcccctctgtggagctcggaacagtcgctttccttgcccctccccgtcctcccctccagcccggggctcccacatcccgaactaagcccctctgggagctctatggggagagcggctcctgtctcccccagaccctctggaaactcaccttggcgttttactctgcagcccagcgcagctctgtttgaggcctgctgcagtgaccgcatccagccctttgatgatgatgaggacgaggacatctgggaggacagtgacactcgctgtgctgcccgggtgatggccagacccaggtttggagccccccatgcttcagagagttgctcaaagaatggcccagagcgtggaggccaggatgggaaggcgagcttggaagcacacagagatgcacctggggcaggtgccccaccggcccccgggaagaaggaagccccccctgtggagggtgactcagaaggcgccatgtggacggcagtgtttgatgagccagcgaactcaacgcccacagccccaggagtggtgagggacgtgggttccagtgtgtgggcagctggcacctcagctccagaggagaaaggctgggccaagttcactgacttccaacctttctgctgctccgagtcagggcccaggtgcagctctccggtggacacagaatgcagccatgctgagggcagccggagccaaggccctgagaaagccttcagcccggcttctccatgtgcctggaacgtgtgtgtcaccaggaaggcccccctgctggcctctgacagtagctcctctgggggctcccacagcgaggatggcgaccagaaggcagcgagtgccatggatgcggtgagcaggggtcccggccgggaggcccccccgctgcccacagtggccaggacagaggaggctgtcggcagggtcgggtgtgctgacagccggctgttaagccctgcctgccccgcgccaaaggaagtgactgctgccccagccgtggctgtgccccccgaggctactgtggccatcaccacagcactgagcaaggctggccccgccatacccaccccagcagtctcttctgcactggccgtggcggtccccctagggcccatcatggcagtcacagcagccccagccatggtggccaccctggggacagtgacaaaggacgggaagacagatgccccgccagaaggagctgccttaaatggcccagtgtgatgctgctgccgcccggccacggcccaccctggtcaggctgcctccttaatcgagaaaactacctggtgatgcaatctttttttttttaatttaatttaattttaaaataaatgctgcattggtaaagctggcagttgaaaccagttggacggcccagcttgcgtctcttctgcctgagtgggcctctcaggtcactcgtgccctgctggaggacagaggggcacctcagccgcccccaagcccagagcacagcaataaggtcggcctgcaggagccggggtgggggtgggggtggggggggcaggaccctgagatgccaccaggacctgatgggccaggaagggcgtggacatggaggctgtttttacagtttttttttgttgttgttttgtttttaaagaatacagaaggagccaagcttttttgcactttgtatccagctgcaagctcagggcagagtcaagggcctgggttggaaaaacctgactcacaggaatgcataattgacccttgcagctacccaatagcccttggagctggcactgaaccaggctgcaagatttgactgccttaaaaacacaaggccctctaggcctggcagggatgtccctgtgcccagcacagggtgcctggcagggggagaccacaggtatgcaggtggggggacatggtgtggcactgggggctcgaagactggtttctagcactaccggtcacggccatgtcgtcctagaagggtccagaagattattttacgttgagtccatttttaatgttctgatcacctgacagggcaccccaaacccccaactcccaataaaagccgtgacgttcggacaaa

SEQ ID NO: 284407 - DNA, 1224 bp, Homo sapiens
tgtccagctggtccttgggcatgaggcggggtggcactgagggtgggggtgcccgtaaccggagtccatgtttgccacacagggtcgggtgtgctgacagccggctgttaagccctgcctgccccgcgccaaaggaagtgactgctgccccagccgtggctgtgccccccgaggctactgtggccatcaccacagcactgagcaaggctggccccgccatacccaccccagcagtctcttctgcactggccgtggcggtccccctagggcccatcatggcagtcacagcagccccagccatggtggccaccctggggacagtgacaaaggacgggaagacagatgccccgccagaaggagctgccttaaatggcccagtgtgatgctgctgccgcccggccacggcccaccctggtcaggctgcctccttaatcgagaaaactacctggtgatgcaatctttttttttttaatttaatttaattttaaaataaatgctgcattggtaaagctggcagttgaaaccagttggacggcccagcttgcgtctcttctgcctgagtgggcctctcaggtcactcgtgccctgctggaggacagaggggcacctcagccgcccccaagcccagagcacagcaataaggtcggcctgcaggagccggggtgggggtgggggtggggggggcaggaccctgagatgccaccaggacctgatgggccaggaagggcgtggacatggaggctgtttttacagtttttttttgttgttgttttgtttttaaagaatacagaaggagccaagcttttttgcactttgtatccagctgcaagctcagggcagagtcaagggcctgggttggaaaaacctgactcacaggaatgcataattgacccttgcagctacccaatagcccttggagctggcactgaaccaggctgcaagatttgactgccttaaaaacacaaggccctctaggcctggcagggatgtccctgtgcccagcacagggtgcctggcagggggagaccacaggtatgcaggtggggggacatggtgtggcactgggggctcgaagactggtttctagcactaccggtcacggccatgtcgtcctagaagggtccagaagattattttacgttgagtccatttttaatgttctgatcacctgacagggcaccccaaacccccaactcccaataaaagccgtgacgttcggacaaa

SEQ ID NO: 284408 - DNA, 1379 bp, Homo sapiens
ctaggctgtcctggctgtgtgcttgcactccggcctgcgcatgagagagactgactgtcggcaaaaacaaaaccaaaacaaacctttacccacttctcctaaacaacccctaaaaaactgctctgaaaagcagggaatatcattgtgcaaagtaagttgtttttttccacggggctgtctgcgtaaaacttgccacttagagccctgcctgcaccgtcgtcacggcccagcctgcagggtcgggtgtgctgacagccggctgttaagccctgcctgccccgcgccaaaggaagtgactgctgccccagccgtggctgtgccccccgaggctactgtggccatcaccacagcactgagcaaggctggccccgccatacccaccccagcagtctcttctgcactggccgtggcggtccccctagggcccatcatggcagtcacagcagccccagccatggtggccaccctggggacagtgacaaaggacgggaagacagatgccccgccagaaggagctgccttaaatggcccagtgtgatgctgctgccgcccggccacggcccaccctggtcaggctgcctccttaatcgagaaaactacctggtgatgcaatctttttttttttaatttaatttaattttaaaataaatgctgcattggtaaagctggcagttgaaaccagttggacggcccagcttgcgtctcttctgcctgagtgggcctctcaggtcactcgtgccctgctggaggacagaggggcacctcagccgcccccaagcccagagcacagcaataaggtcggcctgcaggagccggggtgggggtgggggtggggggggcaggaccctgagatgccaccaggacctgatgggccaggaagggcgtggacatggaggctgtttttacagtttttttttgttgttgttttgtttttaaagaatacagaaggagccaagcttttttgcactttgtatccagctgcaagctcagggcagagtcaagggcctgggttggaaaaacctgactcacaggaatgcataattgacccttgcagctacccaatagcccttggagctggcactgaaccaggctgcaagatttgactgccttaaaaacacaaggccctctaggcctggcagggatgtccctgtgcccagcacagggtgcctggcagggggagaccacaggtatgcaggtggggggacatggtgtggcactgggggctcgaagactggtttctagcactaccggtcacggccatgtcgtcctagaagggtccagaagattattttacgttgagtccatttttaatgttctgatcacctgacagggcaccccaaacccccaactcccaataaaagccgtgacgttcggacaaa

SEQ ID NO: 284409 - DNA, 3228 bp, Homo sapiens
tcggagtgccgcccgcggccccgagtcggtctcgagccgccggccggccgtgccggtgtccgtaggcgctgcgccctcggccgggcccatgtgtgtgcggcccgcccgaggccgcccgggctttgcctccaccagcgccctggcctccgctcgggcctccacacgggcctccgaagagctgccgcgacgcccggcccgcagggcaggtaaagagattataaatcttccactgaatgaaaaaaattttcttaaagctgcatatactccaagaaaaaaaccacaaatgtttttctgttttgcctgaatacatgatttaaacaagagatttccacagaagctctgcggccgtcacgatgttctggaagtttgacttgaacaccacgtcccatgttgacaagctgctggacaaggagcatgtgacgctgcaggagttaatggatgaagatgacatcttgcaggagtgtaaggctcagaaccagaagctgctggacttcctgtgcaggcagcagtgcatggaggagctggtgagcctcatcacacaggatccgcccctggacatggaggagaaggtccgcttcaaatatccaaacacagcctgtgagcttctgacttgtgatgtgccgcagatcagcgaccgcctcggtggggacgagagcctgctgagcctcctgtacgacttcttggaccatgagccgcctctcaatcctctgctcgccagttttttcagcaagaccattggcaatctcattgcaagaaaaaccgaacaggtgattacgtttttgaagaagaaggacaagttcatcagcctggtgttgaagcacatcggcacctcagcgcttatggacctgctgctgcgcctggtcagctgtgtggagccagccgggctccggcaggacgtcctgcactggctgaatgaagagaaggtcatccagaggcttgtggagttgatccacccgagccaggatgaagataggcagtcaaatgcttctcagactctctgtgacatagttaggctgggcagagaccagggcagtcagctgcaagaggctctggagccagacccgctcctcacagcgctggagtcgcaggactgtgtggagcagcttctgaagaacatgtttgatggagaccggacggagagctgcctcgtcagtgggactcaggtgttactcaccttgctggaaaccaggcgggttgggacagagggcttggtggactccttttctcagggactggaaaggtcatacgctgtcagcagcagcgtactacacggcatcgagcctcggctgaaggacttccaccagctcctgctcaacccgcccaagaagaaagcgatcctgaccaccattggtgtgctggaggagcccctggggaatgcccgtctgcatggcgcccgcctcatggcagcactgctgcacacaaacacacccagcatcaaccaggagctctgccggctcaacacgatggacttactgctggacttgttctttaagtacacctggaataactttttgcacttccaagtggaactatgcatagccgctattctctcccacgctgcccgtgaggagaggacagaagccagcggatccgagagcagggtggagcctccgcatgagaacgggaaccggagcctggagactccccagccggccgccagcctccctgacaacacaatggtgacccacctgttccagaagtgctgcctggtgcagaggatcctggaggcctgggaagccaacgaccacacgcaggcagcgggtggcatgagacgtgggaacatgggccacctcacacggatcgccaacgcggtggtgcagaacctggagcggggccctgtgcagacgcacatcagcgaggtcatccgagggctccctgcggactgccgtggccgctgggagagcttcgtggaggagacgctgacggagacgaaccgcaggaacactgtggacctggtgagcactcaccaccttcactcctcaagtgaggacgaggacattgagggtgctttccctaacgagctgtcccttcagcaggccttctctgactaccagatccagcagatgacagccaacttcgtggatcagtttggcttcaatgatgaggagtttgccgaccaggacgacaacatcaatgccccgtttgacaggatcgcagagatcaacttcaacatcgacgctgacgaggacagtcccagcgcagctctgtttgaggcctgctgcagtgaccgcatccagccctttgatgatgatgaggacgaggacatctgggaggacagtgacactcgctgtgctgcccgggtgatggccagacccaggtttggagccccccatgcttcagagagttgctcaaagaatggcccagagcgtggaggccaggatgggaaggcgagcttggaagcacacagagatgcacctggggcaggtgccccaccggcccccgggaagaaggaagccccccctgtggagggtgactcagaaggcgccatgtggacggcagtgtttgatgagccagcgaactcaacgcccacagccccaggagtggtgagggacgtgggttccagtgtgtgggcagctggcacctcagctccagaggagaaaggctgggccaagttcactgacttccaacctttctgctgctccgagtcagggcccaggtgcagctctccggtggacacagaatgcagccatgctgagggcagccggagccaaggccctgagaaagccttcagcccggcttctccatgtgcctggaacgtgtgtgtcaccaggaaggcccccctgctggcctctgacagtagctcctctgggggctcccacagcgaggatggcgaccagaaggcagcgagtgccatggatgcggtgagcaggggtcccggccgggaggcccccccgctgcccacagtggccaggacagaggaggctgtcggcagggtcgggtgtgctgacagccggctgttaagccctgcctgccccgcgccaaaggaagtgactcagccccagccatggtggccaccctggggacagtgacaaaggacgggaagacagatgccccgccagaaggagctgccttaaatggcccagtgtgatgctgctgccgcccggccacggcccaccctggtcaggctgcctccttaatcgagaaaactacctggtgatgcaatctttttttttttaatttaatttaattttaaaataaatgctgcattggtaaagctggcagttgaaa

SEQ ID NO: 284410 - DNA, 3059 bp, Homo sapiens
tcggagtgccgcccgcggccccgagtcggtctcgagccgccggccggccgtgccggtgtccgtaggcgctgcgccctcggccgggcccatgtgtgtgcggcccgcccgaggccgcccgggctttgcctccaccagcgccctggcctccgctcgggcctccacacgggcctccgaagagctgccgcgacgcccggcccgcagggcaggtaaagagattataaatcttccactgaatgaaaaaaattttcttaaagctgcatatactccaagaaaaaaaccacaaatgtttttctgttttgcctgaatacatgatttaaacaagagatttccacagaagctctgcggccgtcacgatgttctggaagtttgacttgaacaccacgtcccatgttgacaagctgctggacaaggagcatgtgacgctgcaggagttaatggatgaagatgacatcttgcaggagtgtaaggctcagaaccagaagctgctggacttcctgtgcaggcagcagtgcatggaggagctggtgagcctcatcacacaggatccgcccctggacatggaggagaaggtccgcttcaaatatccaaacacagcctgtgagcttctgacttgtgatgtgccgcagatcagcgaccgcctcggtggggacgagagcctgctgagcctcctgtacgacttcttggaccatgagccgcctctcaatcctctgctcgccagttttttcagcaagaccattggcaatctcattgcaagaaaaaccgaacaggtgattacgtttttgaagaagaaggacaagttcatcagcctggtgttgaagcacatcggcacctcagcgcttatggacctgctgctgcgcctggtcagctgtgtggagccagccgggctccggcaggacgtcctgcactggctgaatgaagagaaggtcatccagaggcttgtggagttgatccacccgagccaggatgaagataggcagtcaaatgcttctcagactctctgtgacatagttaggctgggcagagaccagggcagtcagctgcaagaggctctggagccagacccgctcctcacagcgctggagtcgcaggactgtgtggagcagcttctgaagaacatgtttgatggagaccggacggagagctgcctcgtcagtgggactcaggtgttactcaccttgctggaaaccaggcgggttgggacagagggcttggtggactccttttctcagggactggaaaggtcatacgctgtcagcagcagcgtactacacggcatcgagcctcggctgaaggacttccaccagctcctgctcaacccgcccaagaagaaagcgatcctgaccaccattggtgtgctggaggagcccctggggaatgcccgtctgcatggcgcccgcctcatggcagcactgctgcacacaaacacacccagcatcaaccaggagctctgccggctcaacacgatggacttactgctggacttgttctttaagtacacctggaataactttttgcacttccaagtggaactatgcatagccgctattctctcccacgctgcccgtgaggagaggacagaagccagcggatccgagagcagggtggagcctccgcatgagaacgggaaccggagcctggagactccccagccggccgccagcctccctgacaacacaatggtgacccacctgttccagaagtgctgcctggtgcagaggatcctggaggcctgggaagccaacgaccacacgcaggcagcgggtggcatgagacgtgggaacatgggccacctcacacggatcgccaacgcggtggtgcagaacctggagcggggccctgtgcagacgcacatcagcgaggtcatccgagggctccctgcggactgccgtggccgctgggagagcttcgtggaggagacgctgacggagacgaaccgcaggaacactgtggacctggtgagcactcaccaccttcactcctcaagtgaggacgaggacattgagggtgctttccctaacgagctgtcccttcagcaggccttctctgactaccagatccagcagatgacagccaacttcgtggatcagtttggcttcaatgatgaggagtttgccgaccaggacgacaacatcaatgccccgtttgacaggatcgcagagatcaacttcaacatcgacgctgacgaggacagtcccagcgcagctctgtttgaggcctgctgcagtgaccgcatccagccctttgatgatgatgaggacgaggacatctgggaggacagtgacactcgctgtgctgcccgggtgatggccagacccaggtttggagccccccatgcttcagagagttgctcaaagaatggcccagagcgtggaggccaggatgggaaggcgagcttggaagcacacagagatgcacctggggcaggtgccccaccggcccccgggaagaaggaagccccccctgtggagggtgactcagaaggcgccatgtggacggcagtgtttgatgagccagcgaactcaacgcccacagccccaggagtggtgagggacgtgggttccagtgtgtgggcagctggcacctcagctccagaggagaaaggctgggccaagttcactgacttccaacctttctgctgctccgagtcagggcccaggtgcagctctccggtggacacagaatgcagccatgctgagggcagccggagccaaggccctgagaaagccttcagcccggcttctccatgtgcctggaacgtgtgtgtcaccaggaaggcccccctgctggcctctgacagtagctcctctgggggctcccacagcgaggatggcgaccagaaggcagcgagtgccatggatgcggtgagcaggggtcccggccgggaggcccccccgctgcccacagtggccaggacagaggaggctgtcggcagtcccgcttgccttcccctcctccgccttcctacccactccccccctcctaccttaccgcaccccttccccactccctgcctcacatctcacccaccctctcttcccccaactcaccactgccccaca

SEQ ID NO: 284411 - DNA, 656 bp, Homo sapiens
ctaggctgtcctggctgtgtgcttgcactccggcctgcgcatgagagagactgactgtcggcaaaaacaaaaccaaaacaaacctttacccacttctcctaaacaacccctaaaaaactgctctgaaaagcagggaatatcattgtgcaaagtaagttgtttttttccacggggctgtctgcgtaaaacttgccacttagagccctgcctgcaccgtcgtcacggcccagcctgcaggtgagcttcctcgcgcccccgcctgacctgagtgcccctccctcagtcagacacagtgtcgtcgccctgcaggaagccagggggcccgtctgctgctcgtggccaggctgggctttggggtgcccgaccccctccagagcaagccccttagatgcccggcaggtccctctctaccctcccatcccctgggaggtttccccagactgtgtccagtgtgaggctgaagttgagatcatagcacaggaggctctggggtccttgaagaatgaggcgcttgatgatgagcaggatctgagtgctgcctggaggaggtttgaggtcatcaatggacaggcagcttgtcccagtacttggaacttggggcagcagagctgcctagctgggcacaacctgggccaccccacaaagggcaggagtga

SEQ ID NO: 284412 - DNA, 394 bp, Homo sapiens
ctccctgacaacacaatggtgacccacgtgagtccaagaagcatccatcttatcagcgccaactgcgccccactcagaccgtgtccatgtcagcgctgacgtgtgccggacctcactgtgcagctgacacgggggcagggctttgaaaagggtccccaggtgtctggtcagacgctcgtagacagtggggcttgagtgggtcttgcagatctcattcctacctgccttcagcaggggtactggtgccttccacgtgcaggcctggcaagggttagcactggatgagatgagttcagtctggcctccagctggaggcccagggaataaatgcccagggagccagcagtgtcagtgatgggagccacacggtggggaggggatgctgagggacatg

SEQ ID NO: 284413 - DNA, 3993 bp, Homo sapiens
tcggagtgccgcccgcggccccgagtcggtctcgagccgccggccggccgtgccggtgtccgtaggcgctgcgccctcggccgggcccatgtgtgtgcggcccgcccgaggccgcccgggctttgcctccaccagcgccctggcctccgctcgggcctccacacgggcctccgaagagctgccgcgacgcccggcccgcagggcaggtaaagagattataaatcttccactgaatgaaaaaaattttcttaaagctgcatatactccaagaaaaaaaccacaaatgtttttctgttttgcctgaatacatgatttaaacaagagatttccacagaagctctgcggccgtcacgatgttctggaagtttgacttgaacaccacgtcccatgttgacaagctgctggacaaggagcatgtgacgctgcaggagttaatggatgaagatgacatcttgcaggagtgtaaggctcagaaccagaagctgctggacttcctgtgcaggcagcagtgcatggaggagctggtgagcctcatcacacaggatccgcccctggacatggaggagaaggtccgcttcaaatatccaaacacagcctgtgagcttctgacttgtgatgtgccgcagatcagcgaccgcctcggtggggacgagagcctgctgagcctcctgtacgacttcttggaccatgagccgcctctcaatcctctgctcgccagttttttcagcaagaccattggcaatctcattgcaagaaaaaccgaacaggtgattacgtttttgaagaagaaggacaagttcatcagcctggtgttgaagcacatcggcacctcagcgcttatggacctgctgctgcgcctggtcagctgtgtggagccagccgggctccggcaggacgtcctgcactggctgaatgaagagaaggtcatccagaggcttgtggagttgatccacccgagccaggatgaagataggcagtcaaatgcttctcagactctctgtgacatagttaggctgggcagagaccagggcagtcagctgcaagaggctctggagccagacccgctcctcacagcgctggagtcgcaggactgtgtggagcagcttctgaagaacatgtttgatggagaccggacggagagctgcctcgtcagtgggactcaggtgttactcaccttgctggaaaccaggcgggttgggacagagggcttggtggactccttttctcagggactggaaaggtcatacgctgtcagcagcagcgtactacacggcatcgagcctcggctgaaggacttccaccagctcctgctcaacccgcccaagaagaaagcgatcctgaccaccattggtgtgctggaggagcccctggggaatgcccgtctgcatggcgcccgcctcatggcagcactgctgcacacaaacacacccagcatcaaccaggagctctgccggctcaacacgatggacttactgctggacttgttctttaagtacacctggaataactttttgcacttccaagtggaactatgcatagccgctattctctcccacgctgcccgtgaggagaggacagaagccagcggatccgagagcagggtggagcctccgcatgagaacgggaaccggagcctggagactccccagccggccgccagcctccctgacaacacaatggtgacccacctgttccagaagtgctgcctggtgcagaggatcctggaggcctgggaagccaacgaccacacgcaggcagcgggtggcatgagacgtgggaacatgggccacctcacacggatcgccaacgcggtggtgcagaacctggagcggggccctgtgcagacgcacatcagcgaggtcatccgagggctccctgcggactgccgtggccgctgggagagcttcgtggaggagacgctgacggagacgaaccgcaggaacactgtggacctggccttctctgactaccagatccagcagatgacagccaacttcgtggatcagtttggcttcaatgatgaggagtttgccgaccaggacgacaacatcaatgccccgtttgacaggatcgcagagatcaacttcaacatcgacgctgacgaggacagtcccagcgcagctctgtttgaggcctgctgcagtgaccgcatccagccctttgatgatgatgaggacgaggacatctgggaggacagtgacactcgctgtgctgcccgggtgatggccagacccaggtttggagccccccatgcttcagagagttgctcaaagaatggcccagagcgtggaggccaggatgggaaggcgagcttggaagcacacagagatgcacctggggcaggtgccccaccggcccccgggaagaaggaagccccccctgtggagggtgactcagaaggcgccatgtggacggcagtgtttgatgagccagcgaactcaacgcccacagccccaggagtggtgagggacgtgggttccagtgtgtgggcagctggcacctcagctccagaggagaaaggctgggccaagttcactgacttccaacctttctgctgctccgagtcagggcccaggtgcagctctccggtggacacagaatgcagccatgctgagggcagccggagccaaggccctgagaaagccttcagcccggcttctccatgtgcctggaacgtgtgtgtcaccaggaaggcccccctgctggcctctgacagtagctcctctgggggctcccacagcgaggatggcgaccagaaggcagcgagtgccatggatgcggtgagcaggggtcccggccgggaggcccccccgctgcccacagtggccaggacagaggaggctgtcggcagggtcgggtgtgctgacagccggctgttaagccctgcctgccccgcgccaaaggaagtgactgctgccccagccgtggctgtgccccccgaggctactgtggccatcaccacagcactgagcaaggctggccccgccatacccaccccagcagtctcttctgcactggccgtggcggtccccctagggcccatcatggcagtcacagcagccccagccatggtggccaccctggggacagtgacaaaggacgggaagacagatgccccgccagaaggagctgccttaaatggcccagtgtgatgctgctgccgcccggccacggcccaccctggtcaggctgcctccttaatcgagaaaactacctggtgatgcaatctttttttttttaatttaatttaattttaaaataaatgctgcattggtaaagctggcagttgaaaccagttggacggcccagcttgcgtctcttctgcctgagtgggcctctcaggtcactcgtgccctgctggaggacagaggggcacctcagccgcccccaagcccagagcacagcaataaggtcggcctgcaggagccggggtgggggtgggggtggggggggcaggaccctgagatgccaccaggacctgatgggccaggaagggcgtggacatggaggctgtttttacagtttttttttgttgttgttttgtttttaaagaatacagaaggagccaagcttttttgcactttgtatccagctgcaagctcagggcagagtcaagggcctgggttggaaaaacctgactcacaggaatgcataattgacccttgcagctacccaatagcccttggagctggcactgaaccaggctgcaagatttgactgccttaaaaacacaaggccctctaggcctggcagggatgtccctgtgcccagcacagggtgcctggcagggggagaccacaggtatgcaggtggggggacatggtgtggcactgggggctcgaagactggtttctagcactaccggtcacggccatgtcgtcctagaagggtccagaagattattttacgttgagtccatttttaatgttctgatcacctgacagggcaccccaaacccccaactcccaataaaagccgtgacgttcggacaaa

SEQ ID NO: 284414 - DNA, 4427 bp, Homo sapiens
tcggagtgccgcccgcggccccgagtcggtctcgagccgccggccggccgtgccggtgtccgtaggcgctgcgccctcggccgggcccatgtgtgtgcggcccgcccgaggccgcccgggctttgcctccaccagcgccctggcctccgctcgggcctccacacgggcctccgaagagctgccgcgacgcccggcccgcagggcaggtaaagagattataaatcttccactgaatgaaaaaaattttcttaaagctgcatatactccaagaaaaaaaccacaaatgtttttctgttttgcctgaatacatgatttaaacaagagatttccacagaagctctgcggccgtcacgatgttctggaagtttgacttgaacaccacgtcccatgttgacaagctgctggacaaggagcatgtgacgctgcaggagttaatggatgaagatgacatcttgcaggagtgtaaggctcagaaccagaagctgctggacttcctgtgcaggcagcagtgcatggaggagctggtgagcctcatcacacaggatccgcccctggacatggaggagaaggtccgcttcaaatatccaaacacagcctgtgagcttctgacttgtgatgtgccgcagatcagcgaccgcctcggtggggacgagagcctgctgagcctcctgtacgacttcttggaccatgagccgcctctcaatcctctgctcgccagttttttcagcaagaccattggcaatctcattgcaagaaaaaccgaacaggtgattacgtttttgaagaagaaggacaagttcatcagcctggtgttgaagcacatcggcacctcagcgcttatggacctgctgctgcgcctggtcagctgtgtggagccagccgggctccggcaggacgtcctgcactggctgaatgaagagaaggtcatccagaggcttgtggagttgatccacccgagccaggatgaagataggcagtcaaatgcttctcagactctctgtgacatagttaggctgggcagagaccagggcagtcagctgcaagaggctctggagccagacccgctcctcacagcgctggagtcgcaggactgtgtggagcagcttctgaagaacatgtttgatggagaccggacggagagctgcctcgtcagtgggactcaggtgttactcaccttgctggaaaccaggcgggttgggacagagggcttggtggactccttttctcagggactggaaaggtcatacgctgtcagcagcagcgtactacacggcatcgagcctcggctgaaggacttccaccagctcctgctcaacccgcccaagaagaaagcgatcctgaccaccattggtgtgctggaggagcccctggggaatgcccgtctgcatggcgcccgcctcatggcagcactgctgcacacaaacacacccagcatcaaccaggagctctgccggctcaacacgatggacttactgctggacttgttctttaagtacacctggaataactttttgcacttccaagtggaactatgcatagccgctattctctcccacgctgcccgtgaggagaggacagaagccagcggatccgagagcagggtggagcctccgcatgagaacgggaaccggagcctggagactccccagccggccgccagcctccctgacaacacaatggtgacccacctgttccagaagtgctgcctggtgcagaggatcctggaggcctgggaagccaacgaccacacgcaggcagcgggtggcatgagacgtgggaacatgggccacctcacacggatcgccaacgcggtggtgcagaacctggagcggggccctgtgcagacgcacatcagcgaggtcatccgagggctccctgcggactgccgtggccgctgggagagcttcgtggaggagacgctgacggagacgaaccgcaggaacactgtggacctggtgagcactcaccaccttcactcctcaagtgaggacgaggacattgagggtgctttccctaacgagctgtcccttcagcaggccttctctgactaccagatccagcagatgacagccaacttcgtggatcagtttggcttcaatgatgaggagtttgccgaccaggacgacaacatcaatgccccgtttgacaggatcgcagagatcaacttcaacatcgacgctgacgaggacagtcccagcgcagctctgtttgaggcctgctgcagtgaccgcatccagccctttgatgatgatgaggacgaggacatctgggaggacagtgacactcgctgtgctgcccgggtgatggccagacccaggtttggagccccccatgcttcagagagttgctcaaagaatggcccagagcgtggaggccaggatgggaaggcgagcttggaagcacacagagatgcacctggggcaggtgccccaccggcccccgggaagaaggaagccccccctgtggagggtgactcagaaggcgccatgtggacggcagtgtttgatgagccagcgaactcaacgcccacagccccaggagtggtgagggacgtgggttccagtgtgtgggcagctggcacctcagctccagaggagaaaggctgggccaagttcactgacttccaacctttctgctgctccgagtcagggcccaggtgcagctctccggtggacacagaatgcagccatgctgagggcagccggagccaaggccctgagaaagccttcagcccggcttctccatgtgcctggaacgtgtgtgtcaccaggaaggcccccctgctggcctctgacagtagctcctctgggggctcccacagcgaggatggcgaccagaaggcagcgagtgccatggatgcggtgagcaggggtcccggccgggaggcccccccgctgcccacagtggccaggacagaggaggctgtcggcagggtcgggtgtgctgacagccggctgttaagccctgcctgccccgcgccaaaggaagtgactgctgccccagccgtggctgtgccccccgaggctactgtggccatcaccacagcactgagcaaggctggccccgccatacccaccccagcagtctcttctgcactggccgtggcggtccccctagggcccatcatggcagtcacagcagccccagccatggtggccaccctggggacagtgacaaaggacgggaagacagatgccccgccagaaggagctgccttaaatggcccagtgtgatgctgctgccgcccggccacggcccaccctggtcaggctgcctccttaatcgagaaaactacctggtgatgcaatctttttttttttaatttaatttaattttaaaataaatgctgcattggtaaagctggcagttgaaaccagttggacggcccagcttgcgtctcttctgcctgagtgggcctctcaggtcactcgtgccctgctggaggacagaggggcacctcagccgcccccaagcccagagcacagcaataaggtcggcctgcaggagccggggtgggggtgggggtggggggggcaggaccctgagatgccaccaggacctgatgggccaggaagggcgtggacatggaggctgtttttacagtttttttttgttgttgttttgtttttaaagaatacagaaggagccaagcttttttgcactttgtatccagctgcaagctcagggcagagtcaagggcctgggttggaaaaacctgactcacaggaatgcataattgacccttgcagctacccaatagcccttggagctggcactgaaccaggctgcaagatttgactgccttaaaaacacaaggccctctaggcctggcagggatgtccctgtgcccagcacagggtgcctggcagggggagaccacaggtatgcaggtggggggacatggtgtggcactgggggctcgaagactggtttctagcactaccggtcacggccatgtcgtcctagaagggtccagaagattattttacgttgagtccatttttaatgttctgatcacctgacagggcaccccaaacccccaactcccaataaaagccgtgacgttcggacaaaccgcgtactgtgaaccttccggccccaaagccccggcccggccaggggtgggagagtctcctccagcacctcttttgtgggcccgccaccccccagcgttatccccgtgtaatgggtggaggcggaacaggccacatcacggcatcaggtctctacagcttagcaaatactgacatttttccgtttgggggatggggggaaccacttcgcctaacgctcaaacacatcaaccccaggacttccttttgtgccagctccccctcccagaagcctgggccccaccttgtcctcagtggctgagtgggaggggcaggtggagaccagacccccaccccgccccagcgagcttgtct

SEQ ID NO: 284415 - DNA, 4314 bp, Homo sapiens
tcggagtgccgcccgcggccccgagtcggtctcgagccgccggccggccgtgccggtgtccgtaggcgctgcgccctcggccgggcccatgtgtgtgcggcccgcccgaggccgcccgggctttgcctccaccagcgccctggcctccgctcgggcctccacacgggcctccgaagagctgccgcgacgcccggcccgcagggcaggtaaagagattataaatcttccactgaatgaaaaaaattttcttaaagctgcatatactccaagaaaaaaaccacaaatgtttttctgttttgcctgaatacatgatttaaacaagagatttccacagaagctctgcggccgtcacgatgttctggaagtttgacttgaacaccacgtcccatgttgacaagctgctggacaaggagcatgtgacgctgcaggagttaatggatgaagatgacatcttgcaggagtgtaaggctcagaaccagaagctgctggacttcctgtgcaggcagcagtgcatggaggagctggtgagcctcatcacacaggatccgcccctggacatggaggagaaggtccgcttcaaatatccaaacacagcctgtgagcttctgacttgtgatgtgccgcagatcagcgaccgcctcggtggggacgagagcctgctgagcctcctgtacgacttcttggaccatgagccgcctctcaatcctctgctcgccagttttttcagcaagaccattggcaatctcattgcaagaaaaaccgaacaggtgattacgtttttgaagaagaaggacaagttcatcagcctggtgttgaagcacatcggcacctcagcgcttatggacctgctgctgcgcctggtcagctgtgtggagccagccgggctccggcaggacgtcctgcactggctgaatgaagagaaggtcatccagaggcttgtggagttgatccacccgagccaggatgaagataggcagtcaaatgcttctcagactctctgtgacatagttaggctgggcagagaccagggcagtcagctgcaagaggctctggagccagacccgctcctcacagcgctggagtcgcaggactgtgtggagcagcttctgaagaacatgtttgatggagaccggacggagagctgcctcgtcagtgggactcaggtgttactcaccttgctggaaaccaggcgggttgggacagagggcttggtggactccttttctcagggactggaaaggtcatacgctgtcagcagcagcgtactacacggcatcgagcctcggctgaaggacttccaccagctcctgctcaacccgcccaagaagaaagcgatcctgaccaccattggtgtgctggaggagcccctggggaatgcccgtctgcatggcgcccgcctcatggcagcactgctgcacacaaacacacccagcatcaaccaggagctctgccggctcaacacgatggacttactgctggacttgttctttaagtacacctggaataactttttgcacttccaagtggaactatgcatagccgctattctctcccacgctgcccgtgaggagaggacagaagccagcggatccgagagcagggtggagcctccgcatgagaacgggaaccggagcctggagactccccagccggccgccagcctccctgacaacacaatggtgacccacctgttccagaagtgctgcctggtgcagaggatcctggaggcctgggaagccaacgaccacacgcaggcagcgggtggcatgagacgtgggaacatgggccacctcacacggatcgccaacgcggtggtgcagaacctggagcggggccctgtgcagacgcacatcagcgaggtcatccgagggctccctgcggactgccgtggccgctgggagagcttcgtggaggagacgctgacggagacgaaccgcaggaacactgtggacctggtgagcactcaccaccttcactcctcaagtgaggacgaggacattgagggtgctttccctaacgagctgtcccttcagcaggccttctctgactaccagatccagcagatgacagccaacttcgtggatcagtttggcttcaatgatgaggagtttgccgaccaggacgacaacatcaatgccccgtttgacaggatcgcagagatcaacttcaacatcgacgctgacgaggacagtcccagcgcagctctgtttgaggcctgctgcagtgaccgcatccagccctttgatgatgatgaggacgaggacatctgggaggacagtgacactcgctgtgctgcccgggtgatggccagacccaggtttggagccccccatgcttcagagagttgctcaaagaatggcccagagcgtggaggccaggatgggaaggcgagcttggaagcacacagagatgcacctggggcaggtgccccaccggcccccgggaagaaggaagccccccctgtggagggtgactcagaaggcgccatgtggacggcagtgtttgatgagccagcgaactcaacgcccacagccccaggagtggtgagggacgtgggttccagtgtgtgggcagctggcacctcagctccagaggagaaaggctgggccaagttcactgacttccaacctttctgctgctccgagtcagggcccaggtgcagctctccggtggacacagaatgcagccatgctgagggcagccggagccaaggccctgagaaagccttcagcccggcttctccatgtgcctggaacgtgtgtgtcaccaggaaggcccccctgctggcctctgacagtagctcctctgggggctcccacagcgaggatggcgaccagaaggcagcgagtgccatggatgcggtgagcaggggtcccggccgggaggcccccccgctgcccacagtggccaggacagaggaggctgtcggcagggtcgggtgtgctgacagccggctgttaagccctgcctgccccgcgccaaaggaagtgactgctgccccagccgtggctgtgccccccgaggctactgtggccatcaccacagcactgagcaaggctggccccgccatacccaccccagcagtctcttctgcactggccgtggcggtccccctagggcccatcatggcagtcacagcagccccagccatggtggccaccctggggacagtgacaaaggacgggaagacagatgccccgccagaaggagctgccttaaatggcccagtgtgatgctgctgccgcccggccacggcccaccctggtcaggctgcctccttaatcgagaaaactacctggtgatgcaatctttttttttttaatttaatttaattttaaaataaatgctgcattggtaaagctggcagttgaaaccagttggacggcccagcttgcgtctcttctgcctgagtgggcctctcaggtcactcgtgccctgctggaggacagaggggcacctcagccgcccccaagcccagagcacagcaataaggtcggcctgcaggagccggggtgggggtgggggtggggggggcaggaccctgagatgccaccaggacctgatgggccaggaagggcgtggacatggaggctgtttttacagtttttttttgttgttgttttgtttttaaagaatacagaaggagccaagcttttttgcactttgtatccagctgcaagctcagggcagagtcaagggcctgggttggaaaaacctgactcacaggaatgcataattgacccttgcagctacccaatagcccttggagctggcactgaaccaggctgcaagatttgactgccttaaaaacacaaggccctctaggcctggcagggatgtccctgtgcccagcacagggtgcctggcagggggagaccacaggtatgcaggtggggggacatggtgtggcactgggggctcgaagactggtttctagcactaccggtcacggccatgtcgtcctagaagggtccagaagattattttacgttgagtccatttttaatgttctgatcacctgacagggcaccccaaacccccaactcccaataaaagccgtgacgttcggacaaaaaaaaaaaaaaaaaaaaaaaaaaaaaaaaaaaaaaaaaaaaaaaaaaaaaaaacaaaaaaaacacataactcatatcactccaccaaatataaaccatgttcgcctctttggccccctctatttttaacttgccccactttttggcttcgtcctaaatttggccttccttggcccatttccccttattgggatcctttttgaacttcctggctcatgttttacaaacctcgtcctggtgg

SEQ ID NO: 284416 - DNA, 2053 bp, Homo sapiens
ggccagccttgctcagtgctgtggtgatggccacagtagcctcggggggcacagccacggctggggcagcagtcacttcctttggcgcggggcaggcagggcttaacagccggctgtcagcacacccgaccctgccgaccgcctcctctgtcctggccactgtgggcagcgggggggcctcccggccgggacgcctgctgcagtgaccgcatccagccctttgatgatgatgaggacgaggacatctgggaggacagtgacactcgctgtgctgcccgggtgatggccagacccaggtttggagccccccatgcttcagagagttgctcaaagaatggcccagagcgtggaggccaggatgggaaggcgagcttggaagcacacagagatgcacctggggcaggtgccccaccggcccccgggaagaaggaagccccccctgtggagggtgactcagaaggcgccatgtggacggcagtgtttgatgagccagcgaactcaacgcccacagccccaggagtggtgagggacgtgggttccagtgtgtgggcagctggcacctcagctccagaggagaaaggctgggccaagttcactgacttccaacctttctgctgctccgagtcagggcccaggtgcagctctccggtggacacagaatgcagccatgctgagggcagccggagccaaggccctgagaaagccttcagcccggcttctccatgtgcctggaacgtgtgtgtcaccaggaaggcccccctgctggcctctgacagtagctcctctgggggctcccacagcgaggatggcgaccagaaggcagcgagtgccatggatgcggtgagcaggggtcccggccgggaggcccccccgctgcccacagtggccaggacagaggaggctgtcggcagggtcgggtgtgctgacagccggctgttaagccctgcctgccccgcgccaaaggaagtgactgctgccccagccgtggctgtgccccccgaggctactgtggccatcaccacagcactgagcaaggctggccccgccatacccaccccagcagtctcttctgcactggccgtggcggtccccctagggcccatcatggcagtcacagcagccccagccatggtggccaccctggggacagtgacaaaggacgggaagacagatgccccgccagaaggagctgccttaaatggcccagtgtgatgctgctgccgcccggccacggcccaccctggtcaggctgcctccttaatcgagaaaactacctggtgatgcaatctttttttttttaatttaatttaattttaaaataaatgctgcattggtaaagctggcagttgaaaccagttggacggcccagcttgcgtctcttctgcctgagtgggcctctcaggtcactcgtgccctgctggaggacagaggggcacctcagccgcccccaagcccagagcacagcaataaggtcggcctgcaggagccggggtgggggtgggggtggggggggcaggaccctgagatgccaccaggacctgatgggccaggaagggcgtggacatggaggctgtttttacagtttttttttgttgttgttttgtttttaaagaatacagaaggagccaagcttttttgcactttgtatccagctgcaagctcagggcagagtcaagggcctgggttggaaaaacctgactcacaggaatgcataattgacccttgcagctacccaatagcccttggagctggcactgaaccaggctgcaagatttgactgccttaaaaacacaaggccctctaggcctggcagggatgtccctgtgcccagcacagggtgcctggcagggggagaccacaggtatgcaggtggggggacatggtgtggcactgggggctcgaagactggtttctagcactaccggtcacggccatgtcgtcctagaagggtccagaagattattttacgttgagtccatttttaatgttctgatcacctgacagggcaccccaaacccccaactcccaataaaagccgtgacgttcggacaaa

SEQ ID NO: 284417 - DNA, 3929 bp, Homo sapiens
tcggagtgccgcccgcggccccgagtcggtctcgagccgccggccggccgtgccggtgtccgtaggcgctgcgccctcggccgggcccatgtgtgtgcggcccgcccgaggccgcccgggctttgcctccaccagcgccctggcctccgctcgggcctccacacgggcctccgaagagctgccgcgacgcccggcccgcagggcaggtaaagagattataaatcttccactgaatgaaaaaaattttcttaaagctgcatatactccaagaaaaaaaccacaaatgtttttctgttttgcctgaatacatgatttaaacaagagatttccacagaagctctgcggccgtcacgatgttctggaagtttgacttgaacaccacgtcccatgttgacaagctgctggacaaggagcatgtgacgctgcaggagttaatggatgaagatgacatcttgcaggagtgtaaggctcagaaccagaagctgctggacttcctgtgcaggcagcagtgcatggaggagctggtgagcctcatcacacaggatccgcccctggacatggaggagaaggtccgcttcaaatatccaaacacagcctgtgagcttctgacttgtgatgtgccgcagatcagcgaccgcctcggtggggacgagagcctgctgagcctcctgtacgacttcttggaccatgagccgcctctcaatcctctgctcgccagttttttcagcaagaccattggcaatctcattgcaagaaaaaccgaacaggtgattacgtttttgaagaagaaggacaagttcatcagcctggtgttgaagcacatcggcacctcagcgcttatggacctgctgctgcgcctggtcagctgtgtggagccagccgggctccggcaggacgtcctgcactggctgaatgaagagaaggtcatccagaggcttgtggagttgatccacccgagccaggatgaagataggcagtcaaatgcttctcagactctctgtgacatagttaggctgggcagagaccagggcagtcagctgcaagaggctctggagccagacccgctcctcacagcgctggagtcgcaggactgtgtggagcagcttctgaagaacatgtttgatggagaccggacggagagctgcctcgtcagtgggactcaggtgttactcaccttgctggaaaccaggcgggttgggacagagggcttggtggactccttttctcagggactggaaaggtcatacgctgtcagcagcagcgtactacacggcatcgagcctcggctgaaggacttccaccagctcctgctcaacccgcccaagaagaaagcgatcctgaccaccattggtgtgctggaggagcccctggggaatgcccgtctgcatggcgcccgcctcatggcagcactgctgcacacaaacacacccagcatcaaccaggagctctgccggctcaacacgatggacttactgctggacttgttctttaagtacacctggaataactttttgcacttccaagtggaactatgcatagccgctattctctcccacgctgcccgtgaggagaggacagaagccagcggatccgagagcagggtggagcctccgcatgagaacgggaaccggagcctggagactccccagccggccgccagcctccctgacaacacaatggtgacccacctgttccagaagtgctgcctggtgcagaggatcctggaggcctgggaagccaacgaccacacgcaggcagcgggtggcatgagacgtgggaacatgggccacctcacacggatcgccaacgcggtggtgcagaacctggagcggggccctgtgcagacgcacatcagcgaggtcatccgagggctccctgcggactgccgtggccgctgggagagcttcgtggaggagacgctgacggagacgaaccgcaggaacactgtggacctggtgagcactcaccaccttcactcctcaagtgaggacgaggacattgagggtgctttccctaacgagctgtcccttcagcaggccttctctgactaccagatccagcagatgacagccaacttcgtggatcagtttggcttcaatgatgaggagtttgccgaccaggacgacaacatcaatgccccgtttgacaggatcgcagagatcaacttcaacatcgacgctgacgaggacagtcccagcgcagctctgtttgaggcctgctgcagtgaccgcatccagccctttgatgatgatgaggacgaggacatctgggaggacagtgacactcgctgtgctgcccgggtgatggccagacccaggtttggagccccccatgcttcagagagttgctcaaagaatggcccagagcgtggaggccaggatgggaaggcgagcttggaagcacacagagatgcacctggggcaggtgccccaccggcccccgggaagaaggaagccccccctgtggagggtgactcagaaggcgccatgtggacggcagtgtttgatgagccagcgaactcaacgcccacagccccaggagtggtgagggacgtgggttccagtgtgtgggcagctggcacctcagctccagaggagaaaggctgggccaagttcactgacttccaacctttctgctgctccgagtcagggcccaggtgcagctctccggtggacacagaatgcagccatgctgagggcagccggagccaaggccctgagaaagccttcagcccggcttctccatgtgcctggaacgtgtgtgtcaccaggaaggcccccctgctggcctctgacagtagctcctctgggggctcccacagcgaggatggcgaccagaaggcagcgagtgccatggatgcggtgagcaggggtcccggccgggaggcccccccgctgcccacagtggccaggacagaggaggctgtcggcagggtcgggtgtgctgacagccggctgttaagccctgcctgccccgcgccaaaggaagtgactcagccccagccatggtggccaccctggggacagtgacaaaggacgggaagacagatgccccgccagaaggagctgccttaaatggcccagtgtgatgctgctgccgcccggccacggcccaccctggtcaggctgcctccttaatcgagaaaactacctggtgatgcaatctttttttttttaatttaatttaattttaaaataaatgctgcattggtaaagctggcagttgaaaccagttggacggcccagcttgcgtctcttctgcctgagtgggcctctcaggtcactcgtgccctgctggaggacagaggggcacctcagccgcccccaagcccagagcacagcaataaggtcggcctgcaggagccggggtgggggtgggggtggggggggcaggaccctgagatgccaccaggacctgatgggccaggaagggcgtggacatggaggctgtttttacagtttttttttgttgttgttttgtttttaaagaatacagaaggagccaagcttttttgcactttgtatccagctgcaagctcagggcagagtcaagggcctgggttggaaaaacctgactcacaggaatgcataattgacccttgcagctacccaatagcccttggagctggcactgaaccaggctgcaagatttgactgccttaaaaacacaaggccctctaggcctggcagggatgtccctgtgcccagcacagggtgcctggcagggggagaccacaggtatgcaggtggggggacatggtgtggcactgggggctcgaagactggtttctagcactaccggtcacggccatgtcgtcctagaagggtccagaagattattttacgttgagtccatttttaatgttctgatcacctgacagggcaccccaaacccccaactcccaataaaagccgtgacgttcggacaaa

SEQ ID NO: 284418 - DNA, 1477 bp, Homo sapiens
agtcatacagagttcctgtgtgggcttcattccttcttaaagtttagtcactgaaatttttgtttgtttgtttggctgaggcaggagaatcgcttgaaccagtgagccgagatcacgccactgcactccggcctgcgcatgagagagactgactgtcggcaaaaacaaaaccaaaacaaacctttacccacttctcctaaacaacccctaaaaaactgctctgaaaagcagggaatatcattgtgcaaagtaagttgtttttttccacggggctgtctgcgtaaaacttgccacttagagccctgcctgcaccgtcgtcacggcccagcctgcagggtcgggtgtgctgacagccggctgttaagccctgcctgccccgcgccaaaggaagtgactgctgccccagccgtggctgtgccccccgaggctactgtggccatcaccacagcactgagcaaggctggccccgccatacccaccccagcagtctcttctgcactggccgtggcggtccccctagggcccatcatggcagtcacagcagccccagccatggtggccaccctggggacagtgacaaaggacgggaagacagatgccccgccagaaggagctgccttaaatggcccagtgtgatgctgctgccgcccggccacggcccaccctggtcaggctgcctccttaatcgagaaaactacctggtgatgcaatctttttttttttaatttaatttaattttaaaataaatgctgcattggtaaagctggcagttgaaaccagttggacggcccagcttgcgtctcttctgcctgagtgggcctctcaggtcactcgtgccctgctggaggacagaggggcacctcagccgcccccaagcccagagcacagcaataaggtcggcctgcaggagccggggtgggggtgggggtggggggggcaggaccctgagatgccaccaggacctgatgggccaggaagggcgtggacatggaggctgtttttacagtttttttttgttgttgttttgtttttaaagaatacagaaggagccaagcttttttgcactttgtatccagctgcaagctcagggcagagtcaagggcctgggttggaaaaacctgactcacaggaatgcataattgacccttgcagctacccaatagcccttggagctggcactgaaccaggctgcaagatttgactgccttaaaaacacaaggccctctaggcctggcagggatgtccctgtgcccagcacagggtgcctggcagggggagaccacaggtatgcaggtggggggacatggtgtggcactgggggctcgaagactggtttctagcactaccggtcacggccatgtcgtcctagaagggtccagaagattattttacgttgagtccatttttaatgttctgatcacctgacagggcaccccaaacccccaactcccaataaaagccgtgacgttcggacaaa

SEQ ID NO: 284419 - DNA, 1817 bp, Homo sapiens
tcggagtgccgcccgcggccccgagtcggtctcgagccgccggccggccgtgccggtgtccgtaggcgctgcgccctcggccgggcccatgtgtgtgcggcccgcccgaggccgcccgggctttgcctccaccagcgccctggcctccgctcgggcctccacacgggcctccgaagagctgccgcgacgcccggcccgcagggcaggtaaagagattataaatcttccactgaatgaaaaaaattttcttaaagctgcatatactccaagaaaaaaaccacaaatgtttttctgttttgcctgaatacatgatttaaacaagagatttccacagaagctctgcggccgtcacgatgttctggaagtttgacttgaacaccacgtcccatgttgacaagctgctggacaaggagcatgtgacgctgcaggagttaatggatgaagatgacatcttgcaggagtgtaaggctcagaaccagaagctgctggacttcctgtgcaggcagcagtgcatggaggagctggtgagcctcatcacacaggatccgcccctggacatggaggagaaggtccgcttcaaatatccaaacacagcctgtgagcttctgacttgtgatgtgccgcagatcagcgaccgcctcggtggggacgagagcctgctgagcctcctgtacgacttcttggaccatgagccgcctctcaatcctctgctcgccagttttttcagcaagaccattggcaatctcattgcaagaaaaaccgaacaggtgattacgtttttgaagaagaaggacaagttcatcagcctggtgttgaagcacatcggcacctcagcgcttatggacctgctgctgcgcctggtcagctgtgtggagccagccgggctccggcaggacgtcctgcactggctgaatgaagagaaggtcatccagaggcttgtggagttgatccacccgagccaggatgaagataggcagtcaaatgcttctcagactctctgtgacctggtcaggctgcctccttaatcgagaaaactacctggtgatgcaatctttttttttttaatttaatttaattttaaaataaatgctgcattggtaaagctggcagttgaaaccagttggacggcccagcttgcgtctcttctgcctgagtgggcctctcaggtcactcgtgccctgctggaggacagaggggcacctcagccgcccccaagcccagagcacagcaataaggtcggcctgcaggagccggggtgggggtgggggtggggggggcaggaccctgagatgccaccaggacctgatgggccaggaagggcgtggacatggaggctgtttttacagtttttttttgttgttgttttgtttttaaagaatacagaaggagccaagcttttttgcactttgtatccagctgcaagctcagggcagagtcaagggcctgggttggaaaaacctgactcacaggaatgcataattgacccttgcagctacccaatagcccttggagctggcactgaaccaggctgcaagatttgactgccttaaaaacacaaggccctctaggcctggcagggatgtccctgtgcccagcacagggtgcctggcagggggagaccacaggtatgcaggtggggggacatggtgtggcactgggggctcgaagactggtttctagcactaccggtcacggccatgtcgtcctagaagggtccagaagattattttacgttgagtccatttttaatgttctgatcacctgacagggcaccccaaacccccaactcccaataaaagccgtgacgttcggacaaa

SEQ ID NO: 284420 - DNA, 1617 bp, Homo sapiens
tcggagtgccgcccgcggccccgagtcggtctcgagccgccggccggccgtgccggtgtccgtaggcgctgcgccctcggccgggcccatgtgtgtgcggcccgcccgaggccgcccgggctttgcctccaccagcgccctggcctccgctcgggcctccacacgggcctccgaagagctgccgcgacgcccggcccgcagggcaggtaaagagattataaatcttccactgaatgaaaaaaattttcttaaagctgcatatactccaagaaaaaaaccacaaatgtttttctgttttgcctgaatacatgatttaaacaagagatttccacagaagctctgcggccgtcacgatgttctggaagtttgacttgaacaccacgtcccatgttgacaagctgctggacaaggagcatgtgacgctgcaggagttaatggatgaagatgacatcttgcaggagtgtaaggctcagaaccagaagctgctggacttcctgtgcaggcagcagtgcatggaggagctggtgagcctcatcacacaggatccgcccctggacatggaggagaaggtccgcttcaaatatccaaacacagcctgtgagcttctgacttgtgatgtgccgcagatcagcgaccgcctcggtggggacgagagcctgctgagcctcctgtacgacttcttggaccatgagccgcctctcaatcctctgctcgccagttttttcagcaagaccattggcaatctcattgcaagaaaaaccgaacaggtgattacgtttttgaagaagaaggacaagttcatcagcctggtgttgaagcacatcggcacctcagcgcttatggacctgctgctgcgcctggtcagctgtgtggagccagccgggctccggcaggacgtcctgcactggctgaatgaagagaaggtcatccagaggcttgtggagttgatccacccgagccaggatgaagataggcagtcaaatgcttctcagactctctgtgacatagttaggctgggcagagaccagggcagtcagctgcaagaggctctggagccagacccgctcctcacagcgctggagtcgcaggactgtgtggagcagcttctgaagaacatgtttgatggagaccggacggagagctgcctcgtcagtgggactcaggtgttactcaccttgctggaaaccaggcgggttgggacagagggcttggtggactccttttctcagggactggaaaggtcatacgctgtcagcagcagcgtactacacggcatcgagcctcggctgaaggacttccaccagctcctgctcaacccgcccaagaagaaagcgatcctgaccaccattggtgtgctggaggagcccctggggaatgcccgtctgcatggcgcccgcctcatggcagcactgctgcacacaaacacacgaagacagatgccccgccagaaggagctgccttaaatggcccagtgtgatgctgctgccgcccggccacggcccaccctggtcaggctgcctccttaatcgagaaaactacctggtgatgcaatctttttttttttaatttaatttaattttaaaataaatgctgcattggtaaagctggcagttgaaa

SEQ ID NO: 284421 - DNA, 898 bp, Homo sapiens
ggaaggggctgcagttctccaaggattcccgcctgctcccagacccccgggagtcgtaggaacccgttcctggacgctgacgtcggctttcagggatccctcgccggacgccgcggagggacagagcctgggaagccgtcgccccgccccgtccccgcccccgcgcgcagcgggcccggggcgctgagacccgcgtagagcaaagcgcaaggtcccagcgccccttggatcctcggtggcagggtccgggcaagtgtcattgcgagggttcaggaagccccggcctgtgatcgtgagcggaaacccctcctggagtttccccaaagccatggacagccctagtcttcgtgagcttcaacagcctctgctggagggcacagaatgtgagacccctgcccagaagcctggcaggcatgagctggggtcccccttaagagagatagcctttgccgagtccctgaggggtttgcagttcctgtcaccgcctcttccctccgtgagcgctggcctgggggaaccaaggccccctgatgttgaggacatgtcatccagtgacagtgactcggactgggatggaggcagccgtctttcaccatttctaccccacgaccacctcggcttggctgtcttctccatgctgtgttgtttctggcccgttggcatcgctgccttctgtctagcccagaagtagttgcccctacagccctcactgtgaaccctgaggccggcagcccagcaaatctgtgggcagagagtggagaatcttggtggatgaggctgcggcggcggcaggagcatctagaaacgggagcgagctggactggaacccttccccttcctggccaccgctcttcgggcggcagcaacctgagattaaacaccagacacccttgcagcc

SEQ ID NO: 284422 - DNA, 1847 bp, Homo sapiens
ggaaggggctgcagttctccaaggattcccgcctgctcccagacccccgggagtcgtaggaacccgttcctggacgctgacgtcggctttcagggatccctcgccggacgccgcggagggacagagcctgggaagccgtcgccccgccccgtccccgcccccgcgcgcagcgggcccggggcgctgagacccgcgtagagcaaagcgcaaggtcccagcgccccttggatcctcggtggcagggtccgggcaagtgtcattgcgagggttcaggaagccccggcctgtgatcgtgagcggaaacccctcctggagtttccccaaagccatggacagccctagtcttcgtgagcttcaacagcctctgctggagggcacagaatgtgagacccctgcccagaagcctggcaggcatgagctggggtcccccttaagagagatagcctttgccgagtccctgaggggtttgcagttcctgtcaccgcctcttccctccgtgagcgctggcctgggggaaccaaggccccctgatgttgaggacatgtcatccagtgacagtgactcggactgggatggaggcagccgtctttcaccatttctaccccacgaccacctcggcttggctgtcttctccatgctgtgttgtttctggcccgttggcatcgctgccttctgtctagcccagaaggtcagtctgtgtgtgggacttggaggggactgggcataaaagagaaaaatgcaccacaaaaacaaagagccatatacctgaggcgggaaggtggaaggtagcccagagaacctgaactcaaatcctgagtctgccactctctgcaagattttttttgagtctcactttgtcgcccaggctggagtgcagtggtacaatctcggctcactgcaatctctgcctcttgggttcaagtgattctcctgccccagcctcctgagtagctgggattagaggcgcgcgctaccatgcctggctaatttttgaatttttaataaagacggggtttcaccacgttggccacgctggtctcgaactcctgacctcaagtgatcctcccatcttggcctcccaaagtgctgggattacaggcgtgagccacggtgcccagctctctgcaagattttgggcaagtcacttaacttccctgtgcctcactttcctcatctgtaaagtgggaataattgctacctctgggtcaatgtgagaatcaaatgagttagaatagtggcatataccattttaatgtttttatttattttttaaaatttattattattattattttttaccattttaatgtttttattaaccactcagcatccccagtgcctgacctatagtaggtgctacgtatctgcttttggaatacatgcatgaatgaatgaatgggtatgttgggtgggggagggaccaggggaagggtctgggactgaggggatgcctgggtcactgctgcccactgcctctacagaccaacaaggcttgggccaagggggacatccagggggcaggggccgcctcccgccgtgccttcctgctgggggtcctcgccgtcgggctgggcgtgtgcacgtatgcggctgccctggtgaccctggctgcctaccttgcctcccgagacccgccctagttgcccctacagccctcactgtgaaccctgaggccggcagcccagcaaatctgtgggcagagagtggagaatcttggtggatgaggctgcggcggcggcaggagcatctagaaacgggagcgagctggactggaacccttccccttcctggccaccgctcttcgggcggcagcaacctgagattaaacaccagacacccttgcagcc

SEQ ID NO: 284423 - DNA, 659 bp, Homo sapiens
tctgtggtttgtgatgcagtggggagtagggttgtgcacggagtcaattgggataaatgtgaaacccctcctggagtttccccaaagccatggacagccctagtcttcgtgagcttcaacagcctctgctggagggcacagaatgtgagacccctgcccagaagcctggcaggcatgagctggggtcccccttaagagagatagcctttgccgagtccctgaggggtttgcagttcctgtcaccgcctcttccctccgtgagcgctggcctgggggaaccaaggccccctgatgttgaggacatgtcatccagtgacagtgactcggactgggatggaggcagccgtctttcaccatttctaccccacgaccacctcggcttggctgtcttctccatgctgtgttgtttctggcccgttggcatcgctgccttctgtctagcccagaagtagttgcccctacagccctcactgtgaaccctgaggccggcagcccagcaaatctgtgggcagagagtggagaatcttggtggatgaggctgcggcggcggcaggagcatctagaaacgggagcgagctggactggaacccttccccttcctggccaccgctcttcgggcggcagcaacctgagattaaacaccagacacccttgcagcc

SEQ ID NO: 284424 - DNA, 729 bp, Homo sapiens
acttaacggttaggagaggagaaagcggcaaccggggttgtagttcatgggcttgactgcttcttttctccgcgggcgccgaccaggcctggctcgcgcctctcccaggacccgcctggctgcgagatatgaaacccctcctggagtttccccaaagccatggacagccctagtcttcgtgagcttcaacagcctctgctggagggcacagaatgtgagacccctgcccagaagcctggcaggcatgagctggggtcccccttaagagagatagcctttgccgagtccctgaggggtttgcagttcctgtcaccgcctcttccctccgtgagcgctggcctgggggaaccaaggccccctgatgttgaggacatgtcatccagtgacagtgactcggactgggatggaggcagccgtctttcaccatttctaccccacgaccacctcggcttggctgtcttctccatgctgtgttgtttctggcccgttggcatcgctgccttctgtctagcccagaagtagttgcccctacagccctcactgtgaaccctgaggccggcagcccagcaaatctgtgggcagagagtggagaatcttggtggatgaggctgcggcggcggcaggagcatctagaaacgggagcgagctggactggaacccttccccttcctggccaccgctcttcgggcggcagcaacctgagattaaacaccagacacccttgcagcc

SEQ ID NO: 284425 - DNA, 707 bp, Homo sapiens
caggctcaagatgggcaagagcaatcaattcctacggattaccaaaaaacattccccccaacagtctattggtttgctagacatggtaaacaacccactcctggaaagactttggcaaaggccacattggtttcaggagacacagtttgtgaattacgatgatatcttgtgacaagatggagggcacagaatgtgagacccctgcccagaagcctggcaggcatgagctggggtcccccttaagagagatagcctttgccgagtccctgaggggtttgcagttcctgtcaccgcctcttccctccgtgagcgctggcctgggggaaccaaggccccctgatgttgaggacatgtcatccagtgacagtgactcggactgggatggaggcagccgtctttcaccatttctaccccacgaccacctcggcttggctgtcttctccatgctgtgttgtttctggcccgttggcatcgctgccttctgtctagcccagaagtagttgcccctacagccctcactgtgaaccctgaggccggcagcccagcaaatctgtgggcagagagtggagaatcttggtggatgaggctgcggcggcggcaggagcatctagaaacgggagcgagctggactggaacccttccccttcctggccaccgctcttcgggcggcagcaacctgagattaaacaccagacacccttgcagcc

SEQ ID NO: 284426 - DNA, 970 bp, Homo sapiens
ggaaggggctgcagttctccaaggattcccgcctgctcccagacccccgggagtcgtaggaacccgttcctggacgctgacgtcggctttcagggatccctcgccggacgccgcggagggacagagcctgggaagccgtcgccccgccccgtccccgcccccgcgcgcagcgggcccggggcgctgagacccgcgtagagcaaagcgcaaggtcccagcgccccttggatcctcggtggcagggtccgggcaagtgtcattgcgagggttcaggaagccccggcctgtgatcgtgagcggaaacccctcctggagtttccccaaagccatggacagccctagtcttcgtgagcttcaacagcctctgctggagggcacagaatgtgagacccctgcccagaagcctggcaggcatgagctggggtcccccttaagagagatagcctttgccgagtccctgaggggtttgcagttcctgtcaccgcctcttccctccgtgagcgctggcctgggggaaccaaggccccctgatgttgaggacatgtcatccagtgacagtgactcggactgggatggaggcagccgtctttcaccatttctaccccacgaccacctcggcttggctgtcttctccatgctgtgttgtttctggcccgttggcatcgctgccttctgtctagcccagaagcatccccagtgcctgacctatagtaggtgctacgtatctgcttttggaatacatgcatgaatgaatgaatggtagttgcccctacagccctcactgtgaaccctgaggccggcagcccagcaaatctgtgggcagagagtggagaatcttggtggatgaggctgcggcggcggcaggagcatctagaaacgggagcgagctggactggaacccttccccttcctggccaccgctcttcgggcggcagcaacctgagattaaacaccagacacccttgcagcc

SEQ ID NO: 284427 - DNA, 923 bp, Homo sapiens
ggaaggggctgcagttctccaaggattcccgcctgctcccagacccccgggagtcgtaggaacccgttcctggacgctgacgtcggctttcagggatccctcgccggacgccgcggagggacagagcctgggaagccgtcgccccgccccgtccccgcccccgcgcgcagcgggcccggggcgctgagacccgcgtagagcaaagcgcaaggtcccagcgccccttggatcctcggtggcagggtccgggcaagtgtcattgcgagggttcaggaagccccggcctgtgatcgtgagcggaaacccctcctggagtttccccaaagccatggacagccctagtcttcgtgagcttcaacagcctctgctggagggcacagaatgtgagacccctgcccagaagcctggcaggcatgagctggggtcccccttaagagagatagcctttgccgagtccctgaggggtttgcagttcctgtcaccgcctcttccctccgtgagcgctggcctgggggaaccaaggccccctgatgttgaggacatgtcatccagtgacagtgactcggactgggatggaggcagccgtctttcaccatttctaccccacgaccacctcggcttggctgtcttctccatgctgtgttgtttctggcccgttggcatcgctgccttctgtctagcccagaaggtcagtctgtgtgtgggacttggaggggactgggcataaaagagaaaaatgcaccacaaaaacaaagacccagcaaatctgtgggcagagagtggagaatcttggtggatgaggctgcggcggcggcaggagcatctagaaacgggagcgagctggactggaacccttccccttcctggccaccgctcttcgggcggcagcaacctgagattaaacaccagacacccttgcagcc

SEQ ID NO: 284428 - DNA, 748 bp, Homo sapiens
ggaaggggctgcagttctccaaggattcccgcctgctcccagacccccgggagtcgtaggaacccgttcctggacgctgacgtcggctttcagggatccctcgccggacgccgcggagggacagagcctgggaagccgtcgccccgccccgtccccgcccccgcgcgcagcgggcccggggcgctgagacccgcgtagagcaaagcgcaaggtcccagcgccccttggatcctcggtggcagggtccgggcaagtgtcattgcgagggttcaggaagccccggcctgtgatcgtgagcggaaacccctcctggagtttccccaaagccatggacagccctagtcttcgtgagcttcaacagcctctgctggagggcacagaatgtgagacccctgcccagaagcctggcaggcatgagctggggtcccccttaagagagatagcctttgccgagtccctgaggggtttgcagttcctgtcaccgcctcttccctccgtgagcgctggcctgggggaaccaaggccccctgatgttgagtagttgcccctacagccctcactgtgaaccctgaggccggcagcccagcaaatctgtgggcagagagtggagaatcttggtggatgaggctgcggcggcggcaggagcatctagaaacgggagcgagctggactggaacccttccccttcctggccaccgctcttcgggcggcagcaacctgagattaaacaccagacacccttgcagcc

SEQ ID NO: 284429 - DNA, 377 bp, Homo sapiens
aataggagagagtgccggggtgcatgtgtgcgtgtgtgcacaggtgtctgtggtttgtgatgcagtggggagtagggttgtgcacggagtcaattgggataaatgtgtaagaaggttggggacctgaaaggggtgttttctgggagctgatgttttggggcaaatattcaaggagtcctttgggagatgaatgtgtggaggtggaggctgggcttgcctagatggggctgtgtggcaggggacttcggggggcaggtctaggggacagaggatggggaatgtagactagagtgcagttccaggcagcactgggggtaggggatgggtgtgtgtgtgactgggaggggtgcctgggcctggataggtggtcacgcggt

SEQ ID NO: 284430 - DNA, 815 bp, Homo sapiens
tctgtggtttgtgatgcagtggggagtagggttgtgcacggagtcaattgggataaatgtgaaacccctcctggagtttccccaaagccatggacagccctagtcttcgtgagcttcaacagcctctgctggagggcacagaatgtgagacccctgcccagaagcctggcaggcatgagctggggtcccccttaagagagatagcctttgccgagtccctgaggggtttgcagttcctgtcaccgcctcttccctccgtgagcgctggcctgggggaaccaaggccccctgatgttgaggacatgtcatccagtgacagtgactcggactgggatggaggcagccgtctttcaccatttctaccccacgaccacctcggcttggctgtcttctccatgctgtgttgtttctggcccgttggcatcgctgccttctgtctagcccagaagaccaacaaggcttgggccaagggggacatccagggggcaggggccgcctcccgccgtgccttcctgctgggggtcctcgccgtcgggctgggcgtgtgcacgtatgcggctgccctggtgaccctggctgcctaccttgcctcccgagacccgccctagttgcccctacagccctcactgtgaaccctgaggccggcagcccagcaaatctgtgggcagagagtggagaatcttggtggatgaggctgcggcggcggcaggagcatctagaaacgggagcgagctggactggaacccttccccttcctggccaccgctcttcgggcggcagcaacctgagattaaacaccagacacccttgcagcc

SEQ ID NO: 284431 - DNA, 930 bp, Homo sapiens
cgctcaccaaactgcacaggtgcgaccctgcttccctcctggtcataactttcatgttactattgcttgggataatgttaagtaaaaatagcagacactgagttttaagtctcaagtggatgaaggcagaagcaggaagcagaaaatagtcggagagacaaaaaccaggagacccatgcgtggacagaaagactaacggagacgaaaagaaagaggcagatggggagacacgtgcgagacgagacacatgtgcatttgttggggagaagaggattggaggtgtcagtgttaaaggaacctctacaacgaaggtgaagccacggaagataaggaaacccctcctggagtttccccaaagccatggacagccctagtcttcgtgagcttcaacagcctctgctggagggcacagaatgtgagacccctgcccagaagcctggcaggcatgagctggggtcccccttaagagagatagcctttgccgagtccctgaggggtttgcagttcctgtcaccgcctcttccctccgtgagcgctggcctgggggaaccaaggccccctgatgttgaggacatgtcatccagtgacagtgactcggactgggatggaggcagccgtctttcaccatttctaccccacgaccacctcggcttggctgtcttctccatgctgtgttgtttctggcccgttggcatcgctgccttctgtctagcccagaagtagttgcccctacagccctcactgtgaaccctgaggccggcagcccagcaaatctgtgggcagagagtggagaatcttggtggatgaggctgcggcggcggcaggagcatctagaaacgggagcgagctggactggaacccttccccttcctggccaccgctcttcgggcggcagcaacctgagattaaacaccagacacccttgcagcc

SEQ ID NO: 284432 - DNA, 969 bp, Homo sapiens
tctgtggtttgtgatgcagtggggagtagggttgtgcacggagtcaattgggataaatgtgaaacccctcctggagtttccccaaagccatggacagccctagtcttcgtgagcttcaacagcctctgctggagggcacagaatgtgagacccctgcccagaagcctggcaggcatgagctggggtcccccttaagagagatagcctttgccgagtccctgaggggtttgcagttcctgtcaccgcctcttccctccgtgagcgctggcctgggggaaccaaggccccctgatgttgaggacatgtcatccagtgacagtgactcggactgggatggaggcagccgtctttcaccatttctaccccacgaccacctcggcttggctgtcttctccatgctgtgttgtttctggcccgttggcatcgctgccttctgtctagcccagaagcatccccagtgcctgacctatagtaggtgctacgtatctgcttttggaatacatgcatgaatgaatgaatgggtatgttgggtgggggagggaccaggggaagggtctgggactgaggggatgcctgggtcactgctgcccactgcctctacagaccaacaaggcttgggccaagggggacatccagggggcaggggccgcctcccgccgtgccttcctgctgggggtcctcgccgtcgggctgggcgtgtgcacgtatgcggctgccctggtgaccctggctgcctaccttgcctcccgagacccgccctagttgcccctacagccctcactgtgaaccctgaggccggcagcccagcaaatctgtgggcagagagtggagaatcttggtggatgaggctgcggcggcggcaggagcatctagaaacgggagcgagctggactggaacccttccccttcctggccaccgctcttcgggcggcagcaacctgagattaaacaccagacacccttgcagcc

SEQ ID NO: 284433 - DNA, 1054 bp, Homo sapiens
ggaaggggctgcagttctccaaggattcccgcctgctcccagacccccgggagtcgtaggaacccgttcctggacgctgacgtcggctttcagggatccctcgccggacgccgcggagggacagagcctgggaagccgtcgccccgccccgtccccgcccccgcgcgcagcgggcccggggcgctgagacccgcgtagagcaaagcgcaaggtcccagcgccccttggatcctcggtggcagggtccgggcaagtgtcattgcgagggttcaggaagccccggcctgtgatcgtgagcggaaacccctcctggagtttccccaaagccatggacagccctagtcttcgtgagcttcaacagcctctgctggagggcacagaatgtgagacccctgcccagaagcctggcaggcatgagctggggtcccccttaagagagatagcctttgccgagtccctgaggggtttgcagttcctgtcaccgcctcttccctccgtgagcgctggcctgggggaaccaaggccccctgatgttgaggacatgtcatccagtgacagtgactcggactgggatggaggcagccgtctttcaccatttctaccccacgaccacctcggcttggctgtcttctccatgctgtgttgtttctggcccgttggcatcgctgccttctgtctagcccagaagaccaacaaggcttgggccaagggggacatccagggggcaggggccgcctcccgccgtgccttcctgctgggggtcctcgccgtcgggctgggcgtgtgcacgtatgcggctgccctggtgaccctggctgcctaccttgcctcccgagacccgccctagttgcccctacagccctcactgtgaaccctgaggccggcagcccagcaaatctgtgggcagagagtggagaatcttggtggatgaggctgcggcggcggcaggagcatctagaaacgggagcgagctggactggaacccttccccttcctggccaccgctcttcgggcggcagcaacctgagattaaacaccagacacccttgcagcc

SEQ ID NO: 284434 - DNA, 937 bp, Homo sapiens
ggaaggggctgcagttctccaaggattcccgcctgctcccagacccccgggagtcgtaggaacccgttcctggacgctgacgtcggctttcagggatccctcgccggacgccgcggagggacagagcctgggaagccgtcgccccgccccgtccccgcccccgcgcgcagcgggcccggggcgctgagacccgcgtagagcaaagcgcaaggtcccagcgccccttggatcctcggtggcagggtccgggcaagtgtcattgcgagggttcaggaagccccggcctgtgatcgtgagcggaaacccctcctggagtttccccaaagccatggacagccctagtcttcgtgagcttcaacagcctctgctggagggcacagaatgtgagacccctgcccagaagcctggcaggcatgagctggggtcccccttaagagagatagcctttgccgagtccctgaggggtttgcagttcctgtcaccgcctcttccctccgtgagcgctggcctgggggaaccaaggccccctgatgttgaggacatgtcatccagtgacagtgactcggactgggatggaggcagccgtctttcaccatttctaccccacgaccacctcggcttggctgtcttctccatgctgtgttgtttctggcccgttggcatcgctgccttctgtctagcccagaaggtcagtctgtgtgtgggacttggaggggactgggcataaaagagaaaaatgcaccacaaaaacaaagagccatatacctgaggcgggaaggtggaaggtagcccagagaacctgaactcaaatcctgagtctgccactctctgcaagattttttttgagtctcactttgtcgcccaggctggagtgcatgagccgagatcgcgccactgcactccagcctgggcaacagagcgagactctgtctcaaaa

SEQ ID NO: 284435 - DNA, 5373 bp, Homo sapiens
  misc_feature (27)..(27): n is a, c, g, or t
  misc_feature (29)..(29): n is a, c, g, or t
  misc_feature (108)..(108): n is a, c, g, or t
  misc_feature (126)..(126): n is a, c, g, or t
  misc_feature (157)..(157): n is a, c, g, or t
  misc_feature (174)..(174): n is a, c, g, or t
  misc_feature (215)..(215): n is a, c, g, or t
  misc_feature (245)..(245): n is a, c, g, or t
  misc_feature (864)..(864): n is a, c, g, or t
  misc_feature (891)..(892): n is a, c, g, or t
  misc_feature (896)..(896): n is a, c, g, or t
  misc_feature (926)..(926): n is a, c, g, or t
  misc_feature (938)..(938): n is a, c, g, or t
  misc_feature (942)..(942): n is a, c, g, or t
  misc_feature (961)..(961): n is a, c, g, or t
  misc_feature (967)..(967): n is a, c, g, or t
  misc_feature (990)..(990): n is a, c, g, or t
  misc_feature (1001)..(1002): n is a, c, g, or t
  misc_feature (1016)..(1016): n is a, c, g, or t
  misc_feature (1063)..(1063): n is a, c, g, or t
  misc_feature (1427)..(1427): n is a, c, g, or t
  misc_feature (1433)..(1433): n is a, c, g, or t
  misc_feature (1463)..(1463): n is a, c, g, or t
  misc_feature (1473)..(1473): n is a, c, g, or t
  misc_feature (1542)..(1542): n is a, c, g, or t
  misc_feature (1566)..(1567): n is a, c, g, or t
ctctgtcgcccaggctggagtgcagtngngtgatctcggctcactgcaagctccacctcctgggttcacgccattctcctgcctcagccttccgagtagcttggactncaggcacccaccaccacncccagctaatttttttgtattttttttagtngagacggggttttaccntgttggccaggatggtcttgatctcctgacctcatgatccncctgcctcggcctcacaagtgctgggattncaggtatgagccaccacgcccggccaggcatttctttatagcaatgccaggatggtgtgccagactgtatcagagacaagtgatacaaagatgaccaagatacagtacttgcccaggaagaagaattcctgtggccacctctgtcttatatcaagagataagtgtgaaacagagtatccacaacagtgtttgggaagacagtgtgagtggctcccaactctaccaacaaaggcttcaaaggagtaatgacatttgaattgagtcttaaaggataaatgtattacttggcctgacaacacagaagaaaaggtcatttttgtcaaagaaatcaaccttgaaaaaatgccgcagttcatgacttgtaccagtgaaggtagcaaggtctgtgtgttggtgatgaatttgcaggggatcaggctgaagaaacaagacttgggagagaggatgtgagacctttttatgacatgcatagagttggcacctcagcctttgcatggtagggagctagctgaaggctacctccatgacagatgtacactttgaaaagacaggccgggtgcggtggctcacgtctgtaatcccagcattttgggaggctgaggtgggcaaatcacttgangtcaggagttagagatcagcctggccnncacngtgaaacctggtctctactaaaaaaaatanaataattagccnggcntggtggcgcacacctgtantcccanctattcgggaggctgaggcagangaattgcttgnncacgggaggcggangttgcagtgagctgagatggcaccaccgcactccagcctgggcgacngatcaagactccatctcaaaataaaggaagatacagctaatctatatttctttcaccagagatcaccaccactaacaattcatactggtcgtttttccctgaatgttttacctatgtaggaaaattttacatcccaatttttaatttaacactatgaaaagcatttctttttataataaagacactctattagtatacttttgatggcttcaaaactacttttgtatagatgcaaaattaaaatatcaaattgtttcttttgtttgtttgtttttttgttttttttttgagacagagtctcactctgtcgcccaggctaaagcacagtggcatgatctcggctcactgcaagcttttcctcccnggttanagtgattctcatgccgcagcctcccgagangctgggactncaggtgtgcaccaccacccccggctaattttttgtatttttacaaaacacaaagagagacggggtttcnccatgttgggcaggctggtctcannctcctgacctcaggtgatccgcctgcctcagcctcccaaagtgctgggattgcaggcgtgggccaccgtgccctgcctcaaattgtttctttaatggttgttcccaaattttcataaataactttttacgtaacatttttgggcataaagttgtctaaaattattttcataggctagataccttaagtacacttaatgatttaaatcatacttaacattaagactttaatgttgctatattgatatttagtaaaagtacaaaacttgtgctttagagtttagacatattcaggatataagatagttttgttggatttggcgaacacttgccctaggagaataaaaaatgatgaattagtccaaaatgttccagttttctaatttgtcagactcggtaaatggtatcatcaccaaccaagaaaaacagaagatacagggagagtagattttgcagaaaagataaggagttctgtttgggacttgctgcctttgatatactgcactgggagaaaatccaagtcgaacagagtggacaagtgagaatgtgctgtggaatcaacaagaggggtggggagtctacctacctagatttgagagcagtttggcaaataattgttagtaaatgtcatagaaattcgtgggagagagaagttgataagaacagaggggtaaaggatgaaacagaggaaacactgccgcttctcagggttgggtacaagagaagccagggaaatagactaagaaagagtgatcagggaaaccgggagacagtgttgtcacggaagcctggagtgtgagattttccagaaaagaaggaatgaaagaatgaatggtctgtagatccattactcagcactatcagacacattgtccccttttgatatcccataatgaaatttatagataatataatctacttgtgcacaaaattttagaaattaatataatgccccaactataatataaagtgtattagtcagggttctctagagggacagaactaataggatatatatatataaaggggagtttataaagtattaacttacactattacaaggtcccacaataggctgtctgcaagcttgaggagcagagagccaggctgagtctcaacactgaagaacttggagtccgatgttcgagggcaggaaaaatccagcacaggagaaagacgcaggctgggaggctaggccagtctctcctttccatgttcctctgcctgctttatattcactggcagctgattggattgtgcccaccagattaagggtggatctgccttccccagcccactgactcaagtattaatctcttttgacaacaccctcacagacacacccaggatcaatatttgtatccttcaatccaattaagctgacactcagaattaaccatcacataaaggaagaagtaaaaggaaagtatattttatataataagtatttaaatatgtaaacattgggacatgactaaaactgactgaacacattgaaggagtcacttggttggtctgatgtgcagaattaccatgcatgctacaaatggagaggggtctacatgagctgtattgcttgtggtgccgcagatgacttgaatttccagaatgaaaatccattcctcgctgccgaagaattaacaggatgctctccaatgaatccctccatcctcctgccttcagccgttccaactcagaagcctccgtagacagcgcctccatggaggatttctggcgggaaatagaaagtattaaagacagcagcatgggagggcaagaagagccaccgccagctgaggtcacacctgtggatgaaggagaacttgaagcagaatggctgcaagatgtgggtttatcaactctgatctcaggtgatgaagaggaagatggcaaagccttgctctccacattgactcgaacccaagcagctgccgtgcaaaagagataccatacctatacccaaaccatgaggaaaaaggataagcaatctatcagggatgtcagagacatttttggagtcagtgaatctcctcctcgtgatacctgtggcaaccacactaatcagctggatggcaccaaggaagaaagagagcttccaagagttatcaagacaagtggttccatgccagatgatgcttctctcaacagtactaccctgtctgacgcatcccaggataaagaagggagttttgcggttcccaggagtgactctgtggctatacttgagaccattccagttctaccagttcattccaatggatcaccggagcctggacagccagttcagaatgcgataagtgatgatgattttctggaaaagaacattccaccagaggctgaagagctgtcatttgaagtgtcttattcagaaatggttacggaggctctaaaaagaaataaacttaagaaatcagagattaagaaagaagactatgttttaactaaatttaatgttcagaaaaccagatttggcttaactgaagcaggagatctgtctgctgaagacatgaagaaaatccgccatctctctctgattgaattgactgccttttttgatgcctttggaattcaactgaaaaggaacaaaacagagaaagtaaaaggacgagacaatgggatttttggagttccacttacagtcctcctggacggtgaccgaaagaaagaccctggagtgaaagttcccctggtattacaaaaattttttgagaaagttgaggaatcaggtctggaatctgaaggaatttttcgactttcaggatgtactgctaaagtcaagcaataccgtgaagaacttgatgccaagtttaatgctgataaatttaaatgggacaaaatgtgccatagagaagctgcagtaatgttgaaagcgtttttcagagaactacccacctctctcttccctgtggaatatatacctgccttcatcagtctaatggaaagagggcctcacgtcaaagtacagtttcaagccttacacctcatggtcatggcgctgcctgatgccaacagagatgcagctcaggccctcatgacattcttcaataaagtgattgccaatgaatcaaaaaaccgaatgagtctgtggaacatttctacagtgatggcaccgaaccttttcttcagtagaagcaaacactctgattatgaagaattactgttagcaaacactgcggcccacatcatccgcctaatgcttaagtaccagaagattttgtggaaggttccgtctttcttaatcactcaagtaagaagaatgaatgaagccacgatgctattgaagaagcagctcccaagtgtcaggaagctgctcaggaggaagaccctcgagcgggagactgcaagccccaagacttcaaaggtactgcaaaaatcaccctcggcaagacgaatgtctgacgtgccggaaggagtcatacgggtccatgctccacttctctccaaggtgtccatggccattcaactcaacaatcaaaccaaagccaaagacatattggcaaaatttcaatatgaaaacagaatactgcactggcagcgagctgcactttccttcctaaatggaaaatgggttaaaaaagaaagagaagagtcgacagagaccaacaggagccccaaacatgtattcctcttcactattggcctggacatctccacataggcagtcatatagagacttgaaatatcattcaagggatttgggtatccagtagacttttagttacatatactacaaaactgactttgtactctcaagtagacctttcgtagaaagaaaatgtttctaataaaaatgtattagaactaatga

SEQ ID NO: 284436 - DNA, 2054 bp, Homo sapiens
agcggagtattgccagagaacaggagaggaggagagtatggtataagcatgtccagaaataaggagaacttgaagcagaatggctgcaagatgtgggtttatcaactctgatctcaggtgatgaagaggaagatggcaaagccttgctctccacattgactcgaacccaagcagctgccgtgcaaaagagataccatacctatacccaaaccatgaggaaaaaggataagcaatctatcagggatgtcagagacatttttggagtcagtgaatctcctcctcgtgatacctgtggcaaccacactaatcagctggatggcaccaaggaagaaagagagcttccaagagttatcaagacaagtggttccatgccagatgatgcttctctcaacagtactaccctgtctgacgcatcccaggataaagaagggagttttgcggttcccaggagtgactctgtggctatacttgagaccattccagttctaccagttcattccaatggatcaccggagcctggacagccagttcagaatgcgataagtgatgatgattttctggaaaagaacattccaccagaggctgaagagctgtcatttgaagtgtcttattcagaaatggttacggaggctctaaaaagaaataaacttaagaaatcagagattaagaaagaagactatgttttaactaaatttaatgttcagaaaaccagatttggcttaactgaagcaggagatctgtctgctgaagacatgaagaaaatccgccatctctctctgattgaattgactgccttttttgatgcctttggaattcaactgaaaaggaacaaaacagagaaagtaaaaggacgagacaatgggatttttggagttccacttacagtcctcctggacggtgaccgaaagaaagaccctggagtgaaagttcccctggtattacaaaaattttttgagaaagttgaggaatcaggtctggaatctgaaggaatttttcgactttcaggatgtactgctaaagtcaagcaataccgtgaagaacttgatgccaagtttaatgctgataaatttaaatgggacaaaatgtgccatagagaagctgcagtaatgttgaaagcgtttttcagagaactacccacctctctcttccctgtggaatatatacctgccttcatcagtctaatggaaagagggcctcacgtcaaagtacagtttcaagccttacacctcatggtcatggcgctgcctgatgccaacagagatgcagctcaggccctcatgacattcttcaataaagtgattgccaatgaatcaaaaaaccgaatgagtctgtggaacatttctacagtgatggcaccgaaccttttcttcagtagaagcaaacactctgattatgaagaattactgttagcaaacactgcggcccacatcatccgcctaatgcttaagtaccagaagattttgtggaaggttccgtctttcttaatcactcaagtaagaagaatgaatgaagccacgatgctattgaagaagcagctcccaagtgtcaggaagctgctcaggaggaagaccctcgagcgggagactgcaagccccaagacttcaaaggtactgcaaaaatcaccctcggcaagacgaatgtctgacgtgccggaaggagtcatacgggtccatgctccacttctctccaaggtgtccatggccattcaactcaacaatcaaaccaaagccaaagacatattggcaaaatttcaatatgaaaacagaatactgcactggcagcgagctgcactttccttcctaaatggaaaatgggttaaaaaagaaagagaagagtcgacagagaccaacaggagccccaaacatgtattcctcttcactattggcctggacatctccacataggcagtcatatagagacttgaaatatcattcaagggatttgggtatccagtagacttttagttacatatactacaaaactgactttgtactctcaagtagacctttcgtagaaagaaaatgtttctaataaaaatgtattagaactaatga

SEQ ID NO: 284437 - DNA, 2132 bp, Homo sapiens
agcggagtattgccagagaacaggagaggaggagagtatggtataagcatgtccagaaatgaaactcgtttgtactggcagatgctataagaagagagccctgactggaaataagctaggttcaggtgtgttggccagaaggagaacttgaagcagaatggctgcaagatgtgggtttatcaactctgatctcaggtgatgaagaggaagatggcaaagccttgctctccacattgactcgaacccaagcagctgccgtgcaaaagagataccatacctatacccaaaccatgaggaaaaaggataagcaatctatcagggatgtcagagacatttttggagtcagtgaatctcctcctcgtgatacctgtggcaaccacactaatcagctggatggcaccaaggaagaaagagagcttccaagagttatcaagacaagtggttccatgccagatgatgcttctctcaacagtactaccctgtctgacgcatcccaggataaagaagggagttttgcggttcccaggagtgactctgtggctatacttgagaccattccagttctaccagttcattccaatggatcaccggagcctggacagccagttcagaatgcgataagtgatgatgattttctggaaaagaacattccaccagaggctgaagagctgtcatttgaagtgtcttattcagaaatggttacggaggctctaaaaagaaataaacttaagaaatcagagattaagaaagaagactatgttttaactaaatttaatgttcagaaaaccagatttggcttaactgaagcaggagatctgtctgctgaagacatgaagaaaatccgccatctctctctgattgaattgactgccttttttgatgcctttggaattcaactgaaaaggaacaaaacagagaaagtaaaaggacgagacaatgggatttttggagttccacttacagtcctcctggacggtgaccgaaagaaagaccctggagtgaaagttcccctggtattacaaaaattttttgagaaagttgaggaatcaggtctggaatctgaaggaatttttcgactttcaggatgtactgctaaagtcaagcaataccgtgaagaacttgatgccaagtttaatgctgataaatttaaatgggacaaaatgtgccatagagaagctgcagtaatgttgaaagcgtttttcagagaactacccacctctctcttccctgtggaatatatacctgccttcatcagtctaatggaaagagggcctcacgtcaaagtacagtttcaagccttacacctcatggtcatggcgctgcctgatgccaacagagatgcagctcaggccctcatgacattcttcaataaagtgattgccaatgaatcaaaaaaccgaatgagtctgtggaacatttctacagtgatggcaccgaaccttttcttcagtagaagcaaacactctgattatgaagaattactgttagcaaacactgcggcccacatcatccgcctaatgcttaagtaccagaagattttgtggaaggttccgtctttcttaatcactcaagtaagaagaatgaatgaagccacgatgctattgaagaagcagctcccaagtgtcaggaagctgctcaggaggaagaccctcgagcgggagactgcaagccccaagacttcaaaggtactgcaaaaatcaccctcggcaagacgaatgtctgacgtgccggaaggagtcatacgggtccatgctccacttctctccaaggtgtccatggccattcaactcaacaatcaaaccaaagccaaagacatattggcaaaatttcaatatgaaaacagaatactgcactggcagcgagctgcactttccttcctaaatggaaaatgggttaaaaaagaaagagaagagtcgacagagaccaacaggagccccaaacatgtattcctcttcactattggcctggacatctccacataggcagtcatatagagacttgaaatatcattcaagggatttgggtatccagtagacttttagttacatatactacaaaactgactttgtactctcaagtagacctttcgtagaaagaaaatgtttctaataaaaatgtattagaactaatga

SEQ ID NO: 284438 - DNA, 1941 bp, Homo sapiens
agcggagtattgccagagaacaggagaggaggagagtatggtataagcatgtccagaaataaggagaacttgaagcagaatggctgcaagatgtgggtttatcaactctgatctcaggtgatgaagaggaagatggcaaagccttgctctccacattgactcgaacccaagcagctgccgtgcaaaagagataccatacctatacccaaaccatgaggaaaaaggataagcaatctatcagggatgtcagagacatttttggagtcagtgaatctcctcctcgtgatacctgtggcaaccacactaatcagctggatggcaccaaggaagaaagagagcttccaagagttatcaagacaagtggttccatgccagatgatgcttctctcaacagtactaccctgtctgacgcatcccaggataaagaagggagttttgcggttcccaggagtgactctgtggctatacttgagaccattccagttctaccagttcattccaatggatcaccggagcctggacagccagttcagaatgcgataagtgatgatgattttctggaaaagaacattccaccagaggctgaagagctgtcatttgaagtgtcttattcagaaatggttacggaggctctaaaaagaaataaacttaagaaatcagagattaagaaagaagactatgttttaactaaatttaatgttcagaaaaccagatttggcttaactgaagcaggagatctgtctgctgaagacatgaagaaaatccgccatctctctctgattgaattgactgccttttttgatgcctttggaattcaactgaaaaggaacaaaacagagaaagtaaaaggacgagacaatgggatttttggagttccacttacagtcctcctggacggtgaccgaaagaaagaccctggagtgaaagttcccctggtattacaaaaacaataccgtgaagaacttgatgccaagtttaatgctgataaatttaaatgggacaaaatgtgccatagagaagctgcagtaatgttgaaagcgtttttcagagaactacccacctctctcttccctgtggaatatatacctgccttcatcagtctaatggaaagagggcctcacgtcaaagtacagtttcaagccttacacctcatggtcatggcgctgcctgatgccaacagagatgcagctcaggccctcatgacattcttcaataaagtgattgccaatgaatcaaaaaaccgaatgagtctgtggaacatttctacagtgatggcaccgaaccttttcttcagtagaagcaaacactctgattatgaagaattactgttagcaaacactgcggcccacatcatccgcctaatgcttaagtaccagaagattttgtggaaggttccgtctttcttaatcactcaagtaagaagaatgaatgaagccacgatgctattgaagaagcagctcccaagtgtcaggaagctgctcaggaggaagaccctcgagcgggagactgcaagccccaagacttcaaaggtactgcaaaaatcaccctcggcaagacgaatgtctgacgtgccggaaggagtcatacgggtccatgctccacttctctccaaggtgtccatggccattcaactcaacaatcaaaccaaagccaaagacatattggcaaaatttcaatatgaaaacagtcatggttcatcagaatgtattaagattcagaaccaaaggttatatgaaattggaggaaatataggagagcattgcttggatccagatgcttatatattggatgtatatcgtataaatcctcaagcagaatgggtgattaaaccccaacaaagttcttaaaatatcctcgagagagctgctatcatgtattatatgccaaaaagatcctacattttggtagggaaaaaacaacactgtgtttgacgtatttgtt

SEQ ID NO: 284439 - DNA, 1252 bp, Homo sapiens
agcggagtattgccagagaacaggagaggaggagagtatggtataagcatgtccagaaataaggagaacttgaagcagaatggctgcaagatgtgggtttatcaactctgatctcaggtgatgaagaggaagatggcaaagccttgctctccacattgactcgaacccaagcagctgccgtgcaaaagagataccatacctatacccaaaccatgaggaaaaaggataagcaatctatcagggatgtcagagacatttttggagtcagtgaatctcctcctcgtgatacctgtggcaaccacactaatcagctggatggcaccaaggaagaaagagagcttccaagagttatcaagacaagtggttccatgccagatgatgcttctctcaacagtactaccctgtctgacgcatcccaggataaagaagggagttttgcggttcccaggagtgactctgtggctatacttgagaccattccagttctaccagttcattccaatggatcaccggagcctggacagccagttcagaatgcgataagtgatgatgattttctggaaaagaacattccaccagaggctgaagagctgtcatttgaagtgtcttattcagaaatggttacggaggctctaaaaagaaataaacttaagaaatcagagattaagaaagaagactatgttttaactaaatttaatgttcagaaaaccagatttggcttaactgaagcaggagatctgtctgctgaagacatgaagaaaatccgccatctctctctgattgaattgactgccttttttgatgcctttggaattcaactgaaaaggaacaaaacagagaaagtaaaaggacgagacaatgggatttttggagttccacttacagtcctcctggacggtgaccgaaagaaagaccctggagtgaaagttcccctggtattacaaaaattttttgagaaagttgaggaatcaggtctggaatctgaaggaatttttcgactttcaggatgtactgctaaagtcaagcaataccgtgaagaacttgatgccaagtttaatgctgataaatttaaatgggacaaaatgtgccatagagaagctgcagtaatgttgaaagcgtttttcagagaactacccacctctctcttccctgtggaatatatacctgccttcatcagtctaatggaaagtaggtggaagacgttatatgtgaatacgctaagatataaggtcaataaagtgagagcagaaga

SEQ ID NO: 284440 - DNA, 755 bp, Homo sapiens
atgaccaaaatcagcttccatgcatgaggatgatggcagctcaactcaacggccatacttaccaccttcctccaacccagggagacctgcctttttgtccttcacctgagcagtgctttcttcccaaagcttactcttatccttttccttttcttctgcagaaacatgtttcccggacttctcagataaaccctctgcaatctcttgggttcctttctccgttccttctttaagaacattctcaaagctttcgtctattggcatcggcttggtctccacatctgcttttgttatttcttggtcttcaatttcaatttctaaggattcctcaattggaagtgacacctccccatcctgacttgatgatttcttcatggagcagtggaaagaacgtagtccagaaattagaaggttttggtccatggcacagctgagcactgacaacacatccttccctgggcttattccatctgagagggagatgcacatgtatgatttcttctacggtcattctgaagatcggtgtcatcaataatttgggcttgggactatccagtttcacaggggcattcagttgattgaaaatccaatatcactattgtttatagtatcaaaacaatctaccgatcaaagtctctaaaattactacaaaaacctatttgatatcctatggcattgcccaatttaaattatttataaaatatgcagtaaatgtgtatgccagaaaatcaatgtcctaggcattgactcctaat

SEQ ID NO: 284441 - DNA, 1544 bp, Homo sapiens
  misc_feature (1232)..(1232): n is a, c, g, or t
  misc_feature (1237)..(1237): n is a, c, g, or t
  misc_feature (1372)..(1372): n is a, c, g, or t
  misc_feature (1402)..(1402): n is a, c, g, or t
  misc_feature (1529)..(1530): n is a, c, g, or t
ccagccgcccggcaccggcggagagcgcctccccgctcacctgtcgggccttgcccagggccctcgcgctggtcttggccgtcctgccgcctcctgggccaccacatcgccacagcaaggccagcggcctggccaccgctctactgccggccgccgccagcagccggtaccacatccccagacccagatcccgcgccgcccgggcgcgcgcatgcgcaatgggagagcggtcctagggccccgcgagcgcagggaggactcgcgcaggcgcggcaggggcgcggcgccggctggggccccgtcttgggtgtccacgccgtcgcctgaccgttcgagggtttgatcgccagcgcagcctcgccctgcccagacagctgggccctaaggggatagccagcgcctttagacttatcttaaatcgggcatctgcatcaacacttatttctggggtcctccatggaaagcagctcccgaaacaacacccgcccggtccgccctccgctgcactggaaaaccgcccctggacgtttctgccgcagtgtccccctcacggagttccgtttgtctgcttggtcggttgttctctggagccccaggacccaggccgcttgtatgtgcctgcggccgcacggccccaacacgcggacttcgagcggtaccgggagacccgcgcggcctcctcggagtggacagtgaagcagcagctgggctaggcagtggggctgggcctgcccatggggacccgtccacgtctccaggacatcagcctgagcctcttcgcagcctcgttttctgttgaccgagttctgcaaggggacgtagaggaaccacagcgttcttgcgcttgagaccgctgtgattttctgacattttggaggcagaaatgcctggggaaaggcccacagatgcaactgtcatccctagtgccaaaagggaacggaaagcgattacccttgacctcaaattggaagtgttacgacgatttgaagcgggtgagaagctcagtcagatcgcaaaggccttagatcttgctatctctacagtggcgaccattcgagatagtaaagaaaaaatcaaagcgagttcacaaatagctactcctctgagagcctctcggttgactcgccatcgaagtgcagtgatggagagcatggagcagctgctgagcttgtggctggaagaccagagccagccaaatgcgaccttgacgcgcatcgtaggagaagctagtngtgcntacgcggacatgcgaggtctaaacgaaggtcatgcagcagggtgctgagatcaggatgcctgttgcacttagatacagcagtcagacaggatgcacgatgtgaagtatgagaggagcacccaggctacgatgacngactgtgagtgcaggactattcagaaatgngcagtagtcaaactagcttttgagcatgactatacttggctaaccagtaggtacatcgatgcaaagtgcagttaaggtttggaaagcaatcaagcttaggctatgtataagaaacgcgcggacttgnngttggataaggggc

SEQ ID NO: 284442 - DNA, 3035 bp, Homo sapiens
ccagccgcccggcaccggcggagagcgcctccccgctcacctgtcgggccttgcccagggccctcgcgctggtcttggccgtcctgccgcctcctgggccaccacatcgccacagcaaggccagcggcctggccaccgctctactgccggccgccgccagcagccggtaccacatccccagacccagatcccgcgccgcccgggcgcgcgcatgcgcaatgggagagcggtcctagggccccgcgagcgcagggaggactcgcgcaggcgcggcaggggcgcggcgccggctggggccccgtcttgggtgtccacgccgtcgcctgaccgttcgagggtttgatcgccagcgcagcctcgccctgcccagacagctgggccctaaggggatagccagcgcctttagacttatcttaaatcgggcatctgcatcaacacttatttctggggtcctccatggaaagcagctcccgaaacaacacccgcccggtccgccctccgctgcactggaaaaccgcccctggacgtttctgccgcagtgtccccctcacggagttccgtttgtctgcttggtcggttgttctctggagccccaggacccaggccgcttgtatgtgcctgcggccgcacggccccaacacgcggacttcgagcggtaccgggagacccgcgcggcctcctcggagtggacagtgaagcagcagctgggctaggcagtggggctgggcctgcccatggggacccgtccacgtctccaggacatcagcctgagcctcttcgcagcctcgttttctgttgaccgagttctgcaaggggacgtagaggaaccacagcgttcttgcgcttgagaccgctgtgattttctgacattttggaggcagaaatgcctggggaaaggcccacagatgcaactgtcatccctagtgccaaaagggaacggaaagcgattacccttgacctcaaattggaagtgttacgacgatttgaagcgggtgagaagctcagtcagatcgcaaaggccttagatcttgctatctctacagtggcgaccattcgagatagtaaagaaaaaatcaaagcgagttcacaaatagctactcctctgagagcctctcggttgactcgccatcgaagtgcagtgatggagagcatggagcagctgctgagcttgtggctggaagaccagagccagccaaatgcgaccttgagcgccgccatcgttcaggagaaggctgagtttgatgacttacagcgtgaacatggcgaaggttctcaaacggagaggtttcatgcaagtcaagggtggcttgtgagattcaaggagtgccactgtttgccccacttcaagatgaacagcgcagctcccagcaacaaggacatgtacacagaaatgctgaaaagcatcatcgaagaaggtgagtacaccccccaggtgtctttaacgtagatgagacgagacttgattggaagagaatgcccaaaggaacgtttatttccgaggaagagaatgctgagccagggtttaagtcatccaaagatcgcttgatgctgctgcttggtggcagtgcagctggggactttaagttgaagcccttactggtgtaccgctcagaaacccgcaaggctctgaagggttcttgaagcccagtttgcccgtgatttggcgctccaacagaaaggcttgggtgaccaggagcatctttcatgaatggttcacttactttttttgccgttgaaaaatacagtgcccaaaataatctcaccaacaaagcactgctcatactagacagtgcgtcatgccactctgtaaatttgagcgacctttctgataactaagagtagaataccttcaggccaggcgcggtggctcacgcctgtaatcccagcactttgggaggccgagacgggcggatcacctgaggtcaggagttcgagaccagcctcaacatggagaaaccccgtctctactaaaaatacaaatttagccgggcgtggtggtgcaggcctgtaatcccagctactcgggaggctaaagcaggagaattgcttgaacctgggaggcggaggttgtggtgagccgagatcgcgccattgcactccatcctggacaacaggagtgaaactccgtctcaaaaaaaaaaaagaaaaaaaagaagtacaagagtataataccttcatgacagtacagctgactcaatccggaccacgtgtcaaggtgtaatctcgaccttgaaagctcattatctgagaaggacttttcagcacatcctagaagcagcggatggtgaggacacagctatgatcagggaattttggagaaactacagcatcatggatgctgtggacatggccatcgcatgggaggagctcaaaccagcactaatgaacagcatgtggaagaagatttggcctgagtgtgttcaggcccagcgtttttcccaggcagataacattgcacagcttcaaaaaaacattgtgacccttgccagaaatgtggcctttgaagaggttgctgaggctgctgtggaccagttgctgcagtcccatgaagaagatctctcaaatgaggaactgatgcggctggaacaggagctggcagtgggggaggaggagagggaagatggtccctgggcactgtggcagctaaccacaggaagactgtcggcagccctctcacattttgaggctggcttgtaggtccttgctagtaacagccctaatgatgactggaaactgagaggttccagagaaatcagtgttgcagtaaactgctagcaggagctgtacaatgagaaaaagcgccactcaaaacaactctcttaggtcatttttcaatgtgtgtaaccaaaagttaatcagaataaagcggaagcaccatgatgacctcaacagtggaggcccagccaggcctccctgctctgtggtgttggacatccctggaaaccttgctgttggtatttccattttgatacttgagagcatcaaattttgtcattaaaatgttatttaaatatatgcttttaaaagctcatata

SEQ ID NO: 284443 - DNA, 2981 bp, Homo sapiens
ccagccgcccggcaccggcggagagcgcctccccgctcacctgtcgggccttgcccagggccctcgcgctggtcttggccgtcctgccgcctcctgggccaccacatcgccacagcaaggccagcggcctggccaccgctctactgccggccgccgccagcagccggtaccacatccccagacccagatcccgcgccgcccgggcgcgcgcatgcgcaatgggagagcggtcctagggccccgcgagcgcagggaggactcgcgcaggcgcggcaggggcgcggcgccggctggggccccgtcttgggtgtccacgccgtcgcctgaccgttcgagggtttgatcgccagcgcagcctcgccctgcccagacagctgggccctaaggggatagccagcgcctttagacttatcttaaatcgggcatctgcatcaacacttatttctggggtcctccatggaaagcagctcccgaaacaacacccgcccggtccgccctccgctgcactggaaaaccgcccctggacgtttctgccgcagtgtccccctcacggagttccgtttgtctgcttggtcggttgttctctggagccccaggacccaggccgcttgtatgtgcctgcggccgcacggccccaacacgcggacttcgagcggtaccgggagacccgcgcggcctcctcggagtggacagtgaagcagcagctgggctaggcagtggggctgggcctgcccatggggacccgtccacgtctccaggacatcagcctgagcctcttcgcagcctcgttttctgttgaccgagttctgcaaggggacgtagaggaaccacagcgttcttgcgcttgagaccgctgtgattttctgacattttggaggcagaaatgcctggggaaaggcccacagatgcaactgtcatccctagtgccaaaagggaacggaaagcgattacccttgacctcaaattggaagtgttacgacgatttgaagcgggtgagaagctcagtcagatcgcaaaggccttagatcttgctatctctacagtggcgaccattcgagatagtaaagaaaaaatcaaagcgagttcacaaatagctactcctctgagagcctctcggttgactcgccatcgaagtgcagtgatggagagcatggagcagctgctgagcttgtggctggaagaccagagccagccaaatgcgaccttgagcgaaggttctcaaacggagaggtttcatgcaagtcaagggtggcttgtgagattcaaggagtgccactgtttgccccacttcaagatgaacagcgcagctcccagcaacaaggacatgtacacagaaatgctgaaaagcatcatcgaagaaggtgagtacaccccccaggtgtctttaacgtagatgagacgagacttgattggaagagaatgcccaaaggaacgtttatttccgaggaagagaatgctgagccagggtttaagtcatccaaagatcgcttgatgctgctgcttggtggcagtgcagctggggactttaagttgaagcccttactggtgtaccgctcagaaacccgcaaggctctgaagggttcttgaagcccagtttgcccgtgatttggcgctccaacagaaaggcttgggtgaccaggagcatctttcatgaatggttcacttactttttttgccgttgaaaaatacagtgcccaaaataatctcaccaacaaagcactgctcatactagacagtgcgtcatgccactctgtaaatttgagcgacctttctgataactaagagtagaataccttcaggccaggcgcggtggctcacgcctgtaatcccagcactttgggaggccgagacgggcggatcacctgaggtcaggagttcgagaccagcctcaacatggagaaaccccgtctctactaaaaatacaaatttagccgggcgtggtggtgcaggcctgtaatcccagctactcgggaggctaaagcaggagaattgcttgaacctgggaggcggaggttgtggtgagccgagatcgcgccattgcactccatcctggacaacaggagtgaaactccgtctcaaaaaaaaaaaagaaaaaaaagaagtacaagagtataataccttcatgacagtacagctgactcaatccggaccacgtgtcaaggtgtaatctcgaccttgaaagctcattatctgagaaggacttttcagcacatcctagaagcagcggatggtgaggacacagctatgatcagggaattttggagaaactacagcatcatggatgctgtggacatggccatcgcatgggaggagctcaaaccagcactaatgaacagcatgtggaagaagatttggcctgagtgtgttcaggcccagcgtttttcccaggcagataacattgcacagcttcaaaaaaacattgtgacccttgccagaaatgtggcctttgaagaggttgctgaggctgctgtggaccagttgctgcagtcccatgaagaagatctctcaaatgaggaactgatgcggctggaacaggagctggcagtgggggaggaggagagggaagatggtccctgggcactgtggcagctaaccacaggaagactgtcggcagccctctcacattttgaggctggcttgtaggtccttgctagtaacagccctaatgatgactggaaactgagaggttccagagaaatcagtgttgcagtaaactgctagcaggagctgtacaatgagaaaaagcgccactcaaaacaactctcttaggtcatttttcaatgtgtgtaaccaaaagttaatcagaataaagcggaagcaccatgatgacctcaacagtggaggcccagccaggcctccctgctctgtggtgttggacatccctggaaaccttgctgttggtatttccattttgatacttgagagcatcaaattttgtcattaaaatgttatttaaatatatgcttttaaaagctcatata

SEQ ID NO: 284444 - DNA, 2384 bp, Homo sapiens
ccagccgcccggcaccggcggagagcgcctccccgctcacctgtcgggccttgcccagggccctcgcgctggtcttggccgtcctgccgcctcctgggccaccacatcgccacagcaaggccagcggcctggccaccgctctactgccggccgccgccagcagccggtaccacatccccagacccagatcccgcgccgcccgggcgcgcgcatgcgcaatgggagagcggtcctagggccccgcgagcgcagggaggactcgcgcaggcgcggcaggggcgcggcgccggctggggccccgtcttgggtgtccacgccgtcgcctgaccgttcgagggtttgatcgccagcgcagcctcgccctgcccagacagctgggccctaaggggatagccagcgcctttagacttatcttaaatcgggcatctgcatcaacacttatttctggggtcctccatggaaagcagctcccgaaacaacacccgcccggtccgccctccgctgcactggaaaaccgcccctggacgtttctgccgcagtgtccccctcacggagttccgtttgtctgcttggtcggttgttctctggagccccaggacccaggccgcttgtatgtgcctgcggccgcacggccccaacacgcggacttcgagcggtaccgggagacccgcgcggcctcctcggagtggacagtgaagcagcagctgggctaggcagtggggctgggcctgcccatggggacccgtccacgtctccaggacatcagcctgagcctcttcgcagcctcgttttctgttgaccgagttctgcaaggggacgtagaggaaccacagcgttcttgcgcttgagaccgctgtgattttctgacattttggaggcagaaatgcctggggaaaggcccacagatgcaactgtcatccctagtgccaaaagggaacggaaagcgattacccttgacctcaaattggaagtgttacgacgatttgaagcgggtgagaagctcagtcagatcgcaaaggccttagatcttgctatctctacagtggcgaccattcgagatagtaaagaaaaaatcaaagcgagttcacaaatagctactcctctgagagcctctcggttgactcgccatcgaagtgcagtgatggagagcatggagcagctgctgagcttgtggctggaagaccagagccagccaaatgcgaccttgagcgccgccatcgttcaggagaaggctgagtttgatgacttacagcgtgaacatggcgaaggttctcaaacggagaggtttcatgcaagtcaagggtggcttgtgagattcaaggagtgccactgtttgccccacttcaagatgaacagcgcagctcccagcaacaaggacatgtacacagaaatgctgaaaagcatcatcgaagaaggtgagtacaccccccaggtgtctttaacgtagatgagacgagacttgattggaagagaatgcccaaaggaacgtttatttccgaggaagagaatgctgagccagggtttaagtcatccaaagatcgcttgatgctgctgcttggtggcagtgcagctggggactttaagttgaagcccttactggtgtaccgctcagaaacccgcaaggctctgaagggttcttgaagcccagtttgcccgtgatttggcgctccaacagaaaggcttgggtgaccaggagcatctttcatgaatggttcacttactttttttgccgttgaaaaatacagtgcccaaaataatctcaccaacaaagcactgctcatactagacagtgcgtcatgccactctgtaaatttgagcgacctttctgataactaagagtagaataccttcaggccaggcgcggtggctcacgcctgtaatcccagcactttgggaggccgagacgggcggatcacctgaggtcaggagttcgagaccagcctcaacatggagaaaccccgtctctactaaaaatacaaatttagccgggcgtggtggtgcaggcctgtaatcccagctactcgggaggctaaagcaggagaattgcttgaacctgggaggcggaggttgtggtgagccgagatcgcgccattgcactccatcctggacaacaggagtgaaactccgtctcaaaaaaaaaaaagaaaaaaaagaagtacaagagtataataccttcatgacagtacagctgactcaatccggaccacgtgtcaaggtgtaatctcgaccttgaaagctcattatctgagaaggacttttcagcacatcctagaagcagcggatggtgaggacacagctatgatcagggaattttggagaaactacagcatcatggatgctgtggacatgcgcaatgcatcgtgcataccggggtacctcatagg

SEQ ID NO: 284445 - DNA, 2982 bp, Homo sapiens
ccagccgcccggcaccggcggagagcgcctccccgctcacctgtcgggccttgcccagggccctcgcgctggtcttggccgtcctgccgcctcctgggccaccacatcgccacagcaaggccagcggcctggccaccgctctactgccggccgccgccagcagccggtaccacatccccagacccagatcccgcgccgcccgggcgcgcgcatgcgcaatgggagagcggtcctagggccccgcgagcgcagggaggactcgcgcaggcgcggcaggggcgcggcgccggctggggccccgtcttgggtgtccacgccgtcgcctgaccgttcgagggtttgatcgccagcgcagcctcgccctgcccagacagctgggccctaaggggatagccagcgcctttagacttatcttaaatcgggcatctgcatcaacacttatttctggggtcctccatggaaagcagctcccgaaacaacacccgcccggtccgccctccgctgcactggaaaaccgcccctggacgtttctgccgcagtgtccccctcacggagttccgtttgtctgcttggtcggttgttctctggagccccaggacccaggccgcttgtatgtgcctgcggccgcacggccccaacacgcggacttcgagcggtaccgggagacccgcgcggcctcctcggagtggacagtgaagcagcagctgggctaggcagtggggctgggcctgcccatggggacccgtccacgtctccaggacatcagcctgagcctcttcgcagcctcgttttctgttgaccgagttctgcaaggggacgtagaggaaccacagcgttcttgcgcttgagaccgctgtgattttctgacattttggaggcagaaatgcctggggaaaggcccacagatgcaactgtcatccctagtgccaaaagggaacggaaagcgattacccttgacctcaaattggaagtgttacgacgatttgaagcgggtgagaagctcagtcagatcgcaaaggccttagatcttgctatctctacagtggcgaccattcgagatagtaaagaatcgccatcgaagtgcagtgatggagagcatggagcagctgctgagcttgtggctggaagaccagagccagccaaatgcgaccttgagcgccgccatcgttcaggagaaggctgagtttgatgacttacagcgtgaacatggcgaaggttctcaaacggagaggtttcatgcaagtcaagggtggcttgtgagattcaaggagtgccactgtttgccccacttcaagatgaacagcgcagctcccagcaacaaggacatgtacacagaaatgctgaaaagcatcatcgaagaaggtgagtacaccccccaggtgtctttaacgtagatgagacgagacttgattggaagagaatgcccaaaggaacgtttatttccgaggaagagaatgctgagccagggtttaagtcatccaaagatcgcttgatgctgctgcttggtggcagtgcagctggggactttaagttgaagcccttactggtgtaccgctcagaaacccgcaaggctctgaagggttcttgaagcccagtttgcccgtgatttggcgctccaacagaaaggcttgggtgaccaggagcatctttcatgaatggttcacttactttttttgccgttgaaaaatacagtgcccaaaataatctcaccaacaaagcactgctcatactagacagtgcgtcatgccactctgtaaatttgagcgacctttctgataactaagagtagaataccttcaggccaggcgcggtggctcacgcctgtaatcccagcactttgggaggccgagacgggcggatcacctgaggtcaggagttcgagaccagcctcaacatggagaaaccccgtctctactaaaaatacaaatttagccgggcgtggtggtgcaggcctgtaatcccagctactcgggaggctaaagcaggagaattgcttgaacctgggaggcggaggttgtggtgagccgagatcgcgccattgcactccatcctggacaacaggagtgaaactccgtctcaaaaaaaaaaaagaaaaaaaagaagtacaagagtataataccttcatgacagtacagctgactcaatccggaccacgtgtcaaggtgtaatctcgaccttgaaagctcattatctgagaaggacttttcagcacatcctagaagcagcggatggtgaggacacagctatgatcagggaattttggagaaactacagcatcatggatgctgtggacatggccatcgcatgggaggagctcaaaccagcactaatgaacagcatgtggaagaagatttggcctgagtgtgttcaggcccagcgtttttcccaggcagataacattgcacagcttcaaaaaaacattgtgacccttgccagaaatgtggcctttgaagaggttgctgaggctgctgtggaccagttgctgcagtcccatgaagaagatctctcaaatgaggaactgatgcggctggaacaggagctggcagtgggggaggaggagagggaagatggtccctgggcactgtggcagctaaccacaggaagactgtcggcagccctctcacattttgaggctggcttgtaggtccttgctagtaacagccctaatgatgactggaaactgagaggttccagagaaatcagtgttgcagtaaactgctagcaggagctgtacaatgagaaaaagcgccactcaaaacaactctcttaggtcatttttcaatgtgtgtaaccaaaagttaatcagaataaagcggaagcaccatgatgacctcaacagtggaggcccagccaggcctccctgctctgtggtgttggacatccctggaaaccttgctgttggtatttccattttgatacttgagagcatcaaattttgtcattaaaatgttatttaaatatatgcttttaaaagctcatata

SEQ ID NO: 284446 - DNA, 1782 bp, Homo sapiens
gaagggcagtgcatcgtgtcttggtgcatagactgttccagaggtatcccgcacgttgttcattcaaggagtgccactgtttgccccacttcaagatgaacagcgcagctcccagcaacaaggacatgtacacagaaatgctgaaaagcatcatcgaagaaggtgagtacaccccccaggtgtctttaacgtagatgagacgagacttgattggaagagaatgcccaaaggaacgtttatttccgaggaagagaatgctgagccagggtttaagtcatccaaagatcgcttgatgctgctgcttggtggcagtgcagctggggactttaagttgaagcccttactggtgtaccgctcagaaacccgcaaggctctgaagggttcttgaagcccagtttgcccgtgatttggcgctccaacagaaaggcttgggtgaccaggagcatctttcatgaatggttcacttactttttttgccgttgaaaaatacagtgcccaaaataatctcaccaacaaagcactgctcatactagacagtgcgtcatgccactctgtaaatttgagcgacctttctgataactaagagtagaataccttcaggccaggcgcggtggctcacgcctgtaatcccagcactttgggaggccgagacgggcggatcacctgaggtcaggagttcgagaccagcctcaacatggagaaaccccgtctctactaaaaatacaaatttagccgggcgtggtggtgcaggcctgtaatcccagctactcgggaggctaaagcaggagaattgcttgaacctgggaggcggaggttgtggtgagccgagatcgcgccattgcactccatcctggacaacaggagtgaaactccgtctcaaaaaaaaaaaagaaaaaaaagaagtacaagagtataataccttcatgacagtacagctgactcaatccggaccacgtgtcaaggtgtaatctcgaccttgaaagctcattatctgagaaggacttttcagcacatcctagaagcagcggatggtgaggacacagctatgatcagggaattttggagaaactacagcatcatggatgctgtggacatggccatcgcatgggaggagctcaaaccagcactaatgaacagcatgtggaagaagatttggcctgagtgtgttcaggcccagcgtttttcccaggcagataacattgcacagcttcaaaaaaacattgtgacccttgccagaaatgtggcctttgaagaggttgctgaggctgctgtggaccagttgctgcagtcccatgaagaagatctctcaaatgaggaactgatgcggctggaacaggagctggcagtgggggaggaggagagggaagatggtccctgggcactgtggcagctaaccacaggaagactgtcggcagccctctcacattttgaggctggcttgtaggtccttgctagtaacagccctaatgatgactggaaactgagaggttccagagaaatcagtgttgcagtaaactgctagcaggagctgtacaatgagaaaaagcgccactcaaaacaactctcttaggtcatttttcaatgtgtgtaaccaaaagttaatcagaataaagcggaagcaccatgatgacctcaacagtggaggcccagccaggcctccctgctctgtggtgttggacatccctggaaaccttgctgttggtatttccattttgatacttgagagcatcaaattttgtcattaaaatgttatttaaatatatgcttttaaaagctcatata

SEQ ID NO: 284447 - DNA, 1470 bp, Homo sapiens
ccagccgcccggcaccggcggagagcgcctccccgctcacctgtcgggccttgcccagggccctcgcgctggtcttggccgtcctgccgcctcctgggccaccacatcgccacagcaaggccagcggcctggccaccgctctactgccggccgccgccagcagccggtaccacatccccagacccagatcccgcgccgcccgggcgcgcgcatgcgcaatgggagagcggtcctagggccccgcgagcgcagggaggactcgcgcaggcgcggcaggggcgcggcgccggctggggccccgtcttgggtgtccacgccgtcgcctgaccgttcgagggtttgatcgccagcgcagcctcgccctgcccagacagctgggccctaaggggatagccagcgcctttagacttatcttaaatcgggcatctgcatcaacacttatttctggggtcctccatggaaagcagctcccgaaacaacacccgcccggtccgccctccgctgcactggaaaaccgcccctggacgtttctgccgcagtgtccccctcacggagttccgtttgtctgcttggtcggttgttctctggagccccaggacccaggccgcttgtatgtgcctgcggccgcacggccccaacacgcggacttcgagcggtaccgggagacccgcgcggcctcctcggagtggacagtgaagcagcagctgggctaggcagtggggctgggcctgcccatggggacccgtccacgtctccaggacatcagcctgagcctcttcgcagcctcgttttctgttgaccgagttctgcaaggggacgtagaggaaccacagcgttcttgcgcttgagaccgctgtgattttctgacattttggaggcagataacattgcacagcttcaaaaaaacattgtgacccttgccagaaatgtggcctttgaagaggttgctgaggctgctgtggaccagttgctgcagtcccatgaagaagatctctcaaatgaggaactgatgcggctggaacaggagctggcagtgggggaggaggagagggaagatggtccctgggcactgtggcagctaaccacaggaagactgtcggcagccctctcacattttgaggctggcttgtaggtccttgctagtaacagccctaatgatgactggaaactgagaggttccagagaaatcagtgttgcagtaaactgctagcaggagctgtacaatgagaaaaagcgccactcaaaacaactctcttaggtcatttttcaatgtgtgtaaccaaaagttaatcagaataaagcggaagcaccatgatgacctcaacagtggaggcccagccaggcctccctgctctgtggtgttggacatccctggaaaccttgctgttggtatttccattttgatacttgagagcatcaaattttgtcattaaaatgttatttaaatatatgcttttaaaagctcatata

SEQ ID NO: 284448 - DNA, 1070 bp, Homo sapiens
gagattgtagtaggagagtatcatgggatactctctttaatatttacacagaattatgaagggatacacaagaaggtgaattccccttttaagaaatataactgttaataaaaggaaagcaattttccattttgcacaaatttaggacagaaatattcaaagagggtagtgactacagtttcttcacacttagatgagagaataaacaaatacacaacagtagtgatggtaattatcagaggaagaattattaccatatatatatttcattaaaatggatatatcttttctcatatagagaaataaaaacttgattgtgaagataaatgggtctcagcagttgctaagaaaatgactggttactttctgtcccttttgaggagcatgcagagaaattgctttagcctctgataaataaaacagactgcgaggaaaattacagcgaggaaattacagacatcatctcctttgaacagggaaaaggtaacagccagtagccagtaattggagagccaccattgtccaaaggaggagtccagctcactagcattgatcctttggtgcgtgccaaaacttttggttttcctggaggtccaggaaggcgataaggatcttgaatgactactttatctgatttgcactcatcactgattccatatttattcactgccctgactcggaactcatactgaccattggggataagtttccagatctagaaattagaaaaacagaaatttattgaagagaatatacttatgttggttttcactcatttaaaaattcaacttattttgggagggatgactgtaagaagaaataaatatatagactcaaaacatgggaagacagagaaaaggagaaagctttttttaaaataaaaatatgtagatgtattgtacctgatagtggatctcaattaaaagagtatctgtgtatcaaaaaaaaaaaaaaaaaaaaacgtttacacgtctgatgggaaccctgggtcccacttatcgcttgagaatccccttgcagtgggtatacgaaaggccgacatgcctccaaatggcaccgatgcgatggat

SEQ ID NO: 284449 - DNA, 778 bp, Homo sapiens
agggggtggtggcgaggctccgcaactttggaaactgccatttcattcacacaaggcactgcctgggggagggggctgttcctggctgcagaattctagctctcacgagcacgcagacaaccgcactcgcagcggtgtggggccggctgctcaggggaagccccaggctctccgacccagctaccgggaatggggcaccctttggagaagaaccccagcctggggtggggacgcaccggctctccgacagctcaaacacagacagatcttctagagccgagggaatttcttttcgcagaagccattactccccccgagagaaggctgcaaagctgggaagcccagggtgtgctcctcccgcccttttggacccccgggcttgcaccggctgcactctgagaaccagctgcgcgcggagcggtgcaatgcagcacccaccctgcgagcctggcaattgcttgtcattaaaagaaaaaaaaattacggagggctccgggggtgtgtgttggggaggggagaccgatgcttctaacccagcccccgctttgactgcgtgttgtgcagctgagcgcgaggccaacgttgagcaaggccttgcagggaggttgctcctgtgtaattacgaaagaaggctagtccgaaggtgcaaaatagcagggagaggacgcgcccccttaggaacaagacctctggatgtttccagtttcaaattgaaagaagaggggcgccccccttgtttgaaaataaataaataaataagtgcgagctacaaaaaaaa

SEQ ID NO: 284450 - DNA, 684 bp, Homo sapiens
gacagcgggggcgtgggcagcagctcaaacttcttccagatgtcctcccccgggggggtcgagtcggggccgccgaagtagaagtcatcttcgtccgggggcaccctttggagaagaaccccagcctggggtggggacgcaccggctctccgacagctcaaacacagacagatcttctagagccgagggaatttcttttcgcagaagccattactccccccgagagaaggctgcaaagctgggaagcccagggtgtgctcctcccgcccttttggacccccgggcttgcaccggctgcactctgagaaccagctgcgcgcggagcggtgcaatgcagcacccaccctgcgagcctggcaattgcttgtcattaaaagaaaaaaaaattacggagggctccgggggtgtgtgttggggaggggagaccgatgcttctaacccagcccccgctttgactgcgtgttgtgcagctgagcgcgaggccaacgttgagcaaggccttgcagggaggttgctcctgtgtaattacgaaagaaggctagtccgaaggtgcaaaatagcagggagaggacgcgcccccttaggaacaagacctctggatgtttccagtttcaaattgaaagaagaggggcgccccccttgtttgaaaataaataaataaataagtgcgagctacaaaaaaaa

SEQ ID NO: 284451 - DNA, 3089 bp, Homo sapiens
  misc_feature (168)..(168): n is a, c, g, or t
  misc_feature (269)..(269): n is a, c, g, or t
aaaaattagccaggcatggtggcatgcacctgtaatcccagctattcaggggtctgaggcaggagaatcacttgaacccagggggcggaggttgcagttagccgaggtcgcgtcactgcactccagcctgggcgacagagcgagactccatctcaaaaaaaaaaaaanccaccaacaaaaaaaatcactaccagttgccagctgtgataagagctaaaacaaggggtactgtagtctcaaattataaatttctattgcctcatattacnaaagttccagtcaccttaagtgattgaaggttttgacattttatccagccaggtggtagtaataagcctcaaatccacagggtacacaacattttcaaggtctttttttttttttatcatacttaattcatgaataacccccatagtgtaggttagttagcactatcaaagtgactggtaaggacgcaggaaaataaaaagaggattcaattggattggtactgcaaaaagaatccattctgttcagcacatgaatttctgttctgaccttaagtttagatatatcaaagaaacaaaaagcatagaggcggctgggggtggtggctcacacctgtaatcccagcaccttgggaggccaaggcaggcagatcacctgaggtcgggagttcgagaccagcctgaccaacatggagaaaccctgtctctactaaaaatacaaaattagccaggcatggtggcgtatgcctggaaatcccagctactcaggaggctgaggcaggagaattgcttgaacccgggaggcagaggttgcagtgagccaagatcacgccattgcactccagcctgggcaacagagcaagattccatctcaaaagaaaaaaaaaatcacctctcatctttctgtttttaggagatcaatgatctgttggttaaggaaaagattatgcaacttgtccagcagagatcacaaatccaaacccttcagaagaaggtagtaaacttggagactgctctgagttacatgaccaaagagtttgagagtgaagttttaaaactgcagcaacacgcaatgatagagaaccaagcaggtcaggtagaaattgacaagctgcagcaccttcttcagatgaaggacagggaaatgaatcgtgtgaagaagctggccaagaacatactggatgagagaacagaagtggaaagattctttttagatgctctgcaccaagtgaagcaacagatcctaattagcaggaagcattataagcagatagcacaagctgctttcaatttaaaaatgagagcagcatgtacaggaagaacagaatatcccaaaatcagaacatttgatggcagagagcacagcaccaatagtgtgaatcaggatcttctggaggccgaaaaatggacacatattgaaggaaatgtggatattggagatttgacctgggagcagaaggaaaaagtattgcgattgctctttgcaaaaatgaatggctgtccttctaggaaatacaaccagagttctaggcctccagttccagactatgttgtttctgacagtggggaaacaaaggaatttggggatgaaagtaagcttcaagataaaatcttcatcacccagcaaattgcaatatcagactcttctggtgaagtggtgctacccactattccaaaagaacctcaggagtctgacacaggaaccttctgagaagcactgattatgacctcacagatgctgctggcagtcccttccttgcagaatccttgctcctgaatatctttaagaaaatttcttaaaggaaaagacaaaaaatttaactcaaaagttacctgtttgccatagaaattggtgtctcccctgaaggaggatcgagagccggtgaatgagaacattggcaaaggcactggaatggggacattcactcccacctaaaacagaacaaatccgtgtcatatcctaaggacaaaggaactctccatttagaaacacaaaggcatcagagaccagttttaaatacccaccttctaccctatcctctaccccatgaactttcattcctgaggaagaaatggggcaatgtgggaggtcatgggggcaatcttaaaccaatgactcaccattatttactgtttcctcttaggaaatagtaaatggatataagaatctcttaaaaattctgttcacgaacctgtccaacatccaccaagtgggcatatttccgagcagtggctccattggtggtgaagatggcagttccatttccatatgggttgttatttacaatctggatggcttcatccaatgtttctgtctccagaaccacaagaactggaccaaaaatctcctctttgtaacaggtcatatttggctgccaggagtgatgcatccagaaaagaagtcagctttttggattctgagtattttatgcttatttggtactttcacttactacacatcatttacgtggacaactttcatattactaatctcttttcatttcaaatcacctatttaaaaaaaaagtcctctctcaagtgtattccgtcttccaagttaccaatcatataaacaacttggaattcctatcaacaataaccacacttcctttaagggactgtatctttagttcatgacccatcatcagctgcctttttaatacctgaacgactagtttcatccaattgttatcaaaaagttacatgaaaatttattttttataaatccaatctatagtaaatataccaggataatttttctctttacagaaaccccatgctgttttctgtaacataaataatccattcttattcactcctttgcctcccaaatatgtctgtatgtttatattttgatatcaggtcgcagacactcaaaacatccttcaccatgcaattaatgtttgttgctgataaacggatttttctgtatggttctgtggcaagagatttcataatttctactgcacttacattcaacacttgatgattcactattatagtaaggatatatgaatttcaaaaaatgcctcataacctcaatttttaagtcatgttagctgagagactttcaaagttttgataaataaaaattgacaagtc

SEQ ID NO: 284452 - DNA, 3356 bp, Homo sapiens
  misc_feature (168)..(168): n is a, c, g, or t
  misc_feature (269)..(269): n is a, c, g, or t
aaaaattagccaggcatggtggcatgcacctgtaatcccagctattcaggggtctgaggcaggagaatcacttgaacccagggggcggaggttgcagttagccgaggtcgcgtcactgcactccagcctgggcgacagagcgagactccatctcaaaaaaaaaaaaanccaccaacaaaaaaaatcactaccagttgccagctgtgataagagctaaaacaaggggtactgtagtctcaaattataaatttctattgcctcatattacnaaagttccagtcaccttaagtgattgaaggttttgacattttatccagccaggtggtagtaataagcctcaaatccacagggtacacaacattttcaaggtctttttttttttttatcatacttaattcatgaataacccccatagtgtaggttagttagcactatcaaagtgactggtaaggacgcaggaaaataaaaagaggattcaattggattggtactgcaaaaagaatccattctgttcagcacatgaatttctgttctgaccttaagtttagatatatcaaagaaacaaaaagcatagaggcggctgggggtggtggctcacacctgtaatcccagcaccttgggaggccaaggcaggcagatcacctgaggtcgggagttcgagaccagcctgaccaacatggagaaaccctgtctctactaaaaatacaaaattagccaggcatggtggcgtatgcctggaaatcccagctactcaggaggctgaggcaggagaattgcttgaacccgggaggcagaggttgcagtgagccaagatcacgccattgcactccagcctgggcaacagagcaagattccatctcaaaagaaaaaaaaaatcacctctcatctttctgtttttaggagatcaatgatctgttggttaaggaaaagattatgcaacttgtccagcagagatcacaaatccaaacccttcagaagaaggtagtaaacttggagactgctctgagttacatgaccaaagagtttgagagtgaagttttaaaactgcagcaacacgcaatgatagagaaccaagcaggtcaggtagaaattgacaagctgcagcaccttcttcagatgaaggacagggaaatgaatcgtgtgaagaagctggccaagaacatactggatgagagaacagaagtggaaagattctttttagatgctctgcaccaagtgaagcaacagatcctaattagcaggaagcattataagcagatagcacaagctgctttcaatttaaaaatgagagcagcatgtacaggaagaacagaatatcccaaaatcagaacatttgatggcagagagcacagcaccaatagtgtgaatcaggatcttctggaggccgaaaaatggacacatattgaaggaaatgtggatattggagatttgacctgggagcagaaggaaaaagtattgcgattgctctttgcaaaaatgaatggctgtccttctaggaaatacaaccagagttctaggcctccagttccagactatgttgtttctgacagtggggaaacaaaggaatttggggatgaaagtaagcttcaagataaaatcttcatcacccagcaaattgcaatatcagactcttctggtgaagtggtgctacccactattccaaaagaacctcaggagtctgacacaggaaccttctgagaagcactgattatgacctcacagatgctgctggcagtcccttccttgcagaatccttgctcctgaatatctttaagaaaatttcttaaaggaaaagacaaaaaatttaactcaaaagttacctgtttgccatagaaattggtgtctcccctgaaggaggatcgagagccggtgaatgagaacattggcaaaggcactggaatggggacattcactcccacctaaaacagaacaaatccgtgtcatatcctaaggacaaaggaactctccatttagaaacacaaaggcatcagagaccagttttaaatacccaccttctaccctatcctctaccccatgaactttcattcctgaggaagaaatggggcaatgtgggaggtcatgggggcaatcttaaaccaatgactcaccattatttactgtttcctcttaggaaatagtaaatggatataagaatctcttaaaaattctgttcacgaacctgtccaacatccaccaagtgggcatatttccgagcagtggctccattggtggtgaagatggcagttccatttccatatgggttgttatttacaatctggatggcttcatccaatgtttctgtctccagaaccacaagaactggaccaaaaatctcctctttgtaacaggtcatatttggctgccaggagtgatgcatccagaaaagaagtcagctttttggattctgagtattttatgcttatttggtactttcacttactacacatcatttacgtggacaactttcatattactaatctcttttcatttcaaatcacctatttaaaaaaaaagtcctctctcaagtgtattccgtcttccaagttaccaatcatataaacaacttggaattcctatcaacaataaccacacttcctttaagggactgtatctttagttcatgacccatcatcagctgcctttttaatacctgaacgactagtttcatccaattgttatcaaaaagttacatgaaaatttattttttataaatccaatctatagtaaatataccaggataatttttctctttacagaaaccccatgctgttttctgtaacataaataatccattcttattcactcctttgcctcccaaatatgtctgtatgtttatattttgatatcaggtcgcagacactcaaaacatccttcaccatgcaattaatgtttgttgctgataaacggatttttctgtatggttctgtggcaagagatttcataatttctactgcacttacattcaacacttgatgattcactattatagtaaggatatatgaatttcaaaaaatgcctcataacctcaatttttaagtcatgttagctgagagactttcaaagttttgataaataaaaattgacaagtcaattatttttgtcactttcaataaatattgggtggttgatatattgattgagacactgcagtagccataagctaggcagcaagagggagaggggagagaaaacattaacaaaccagtataagataagatagcgtttggcaaactatagcctgtgggccaaatgtggcttcctgcctgtttttgtacagccccaagttaaaaatggtttttgcatttttaaatggttgaaaaaaaattaatcatatataaaatgatatgaaattcaaa

SEQ ID NO: 284453 - DNA, 2811 bp, Homo sapiens
  misc_feature (168)..(168): n is a, c, g, or t
  misc_feature (269)..(269): n is a, c, g, or t
aaaaattagccaggcatggtggcatgcacctgtaatcccagctattcaggggtctgaggcaggagaatcacttgaacccagggggcggaggttgcagttagccgaggtcgcgtcactgcactccagcctgggcgacagagcgagactccatctcaaaaaaaaaaaaanccaccaacaaaaaaaatcactaccagttgccagctgtgataagagctaaaacaaggggtactgtagtctcaaattataaatttctattgcctcatattacnaaagttccagtcaccttaagtgattgaaggttttgacattttatccagccaggtggtagtaataagcctcaaatccacagggtacacaacattttcaaggtctttttttttttttatcatacttaattcatgaataacccccatagtgtaggttagttagcactatcaaagtgactggtaaggacgcaggaaaataaaaagaggattcaattggattggtactgcaaaaagaatccattctgttcagcacatgaatttctgttctgaccttaagtttagatatatcaaagaaacaaaaagcatagaggcggctgggggtggtggctcacacctgtaatcccagcaccttgggaggccaaggcaggcagatcacctgaggtcgggagttcgagaccagcctgaccaacatggagaaaccctgtctctactaaaaatacaaaattagccaggcatggtggcgtatgcctggaaatcccagctactcaggaggctgaggcaggagaattgcttgaacccgggaggcagaggttgcagtgagccaagatcacgccattgcactccagcctgggcaacagagcaagattccatctcaaaagaaaaaaaaaatcacctctcatctttctgtttttaggagatcaatgatctgttggttaaggaaaagattatgcaacttgtccagcagagatcacaaatccaaacccttcagaagaaggtagtaaacttggagactgctctgagttacatgaccaaagagtttgagagtgaagttttaaaactgcagcaacacgcaatgatagagaaccaagcaggtcaggtagaaattgacaagctgcagcaccttcttcagatgaaggacagggaaatgaatcgtgtgaagaagctggccaagaacatactggatgagagaacagaagtggaaagattctttttagatgctctgcaccaagtgaagcaacagatcctaattagcaggaagcattataagcagatagcacaagctgctttcaatttaaaaatgagagcagcatgtacaggaagaacagaatatcccaaaatcagaacatttgatggcagagagcacagcaccaatagtgtgaatcaggatcttctggaggccgaaaaatggacacatattgaaggaaatgtggatattggagatttgacctgggagcagaaggaaaaagtattgcgattgctctttgcaaaaatgaatggctgtccttctaggaaatacaaccagagttctaggcctccagttccagactatgttgtttctgacagtggggaaacaaaggaatttgggtaagagctctcttgcttaagtaataaacatgagcccaacacgatggttcttgtgggcatcttgaatgtgctaattgaaagtaatatgacaagtctgttattctaaaccaggtttcatgtgtgtagagttgttgacggttctgttattttgtcattattgcagggatgaaagtaagcttcaagataaaatcttcatcacccagcaaattgcaatatcagactcttctggtgaagtggtgctacccactattccaaaagaacctcaggagtctgacacagtaaggagtctgtatctaatcaaacaatgtatattgttgtcacccttccccatgtcgcttcttgctaaatcacggttattttctctactagttgagagacttcagggatcagtggaatgagtaataaatagcattagtagattacataaatttttaaagcaatatccgtacaaatgcatattatactaatgcaaatgcaaatgtgtgcctctttttgtgtagaaacctataggttgccttttgaagtaaacagcctagccaaaatgtgtactatcttttacgtaagagtaaacatagtgaccttgtgactcttagctttccatcacaggtgggaagtcagagtcattacaacctagaggacaaaggcttataaggagatatgaaatgatttttttaagccaagtttttctctttaagagtttttaatttataatttgttattcataattagtacaatgtagaatctgagaaatttcaaatgaagccacattagaacaaaaagaaaatactgactttttagccgcgatcacatgaatataactgatgagtttttttcatctaagaaataagaaactctgagcagcaaatagttggccagatgagttgtttctaattagagcatcacagttctgattagtgtgtttttttagaagtgatttcccttaaatataaggaatgaccttttatttaacccagcctatagttgttggattggattaaatatcactaccagggccaggtgcggtggttcacgcctgcaatcccagcactttgggaggccgaggtgggcggatcattaggtcaggagattgagaccatcctggctaacatggtgaaaccctgtctctactaaaagtacaaaaaattatccgggtgtgggggcatgcacctgtaatcccagctactcgggagactgaggcaggagaattacttgaacccaggaggtggaggttgcagtgagc

SEQ ID NO: 284454 - DNA, 650 bp, Homo sapiens
tgaaggcatgaggagacactgcctcattcattatctttgttgacttttacccactacaggaaatacaaccagagttctaggcctccagttccagactatgttgtttctgacagtggggaaacaaaggaatttgggtaagagctctcttgcttaagtaataaacatgagcccaacacgatggttcttgtgggcatcttgaatgtgctaattgaaagtaatatgacaagtctgttattctaaaccaggtttcatgtgtgtagagttgttgacggttctgttattttgtcattattgcagggatgaaagtaagcttcaagataaaatcttcatcacccagcaaattgcaatatcagactcttctggtgaagtggtgctacccactattccaaaagaacctcaggagtctgacacagtaaggagtctgtatctaatcaaacaatgtatattgttgtcacccttccccatgtcgcttcttgctaaatcacggttattttctctactagttgagagacttcagggatcagtggaatgagtaataaatagcattagtagattacataaatttttaaagcaatatccgtacaaatgcatattatactaatgcaaatgcaaatgtgtgcctctttttgtgtagaaacctataggttgcc

SEQ ID NO: 284455 - DNA, 2865 bp, Homo sapiens
  misc_feature (168)..(168): n is a, c, g, or t
  misc_feature (269)..(269): n is a, c, g, or t
aaaaattagccaggcatggtggcatgcacctgtaatcccagctattcaggggtctgaggcaggagaatcacttgaacccagggggcggaggttgcagttagccgaggtcgcgtcactgcactccagcctgggcgacagagcgagactccatctcaaaaaaaaaaaaanccaccaacaaaaaaaatcactaccagttgccagctgtgataagagctaaaacaaggggtactgtagtctcaaattataaatttctattgcctcatattacnaaagttccagtcaccttaagtgattgaaggttttgacattttatccagccaggtggtagtaataagcctcaaatccacagggtacacaacattttcaaggtctttttttttttttatcatacttaattcatgaataacccccatagtgtaggttagttagcactatcaaagtgactggtaaggacgcaggaaaataaaaagaggattcaattggattggtactgcaaaaagaatccattctgttcagcacatgaatttctgttctgaccttaagtttagatatatcaaagaaacaaaaagcatagaggcggctgggggtggtggctcacacctgtaatcccagcaccttgggaggccaaggcaggcagatcacctgaggtcgggagttcgagaccagcctgaccaacatggagaaaccctgtctctactaaaaatacaaaattagccaggcatggtggcgtatgcctggaaatcccagctactcaggaggctgaggcaggagaattgcttgaacccgggaggcagaggttgcagtgagccaagatcacgccattgcactccagcctgggcaacagagcaagattccatctcaaaagaaaaaaaaaatcacctctcatctttctgtttttaggagatcaatgatctgttggttaaggaaaagattatgcaacttgtccagcagagatcacaaatccaaacccttcagaagaaggtagtaaacttggagactgctctgagttacatgaccaaagagtttgagagtgaagttttaaaactgcagcaacacgcaatgatagagaaccaagcaggtcaggtagaaattgacaagctgcagcaccttcttcagatgaaggacagggaaatgaatcgtgtgaagaagctggccaagaacatactggatgagagaacagaagtggaaagattctttttagatgctctgcaccaagtgaagcaacagatcctaattagcaggaagcattataagcagatagcacaagctgctttcaatttaaaaatgagagcagcatgtacaggaagaacagaatatcccaaaatcagaacatttgatggcagagagcacagcaccaatagtgtgaatcaggatcttctggaggccgaaaaatggacacatattgaaggaaatgtggatattggagatttgacctgggagcagaaggaaaaagtattgcgattgctctttgcaaaaatgaatggctgtccttctaggaaatacaaccagagttctaggcctccagttccagactatgttgtttctgacagtggggaaacaaaggaatttgggtaagagctctcttgcttaagtaataaacatgagcccaacacgatggttcttgtgggcatcttgaatgtgctaattgaaagtaatatgacaagtctgttattctaaaccaggtttcatgtgtgtagagttgttgacggttctgttattttgtcattattgcagggatgaaagtaagcttcaagataaaatcttcatcacccagcaaattgcaatatcagactcttctggtgaagtggtgctacccactattccaaaagaacctcaggagtctgacacagtaaggagtctgtatctaatcaaacaatgtatattgttgtcacccttccccatgtcgcttcttgctaaatcacggttattttctctactagttgagagacttcagggatcagtggaatgagtaataaatagcattagtagattacataaatttttaaagcaatatccgtacaaatgcatattatactaatgcaaatgcaaatgtgtgcctctttttgtgtagaaacctataggttgccttttgaagtaaacagcctagccaaaatgtgtactatcttttacgtaagagtaaacatagtgaccttgtgactcttagctttccatcacaggtgggaagtcagagtcattacaacctagaggacaaaggcttataaggagatatgaaatgatttttttaagccaagtttttctctttaagagtttttaatttataatttgttattcataattagtacaatgtagaatctgagaaatttcaaatgaagccacattagaacaaaaagaaaatactgactttttagccgcgatcacatgaatataactgatgagtttttttcatctaagaaataagaaactctgagcagcaaatagttggccagatgagttgtttctaattagagcatcacagttctgattagtgtgtttttttagaagtgatttcccttaaatataaggaaaatgttaggaatctctgtgactacatttaattccacttggaatatagacaataatgaccttttatttaacccagcctatagttgttggattggattaaatatcactaccagggccaggtgcggtggttcacgcctgcaatcccagcactttgggaggccgaggtgggcggatcattaggtcaggagattgagaccatcctggctaacatggtgaaaccctgtctctactaaaagtacaaaaaattatccgggtgtgggggcatgcacctgtaatcccagctactcgggagactgaggcaggagaattacttgaacccaggaggtggaggttgcagtgagc

SEQ ID NO: 284456 - DNA, 2652 bp, Homo sapiens
  misc_feature (168)..(168): n is a, c, g, or t
  misc_feature (269)..(269): n is a, c, g, or t
aaaaattagccaggcatggtggcatgcacctgtaatcccagctattcaggggtctgaggcaggagaatcacttgaacccagggggcggaggttgcagttagccgaggtcgcgtcactgcactccagcctgggcgacagagcgagactccatctcaaaaaaaaaaaaanccaccaacaaaaaaaatcactaccagttgccagctgtgataagagctaaaacaaggggtactgtagtctcaaattataaatttctattgcctcatattacnaaagttccagtcaccttaagtgattgaaggttttgacattttatccagccaggtggtagtaataagcctcaaatccacagggtacacaacattttcaaggtctttttttttttttatcatacttaattcatgaataacccccatagtgtaggttagttagcactatcaaagtgactggtaaggacgcaggaaaataaaaagaggattcaattggattggtactgcaaaaagaatccattctgttcagcacatgaatttctgttctgaccttaagtttagatatatcaaagaaacaaaaagcatagaggcggctgggggtggtggctcacacctgtaatcccagcaccttgggaggccaaggcaggcagatcacctgaggtcgggagttcgagaccagcctgaccaacatggagaaaccctgtctctactaaaaatacaaaattagccaggcatggtggcgtatgcctggaaatcccagctactcaggaggctgaggcaggagaattgcttgaacccgggaggcagaggttgcagtgagccaagatcacgccattgcactccagcctgggcaacagagcaagattccatctcaaaagaaaaaaaaaatcacctctcatctttctgtttttaggagatcaatgatctgttggttaaggaaaagattatgcaacttgtccagcagagatcacaaatccaaacccttcagaagaaggtagtaaacttggagactgctctgagttacatgaccaaagagtttgagagtgaagttttaaaactgcagcaacacgcaatgatagagaaccaagcaggtcaggtagaaattgacaagctgcagcaccttcttcagatgaaggacagggaaatgaatcgtgtgaagaagctggccaagaacatactggatgagagaacagaagtggaaagattctttttagatgctctgcaccaagtgaagcaacagatcctaattagcaggaagcattataagcagatagcacaagctgctttcaatttaaaaatgagagcagcatgtacaggaagaacagaatatcccaaaatcagaacatttgatggcagagagcacagcaccaatagtgtgaatcaggatcttctggaggccgaaaaatggacacatattgaaggaaatgtggatattggagatttgacctgggagcagaaggaaaaagtattgcgattgctctttgcaaaaatgaatggctgtccttctaggaaatacaaccagagttctaggcctccagttccagactatgttgtttctgacagtggggaaacaaaggaatttgggtaagagctctcttgcttaagtaataaacatgagcccaacacgatggttcttgtgggcatcttgaatgtgctaattgaaagtaatatgacaagtctgttattctaaaccaggtttcatgtgtgtagagttgttgacggttctgttattttgtcattattgcagggatgaaagtaagcttcaagataaaatcttcatcacccagcaaattgcaatatcagactcttctggtgaagtggtgctacccactattccaaaagaacctcaggagtctgacacagtaaggagtctgtatctaatcaaacaatgtatattgttgtcacccttccccatgtcgcttcttgctaaatcacggttattttctctactagttgagagacttcagggatcagtggaatgagtaataaatagcattagtagattacataaatttttaaagcaatatccgtacaaatgcatattatactaatgcaaatgcaaatgtgtgcctctttttgtgtagaaacctataggttgccttttgaagtaaacagcctagccaaaatgtgtactatcttttacgtaagagtaaacatagtgaccttgtgactcttagctttccatcacaggtgggaagtcagagtcattacaacctagaggacaaaggcttataaggagatatgaaatgatttttttaagccaagtttttctctttaagagtttttaatttataatttgttattcataattagtacaatgtagaatctgagaaatttcaaatgaagccacattagaacaaaaagaaaatactgactttttagccgcgatcacatgaatataactgatgagtttttttcatctaagaaataagaaactctgagcagcaaatagttggccagatgagttgtttctaattagagcatcacagttctgattagtgtgtttttttagaaacaactcatctagccaaccgtggactagtactagtccacggttggctccagggaagaagctgttggcggatgtaccctatgagaaagcttggcagaagatgatcttagagttgtgttctaaggtggcatccttgggtaggaagcgttatta

SEQ ID NO: 284457 - DNA, 822 bp, Homo sapiens
gaatccgttctctctgggatgtgtagctttggaaatctgtctttgttgctctgggagaggggactcctggaatgtgtctgtgaataaagactagccgaagatactgtggcctcatgaataggaatgtctgcccatatgtcaggattggaaataatggatgaagatcaattaatcaaagacgtcttggataaattccttaattgtcatgagcaaacatatgatgaagaatttctgaacacttttactcatctttcacaagatacttggagatgaagttcaacttttttcacttgatgaagaatttgattatgacaatgtgatgctaacctccaagtttagtcctgcagagatagagaacatcaaagagctatgcaagcagcagaagagaaaggacaccagcccagacttagagaaatcctgtgactgattcacagaggcattttgtgtgtgtgtgcttattttaattttgttcttattctagcaacattagaataaaagataaactacaaaaaaaaaaaaaaaaaaaaaaaaaaaaaaaaaaaaagaaaaaaaaaaaaaaaaggggggggggggaaaaatatccccggggggcccattatgatggctgcccagtttttagtcaaaggggccccaagagggggctgataataagcgggcgcggggcagctaaacaacgcggggcgggaaaaaggccaacgcatcttgtggagagacccaatctgggggggacaatggggaaacccaggagttatgaggcgaggcataaaactcggggttgtggaaccccacacattgcgggcgaagtcgcgagaatgaattatg

SEQ ID NO: 284458 - DNA, 902 bp, Homo sapiens
gaatccgttctctctgggatgtgtagctttggaaatctgtctttgttgctctgggagaggggactcctggaatgtgtctgtgaataaagactagccgaagatactgtggcctcatgaataggaatgtctgcccatatgtcaggattggaaataatggatgaagatcaattaatcaaagacgtcttggataaattccttaattgtcatgagcaaacatatgatgaagaatttctgaacacttttactcatctttcacaagaggatcatgtgtccaaaaggggagtgtttggaactgattcttcagaaaacatttttacctcagcaaaagttactcataaaaatgaagcagatgactaccatcttagaaataaaaccatctttcttcgtacttcatcacaatgtttggaagaacaggtagataatttcctagatttagaagatttggacatggatgaagagattaaaccccaaatgagtgaggatttgctgctgcttccaggagaagtggagcaggatgtaagcaccagcattccttcctgtatcccttttgtggcccagcctcctacctgtgaagtgaagccaaagcccagtgttaaaagaatggacaaacagacggaagagatacttggagatgaagttcaacttttttcacttgatgaagaatttgattatgacaatgtgatgctaacctccaagtttagtcctgcagagatagagaacatcaaagagctatgcaagcagcagaagagaaaggacaccagcccagacttagagaaatcctgtgactgattcacagaggcattttgtgtgtgtgtgcttattttaattttgttcttattctagcaacattagaataaaagataaacctactataattccctttgtggaaatttacatgtgtg

SEQ ID NO: 284459 - DNA, 1643 bp, Homo sapiens
gaatccgttctctctgggatgtgtagctttggaaatctgtctttgttgctctgggagaggggactcctggaatgtgtctgtgaataaagactagccgaaggtgcgaagtgactagacgggagcaaaggaggaaaactagggaatgggaggtgagagtggctgacaccgacccaacgtccgggttgccggaaggctgcagcgcccggagcggtgtcgggcaaaccgctaccctggtattgctggagcctctcctggggacttttgaacaggtgacccgataggaagcacaactgcttctgttggagtgcggttacctggagaccgcagtctgaagggactcccggcagagatgtcgttacggtgtcctgcctgtctggatgcttaggagcgcgactcaaaactacacccctgacgaccctggaggtgcttggggcgggaggttgaagggggcaccgaggttacaaaagccgtgactgtcttacagaaccgaaagatggatctttgaatccctagagtgcaggggagacattgcctgttaaagatgtttaccacttctacatttagtaatagaaatacagttattaggttttaacgagtgcactttgaaggtcctttgttttcttcactgtttttactcctgtttttagggttcttttagggaagcagagaaggttcctaaacacatcttcttttcatcttcattctaggaaaatagagttagtggctttttcacatctttccagtccaagaacttttggatactgtactgtgaaacattaaatcttgctgatccgtgctggccatgttttcttgattgctccagagtagcaagtaacctcatatactgtggcctcatgaataggaatgtctgcccatatgtcaggattggaaataatggatgaagatcaattaatcaaagacgtcttggataaattccttaattgtcatgagcaaacatatgatgaagaatttctgaacacttttactcatctttcacaagaggatcatgtgtccaaaaggggagtgtttggaactgattcttcagaaaacatttttacctcagcaaaagttactcataaaaatgaagcagatgactaccatcttagaaataaaaccatctttcttcgtacttcatcacaatgtttggaagaacaggtagataatttcctagatttagaagatttggacatggatgaagagattaaaccccaaatgagtgaggatttgctgctgcttccaggagaagtggagcaggatgtaagcaccagcattccttcctgtatcccttttgtggcccagcctcctacctgtgaagtgaagccaaagcccagtgttaaaagaatggacaaacagacggaagagatacttggagatgaagttcaacttttttcacttgatgaagaatttgattatgacaatgtgatgctaacctccaagtttagtcctgcagagatagagaacatcaaagagctatgcaagcagcagaagagaaaggacaccagcccagacttagagaaatcctgtgactgattcacagaggcattttgtgtgtgtgtgcttattttaattttgttcttattctagcaacattagaataaaagataaacctactataattccctttgtggaaatttacatgtgtg

SEQ ID NO: 284460 - DNA, 1225 bp, Homo sapiens
gaatccgttctctctgggatgtgtagctttggaaatctgtctttgttgctctgggagaggggactcctggaatgtgtctgtgaataaagactagccgaaggtgcgaagtgactagacgggagcaaaggaggaaaactagggaatgggaggtgagagtggctgacaccgacccaacgtccgggttgccggaaggctgcagcgcccggagcggtgtcgggcaaaccgctaccctggtattgctggagcctctcctggggacttttgaacaggtgacccgataggaagcacaactgcttctgttggagtgcggttacctggagaccgcagtctgaagggactcccggcagagatgtcgttacggtgtcctgcctgtctggatgcttaggagcgcgactcaaaactacacccctgacgaccctggagatactgtggcctcatgaataggaatgtctgcccatatgtcaggattggaaataatggatgaagatcaattaatcaaagacgtcttggataaattccttaattgtcatgagcaaacatatgatgaagaatttctgaacacttttactcatctttcacaagaggatcatgtgtccaaaaggggagtgtttggaactgattcttcagaaaacatttttacctcagcaaaagttactcataaaaatgaagcagatgactaccatcttagaaataaaaccatctttcttcgtacttcatcacaatgtttggaagaacaggtagataatttcctagatttagaagatttggacatggatgaagagattaaaccccaaatgagtgaggatttgctgctgcttccaggagaagtggagcaggatgtaagcaccagcattccttcctgtatcccttttgtggcccagcctcctacctgtgaagtgaagccaaagcccagtgttaaaagaatggacaaacagacggaagagatacttggagatgaagttcaacttttttcacttgatgaagaatttgattatgacaatgtgatgctaacctccaagtttagtcctgcagagatagagaacatcaaagagctatgcaagcagcagaagagaaaggacaccagcccagacttagagaaatcctgtgactgattcacagaggcattttgtgtgtgtgtgcttattttaattttgttcttattctagcaacattagaataaaagataaacctactataattccctttgtggaaatttacatgtgtg

SEQ ID NO: 284461 - DNA, 1159 bp, Homo sapiens
gagatactttggaggatgaaagttcaacgttggtcacttgaatgaagaagttgattatgacaatgtgatggctaacctccaagtttagtcctgcagagatagagacatcaaagagctattcaagcagcagaagagaaaggacaccagcccagacgtagagaaatcgtgtgaataaagactagccgaaggtgcgaagtgactagacgggagcaaaggaggaaaactagggaatgggaggtgagagtggctgacaccgacccaacgtccgggttgccggaaggctgcagcgcccggagcggtgtcgggcaaaccgctaccctggtattgctggagcctctcctggggacttttgaacagatactgtggcctcatgaataggaatgtctgcccatatgtcaggattggaaataatggatgaagatcaattaatcaaagacgtcttggataaattccttaattgtcatgagcaaacatatgatgaagaatttctgaacacttttactcatctttcacaagaggatcatgtgtccaaaaggggagtgtttggaactgattcttcagaaaacatttttacctcagcaaaagttactcataaaaatgaagcagatgactaccatcttagaaataaaaccatctttcttcgtacttcatcacaatgtttggaagaacaggtagataatttcctagatttagaagatttggacatggatgaagagattaaaccccaaatgagtgaggatttgctgctgcttccaggagaagtggagcaggatgtaagcaccagcattccttcctgtatcccttttgtggcccagcctcctacctgtgaagtgaagccaaagcccagtgttaaaagaatggacaaacagacggaagagatacttggagatgaagttcaacttttttcacttgatgaagaatttgattatgacaatgtgatgctaacctccaagtttagtcctgcagagatagagaacatcaaagagctatgcaagcagcagaagagaaaggacaccagcccagacttagagaaatcctgtgactgattcacagaggcattttgtgtgtgtgtgcttattttaattttgttcttattctagcaacattagaataaaagataaacctactataattccctttgtggaaatttacatgtgtg

SEQ ID NO: 284462 - DNA, 951 bp, Homo sapiens
gaatccgttctctctgggatgtgtagctttggaaatctgtctttgttgctctgggagaggggactcctggaatgtgtctgtgaataaagactagccgaaggtgcgaagtgactagacgggagcaaaggaggaaaactagggaatgggagatactgtggcctcatgaataggaatgtctgcccatatgtcaggattggaaataatggatgaagatcaattaatcaaagacgtcttggataaattccttaattgtcatgagcaaacatatgatgaagaatttctgaacacttttactcatctttcacaagaggatcatgtgtccaaaaggggagtgtttggaactgattcttcagaaaacatttttacctcagcaaaagttactcataaaaatgaagcagatgactaccatcttagaaataaaaccatctttcttcgtacttcatcacaatgtttggaagaacaggtagataatttcctagatttagaagatttggacatggatgaagagattaaaccccaaatgagtgaggatttgctgctgcttccaggagaagtggagcaggatgtaagcaccagcattccttcctgtatcccttttgtggcccagcctcctacctgtgaagtgaagccaaagcccagtgttaaaagaatggacaaacagacggaagagatacttggagatgaagttcaacttttttcacttgatgaagaatttgattatgacaatgtgatgctaacctccaagtttagtcctgcagagatagagaacatcaaagagctatgcaagcagcagaagagaaaggacaccagcccagacttagagaaatcctgtgactgattcacagaggcattttgtgtgtgtgtgcttattttaattttgttcttattctagcaacattagaataaaagataaacctactataattccctttgtggaaatttacatgtgtg

SEQ ID NO: 284463 - DNA, 1092 bp, Homo sapiens
gagatactttggaggatgaaagttcaacgttggtcacttgaatgaagaagttgattatgacaatgtgatggctaacctccaagtttagtcctgcagagatagagacatcaaagagctattcaagcagcagaagagaaaggacaccagcccagacgtagagaaatcgtgtgaataaagactagccgaaggtgcgaagtgactagacgggagcaaaggaggaaaactagggaatgggaggtgagagtggctgacaccgacccaacgtccgggttgccggaaggctgcagcgcccggagcggtgtcgggcaaaccgctaccctggtattgctggagcctctcctggggacttttgaacagatactgtggcctcatgaataggaatgtctgcccatatgtcaggattggaaataatggatgaagatcaattaatcaaagacgtcttggataaattccttaattgtcatgagcaaacatatgatgaagaatttctgaacacttttactcatctttcacaagaggatcatgtgtccaaaaggggagtgtttggaactgattcttcagaaaacatttttacctcagcaaaagttactcataaaaatgaagcagatgactaccatcttagaaataaaaccatctttcttcgtacttcatcacaatgtttggaagaacagatttgctgctgcttccaggagaagtggagcaggatgtaagcaccagcattccttcctgtatcccttttgtggcccagcctcctacctgtgaagtgaagccaaagcccagtgttaaaagaatggacaaacagacggaagagatacttggagatgaagttcaacttttttcacttgatgaagaatttgattatgacaatgtgatgctaacctccaagtttagtcctgcagagatagagaacatcaaagagctatgcaagcagcagaagagaaaggacaccagcccagacttagagaaatcctgtgactgattcacagaggcattttgtgtgtgtgtgcttattttaattttgttcttattctagcaacattagaataaaagataaacctactataattccctttgtggaaatttacatgtgtg

SEQ ID NO: 284464 - DNA, 897 bp, Homo sapiens
gaatccgttctctctgggatgtgtagctttggaaatctgtctttgttgctctgggagaggggactcctggaatgtgtctgtgaataaagactagccgaaggtgcgaagtgactagacgggagcaaaggaggaaaactagggaatgggagatactgtggcctcatgaataggaatgtctgcccatatgtcaggattggaaataatggatgaagatcaattaatcaaagacgtcttggataaattccttaattgtcatgagcaaacatatgatgaagaatttctgaacacttttactcatctttcacaagaggatcatgtgtccaaaaggggagtgtttggaactgattcttcagaaaacatttttacctcagcaaaagttactcataaaaatgaagcagatgactaccatcttagaaataaaaccatctttcttcgtacttcatcacaatgtttggaagaacaggtagataatttcctagatttagaagatttggacatggatgaagagattaaaccccaaatgagtgaggatttgctgctgcttccaggagaagtggagcaggatgtaagcaccagcattccttcctgtatcccttttgtggcccagcctcctacctgtgaagtgaagccaaagcccattttttcacttgatgaagaatttgattatgacaatgtgatgctaacctccaagtttagtcctgcagagatagagaacatcaaagagctatgcaagcagcagaagagaaaggacaccagcccagacttagagaaatcctgtgactgattcacagaggcattttgtgtgtgtgtgcttattttaattttgttcttattctagcaacattagaataaaagataaacctactataattccctttgtggaaatttacatgtgtg

SEQ ID NO: 284465 - DNA, 680 bp, Homo sapiens
gaatccgttctctctgggatgtgtagctttggaaatctgtctttgttgctctgggagaggggactcctggaatgtgtctgtgaataaagactagccgaagatactgtggcctcatgaataggaatgtctgcccatatgtcaggattggaaataatggatgaagatcaattaatcaaagacgtcttggataaattccttaattgtcatgagcaaacatatgatgaagaatttctgaacacttttactcatctttcacaagatttgctgctgcttccaggagaagtggagcaggatgtaagcaccagcattccttcctgtatcccttttgtggcccagcctcctacctgtgaagtgaagccaaagcccagtgttaaaagaatggacaaacagacggaagagatacttggagatgaagttcaacttttttcacttgatgaagaatttgattatgacaatgtgatgctaacctccaagtttagtcctgcagagatagagaacatcaaagagctatgcaagcagcagaagagaaaggacaccagcccagacttagagaaatcctgtgactgattcacagaggcattttgtgtgtgtgtgcttattttaattttgttcttattctagcaacattagaataaaagataaacctactataattccctttgtggaaatttacatgtgtg

SEQ ID NO: 284466 - DNA, 817 bp, Homo sapiens
gagatactttggaggatgaaagttcaacgttggtcacttgaatgaagaagttgattatgacaatgtgatggctaacctccaagtttagtcctgcagagatagagacatcaaagagctattcaagcagcagaagagaaaggacaccagcccagacgtagagaaatcgtgtgaataaagactagccgaaggtgcgaagtgactagacgggagcaaaggaggaaaactagggaatgggagatactgtggcctcatgaataggaatgtctgcccatatgtcaggattggaaataatggatgaagatcaattaatcaaagacgtcttggataaattccttaattgtcatgagcaaacatatgatgaagaatttctgaacacttttactcatctttcacaagatttgctgctgcttccaggagaagtggagcaggatgtaagcaccagcattccttcctgtatcccttttgtggcccagcctcctacctgtgaagtgaagccaaagcccagtgttaaaagaatggacaaacagacggaagagatacttggagatgaagttcaacttttttcacttgatgaagaatttgattatgacaatgtgatgctaacctccaagtttagtcctgcagagatagagaacatcaaagagctatgcaagcagcagaagagaaaggacaccagcccagacttagagaaatcctgtgactgattcacagaggcattttgtgtgtgtgtgcttattttaattttgttcttattctagcaacattagaataaaagataaacctactataattccctttgtggaaatttacatgtgtg

SEQ ID NO: 284467 - DNA, 8228 bp, Homo sapiens
agaggctgcggtgagtccgccagccccagctgctcctcctcaagcccccaaggcccttcggcgggcccctgctgaaagaccggcatgccctattctgtgggcttccgcgaagccgatgctgctaccagctttctgagagcagcaagatcaggtaacttggacaaagctttggatcacctgcggaatggggtagatattaacacctgtaaccagaatgggttgaatggcttgcatctggcttctaaggaaggccatgtgaaaatggtggttgaacttctgcacaaagaaatcattctagaaacgacaaccaagaaggggaacacggccctgcacatcgctgctctagccgggcaggatgaggtggtccgggagcttgtcaactatggagccaacgtcaatgcccagtcacagaaaggttttacacccctgtacatggcagcacaagagaaccacttggaagtggttaagtttttactggaaaatggagctaaccagaatgtagccacagaagacggcttcacgcctctggcggtagccctgcagcagggccatgagaacgtcgtcgcgcacctcatcaactacggcaccaaggggaaggtgcgcctcccggccctgcacatcgcggcccgcaacgacgacacgcgcacggctgcggtgctgctgcagaacgaccccaacccggacgtgctttccaagacgggattcacgcccctgcacattgcggctcactacgagaacctcaacgtggcccagttgctcctcaacagaggagccagcgtcaatttcacaccacagaacggcatcacgccactgcacatcgcctcccgcaggggcaacgtgatcatggtgcggctgctgctggatcggggagcccagatagaaaccaagaccaaggacgaattgacacctctccactgtgcagctcgaaatgggcacgtgcgaatctcagagatcctgctggaccacggggcaccaatccaagccaaaaccaagaacggcctgtccccaattcacatggcggctcagggagaccacctcgactgtgtccggctcctgttgcaatacgacgcagagatagacgacatcaccctggaccacctgaccccactccacgtggctgcccactgtggacaccacagggtggctaaggtccttctggataaaggggccaaacccaactccagagccctgaatggctttacccccttacacatcgcctgcaaaaagaaccacgtccgtgtcatggagctgctgctgaagacgggagcctcgatcgacgcggtcaccgagtctggcctgacacctctccacgtggcctccttcatggggcaccttcccatcgtgaagaacctcctgcagcggggggcgtcgcccaacgtctccaacgtgaaagtggagaccccgctacacatggcagccagagccgggcacacggaagtggccaaatatttactccagaacaaagccaaagtcaatgccaaggccaaggatgaccagaccccacttcactgtgcagctcgcatcggccacacaaacatggtgaagctcctgctggaaaataacgccaaccccaacctggccaccaccgccgggcacacccccctgcacattgcagcccgtgagggccatgtggaaacagtcctggcccttctggaaaaggaagcatcccaggcctgcatgaccaagaaaggatttacccctctgcacgtggcggccaagtacgggaaggtgcgggtggcagagctgctgctggagcgggacgcacacccgaatgctgccggaaaaaatggcctgacccccctgcacgtggccgtccatcacaacaacctggacatcgtcaagctgctgcttccccggggcggctccccgcacagccctgcctggaatggctacacccctttgcacatcgctgccaagcagaaccaggtggaggtggcccgtagtctgctgcagtatgggggctcagcaaacgccgagtcggtgcaaggtgtgacgccccttcacctggccgcccaggagggccacgcagagatggtggctctgctgctctcgaaacaagccaatggcaacctggggaacaagagcggactcactcccctccatctggtagcacaagaaggccacgttccagtggcagatgtgctgatcaaacacggtgtcatggtggacgccaccacccggatgggctacactcccctccatgtggccagtcactatggaaacatcaagctggtgaagtttctgctgcagcaccaggcagatgtcaatgccaagaccaagctaggatacagccccctgcaccaggcagcccagcagggacacacagacatcgtgactctgcttctgaaaaacggtgcttccccaaacgaggtcagctcggatggaaccacacctctggccatagccaagcgcttgggctacatttctgtcaccgacgtgctcaaggtcgtcacggatgaaaccagtttcgtgttagtcagtgataagcatcgaatgagtttccctgagacagttgatgagatcctggatgtctcggaagatgaaggggaagaactcatcagcttcaaggctgagaggcgggattccagggatgttgatgaagagaaggagctgctggattttgtgccgaagctagaccaagtggtggaatctccagccatccccaggattccctgtgccatgcctgagacagtggtgatcaggtcagaagagcaggagcaggcatctaaagagtatgatgaggactccctcatccccagcagcccggccaccgagacctcagacaacatcagcccggtggccagcccggtgcatacagggtttctggtgagcttcatggttgacgcccggggtggttccatgagaggaagtcgccacaacggcctgcgagtggtgatcccgccacggacgtgcgcagcgcccacccgcatcacctgccgcctggtcaagccccagaagctcagcacgccgcccccactggccgaggaggagggcctggccagcaggatcatagcactggggcccacgggggcacagttcctgagccctgtaatcgtggagatcccgcactttgcctcccatggccgtggagaccgcgagctcgtggttctgaggagcgaaaacggctccgtgtggaaggagcacaggagccgctatggagagagctacctggatcagatcctcaacgggatggacgaagagctggggagcctggaggagctagagaagaagagggtgtgccgaatcatcaccaccgacttcccgctgtacttcgtgatcatgtcacggctctgccaggactacgacatcatcggtcccgaagggggctccctgaagagcaagctggtgcccctggtacaggcaacgttcccggagaatgccgtcaccaagagagtgaagctggctctgcaggcccagcctgtcccggatgagcttgtcactaagctcctgggcaaccaggccacattcagccccattgtcaccgtggagccccggcgccggaagttccaccgccccattgggcttcggatcccactacctccttcctggaccgacaacccgagggacagtggggagggagacaccaccagcctgcgcctgctttgcagcgtcattggaggaacagaccaagcccagtgggaagacataacaggaaccaccaaacttgtatatgccaacgagtgcgccaacttcaccaccaatgtctctgccaggttttggctgtcggactgtcctcggactgctgaggctgtgaactttgccaccctgctgtacaaagagctcactgcagtgccctacatggccaaattcgtcatctttgccaagatgaatgacccccgagaggggcgcctgcgctgctactgcatgacagatgataaagtggacaagaccctggagcagcatgagaacttcgtggaggtggcccggagcagggacatagaggtgttggaaggaatgtccctgtttgcagaactctctgggaacctggtgcctgtgaagaaagctgcccagcagcggagcttccacttccagtcatttcgggagaaccgtctggccatgcctgtaaaggtgagggacagcagtcgagagccgggagggtccctgtcgtttctgcgcaaggcgatgaagtacgaggacacccagcacattctctgccacctgaacatcaccatgcccccctgcgctaagggaagtggagccgaagataggagaaggaccccgacgcccctggccctgcgatacagcattctcagtgagtccacaccaggttctctcagtgggacagagcaggcagagatgaagatggctgttatctcagagcacctcggtctcagctgggcagagttggcccgggagctgcagttcagtgtggaagacatcaacaggatccgagtggaaaatcccaactccctgttggagcagagtgtggccttgctgaacctctgggtcatccgtgaaggccaaaacgcaaacatggagaatctgtacacagccctgcagagcattgaccgtggcgagatcgtgaacatgctggagggttccggccgacagagccgcaacttgaagccagacaggcggcacaccgaccgcgactactcgctgtcaccctcccagatgaatggttactcctcactgcaggacgagctgctgtcccctgcctccctgggctgtgcactttcctctccgctacgtgcagaccagtactggaatgaggtggccgtcctagacgccatccccttggcggccacggagcatgacaccatgctggagatgtctgacatgcaggtgtggtctgcgggcctcacgccttctctggtcactgctgaggactcctctctggagtgtagcaaggctgaggactctgatgccacaggtcacgagtggaagttggagggggcactctcagaggaaccgcggggccccgagttgggctctctggaacttgtggaggacgacacagtggattcagatgccacaaatggccttatcgatttgcttgaacaggaggaaggtcagaggtcagaagagaagctgccaggttctaagaggcaggatgacgcgacaggtgcagggcaggactcagagaatgaagtgtctcttgtttcaggccatcagagggggcaagcccgaatcacacattcccccaccgtgagtcaggtgacggagaggagtcaggacagactgcaggactgggatgcagacggctcgattgtctcatacctgcaagatgctgcacaaggttcctggcaagaggaggtcacgcaaggtccacactcattccagggaacaagtaccatgactgaagggctagagcccggtggatctcaggagtacgagaaggtcctggtgtctgtaagtgagcacacgtggacagaacagcccgaggctgagagctcccaggccgacagggaccggaggcagcaaggccaagaagagcaggtgcaggaggccaagaacaccttcacccaagtggtgcaggggaatgagtttcagaatattccaggggagcaggtgacagaggagcaattcacggatgagcagggcaacattgtcaccaagaagatcattcgcaaggtggttcgacagatagacttgtccagcgccgatgccgcccaggagcacgaggaggtgactgtagaggggcccctggaggatcccagtgagctggaggtcgatattgattactttatgaaacactccaaggatcacacctcgacacccaacccctgaaccccacacactctgccatgcacacaggaggagagctggacctgagggccaccgcagcggtgcacacattcctctgggctgacggcatgacctctgtaagggactcctgctagtcccctcttggcatgaatgactgactgtagacgcatgacctccaggcttcaatcctgcctcttgcaatgacagctgatctgtcggaaccaggacacaaaagcagcaagaagcggggagagagagggatagaaaacaagcgcaggagagcctgcgaacgcaaaagtgaatgagggctttttgtggctggggatgggttttggttttggggttttttttttaaattgttttgacttcgtacagggtactttttcccaacctcatctgtcagaaatccatgtgggcttcctggaaagaaaaaaaaaaaaaaagaaaactaggcatgaaatcagtttaacaccttaatcttaagccatgtcctcatctgcccaccctccccaacccacatacctccattccacttgtgacaccccctcgactccctggtgacgctcctcccagatcgctctacatgacattcaggacacacacacacacacacacacacacaccactcgcctccactgaatctacacacagattttactgtgacttctgaagctgtggataaattggaattttttatgttgtctctctctctgccaatttcaatacgaatcatcttccaatggaaaatcattaccttgaagagtgcattcggggttccttgtgttagggacttaagaatctgaggcgaggacccccaggcttacctgtaggactcaaagggagccaggaccccatctgaaagggtctcctctctcagttgggggacaggccggtggctgacccaggattgcaccagcatgtccatagagaagaggttttctatgtcttcaagcactatatcatagtccgtgttcaaagtgtaaactgtacagtaatcagccttgtgtatatgaaaaacaataaatactatgcaaaccaatagaaacatttagcagtacgtacagagcctgacagcgcagctcctgaggacttctgcggctgcaggagaaggagctgtggcctgtctttcagtgaaagaggaaggaaaggagtagggctagtgaatgtatctgccaggtcttagaagtcaggaccacccagggtctcccagagtgaacttggtgctctaagtccaggcagcctgcaggctggggaccctgggtgcaggtgccaggctcgaggctgttccctgtcctgcctcagtgcctcccctctgcccagcccctgtggcctcttggagaggcgagccagggggctccccggaccgcatggccggtgagagtagagtcggaggcggagagcctggacgcccagaggccggggccaggctctgggtcaaggcaggaaggagacagacagctggcagttcctcgcctcggtgccatcagggaggagccttaagttccactagagcctccggcccagggaggccagaatcagcacaatcccggccccgccctcgcggcgggcgcccccagggccaggagagagagacagggctggctcctctcgcccctggagccgcggtgtggacggcccggccccgtccgccccgccgctctgcgggagtgtccttcgggacacacttaaaccttccaagtagcacagaagccccctccacgtcagagccccctggccgcggggcctgtgagcggagaggggccctgcttcccacacaaatccgccccggtgcacccccggccaggcaggccccggggcggcctaggcgccttgtcggccgggggtggggctgcttttgcttcctttagaggggcgggcagggagaggaagctctagctccgggcctgagtttccccgaggctgcgtcggaggagctgcagggcgagcccggacggctgccgtctccgccagaggccaccccggcccggcctccaggcagaggcgcccccctccatcctcccccatcccgggggccacggcaggggggccgcacagcgcggctgggaccgattcggtgacggcccaaggaagctgggcgcagggctcgcctctcccgcctcgatcctgcaccttcctctcccaggtcgctgctgcagccaacccagtagcccccttagcgcccccgcggaccccgcagctccagactccgctttggcacctctgctccggctggcatggctgcacgctccggctgctagtaggagccgttaggggaggagtttggggtctccacacgatgcctagagaatgctgcagtctgcacattagacgctttttagaagttttgaaattaccttgatttttttaattgttatgaaaatggatcttttcttgactctcccacatgctctgttatgggagagaatcccctaccctactctgatgtatagaccattctcccttcaccagccgaaccaatgtcaaaattaataaagaaatggactaatggcaaaaggctc

SEQ ID NO: 284468 - DNA, 8288 bp, Homo sapiens
agaggctgcggtgagtccgccagccccagctgctcctcctcaagcccccaaggcccttcggcgggcccctgctgaaagaccggcatgccctattctgtgggcttccgcgaagccgatgctgctaccagctttctgagagcagcaagatcaggtaacttggacaaagctttggatcacctgcggaatggggtagatattaacacctgtaaccagaatgggttgaatggcttgcatctggcttctaaggaaggccatgtgaaaatggtggttgaacttctgcacaaagaaatcattctagaaacgacaaccaagaaggggaacacggccctgcacatcgctgctctagccgggcaggatgaggtggtccgggagcttgtcaactatggagccaacgtcaatgcccagtcacagaaaggttttacacccctgtacatggcagcacaagagaaccacttggaagtggttaagtttttactggaaaatggagctaaccagaatgtagccacagaagacggcttcacgcctctggcggtagccctgcagcagggccatgagaacgtcgtcgcgcacctcatcaactacggcaccaaggggaaggtgcgcctcccggccctgcacatcgcggcccgcaacgacgacacgcgcacggctgcggtgctgctgcagaacgaccccaacccggacgtgctttccaagacgggattcacgcccctgcacattgcggctcactacgagaacctcaacgtggcccagttgctcctcaacagaggagccagcgtcaatttcacaccacagaacggcatcacgccactgcacatcgcctcccgcaggggcaacgtgatcatggtgcggctgctgctggatcggggagcccagatagaaaccaagaccaaggacgaattgacacctctccactgtgcagctcgaaatgggcacgtgcgaatctcagagatcctgctggaccacggggcaccaatccaagccaaaaccaagaacggcctgtccccaattcacatggcggctcagggagaccacctcgactgtgtccggctcctgttgcaatacgacgcagagatagacgacatcaccctggaccacctgaccccactccacgtggctgcccactgtggacaccacagggtggctaaggtccttctggataaaggggccaaacccaactccagagccctgaatggctttacccccttacacatcgcctgcaaaaagaaccacgtccgtgtcatggagctgctgctgaagacgggagcctcgatcgacgcggtcaccgagtctggcctgacacctctccacgtggcctccttcatggggcaccttcccatcgtgaagaacctcctgcagcggggggcgtcgcccaacgtctccaacgtgaaagtggagaccccgctacacatggcagccagagccgggcacacggaagtggccaaatatttactccagaacaaagccaaagtcaatgccaaggccaaggatgaccagaccccacttcactgtgcagctcgcatcggccacacaaacatggtgaagctcctgctggaaaataacgccaaccccaacctggccaccaccgccgggcacacccccctgcacattgcagcccgtgagggccatgtggaaacagtcctggcccttctggaaaaggaagcatcccaggcctgcatgaccaagaaaggatttacccctctgcacgtggcggccaagtacgggaaggtgcgggtggcagagctgctgctggagcgggacgcacacccgaatgctgccggaaaaaatggcctgacccccctgcacgtggccgtccatcacaacaacctggacatcgtcaagctgctgcttccccggggcggctccccgcacagccctgcctggaatggctacacccctttgcacatcgctgccaagcagaaccaggtggaggtggcccgtagtctgctgcagtatgggggctcagcaaacgccgagtcggtgcaaggtgtgacgccccttcacctggccgcccaggagggccacgcagagatggtggctctgctgctctcgaaacaagccaatggcaacctggggaacaagagcggactcactcccctccatctggtagcacaagaaggccacgttccagtggcagatgtgctgatcaaacacggtgtcatggtggacgccaccacccggatgggctacactcccctccatgtggccagtcactatggaaacatcaagctggtgaagtttctgctgcagcaccaggcagatgtcaatgccaagaccaagctaggatacagccccctgcaccaggcagcccagcagggacacacagacatcgtgactctgcttctgaaaaacggtgcttccccaaacgaggtcagctcggatggaaccacacctctggccatagccaagcgcttgggctacatttctgtcaccgacgtgctcaaggtcgtcacggatgaaaccagtttcgtgttagtcagtgataagcatcgaatgagtttccctgagacagttgatgagatcctggatgtctcggaagatgaaggggaagaactcatcagcttcaaggctgagaggcgggattccagggatgttgatgaagagaaggagctgctggattttgtgccgaagctagaccaagtggtggaatctccagccatccccaggattccctgtgccatgcctgagacagtggtgatcaggtcagaagagcaggagcaggcatctaaagagtatgatgaggactccctcatccccagcagcccggccaccgagacctcagacaacatcagcccggtggccagcccggtgcatacagggtttctggtgagcttcatggttgacgcccggggtggttccatgagaggaagtcgccacaacggcctgcgagtggtgatcccgccacggacgtgcgcagcgcccacccgcatcacctgccgcctggtcaagccccagaagctcagcacgccgcccccactggccgaggaggagggcctggccagcaggatcatagcactggggcccacgggggcacagttcctgagccctgtaatcgtggagatcccgcactttgcctcccatggccgtggagaccgcgagctcgtggttctgaggagcgaaaacggctccgtgtggaaggagcacaggagccgctatggagagagctacctggatcagatcctcaacgggatggacgaagagctggggagcctggaggagctagagaagaagagggtgtgccgaatcatcaccaccgacttcccgctgtacttcgtgatcatgtcacggctctgccaggactacgacatcatcggtcccgaagggggctccctgaagagcaagctggtgcccctggtacaggcaacgttcccggagaatgccgtcaccaagagagtgaagctggctctgcaggcccagcctgtcccggatgagcttgtcactaagctcctgggcaaccaggccacattcagccccattgtcaccgtggagccccggcgccggaagttccaccgccccattgggcttcggatcccactacctccttcctggaccgacaacccgagggacagtggggagggagacaccaccagcctgcgcctgctttgcagcgtcattggaggaacagaccaagcccagtgggaagacataacaggaaccaccaaacttgtatatgccaacgagtgcgccaacttcaccaccaatgtctctgccaggttttggctgtcggactgtcctcggactgctgaggctgtgaactttgccaccctgctgtacaaagagctcactgcagtgccctacatggccaaattcgtcatctttgccaagatgaatgacccccgagaggggcgcctgcgctgctactgcatgacagatgataaagtggacaagaccctggagcagcatgagaacttcgtggaggtggcccggagcagggacatagaggtgttggaaggaatgtccctgtttgcagaactctctgggaacctggtgcctgtgaagaaagctgcccagcagcggagcttccacttccagtcatttcgggagaaccgtctggccatgcctgtaaaggtgagggacagcagtcgagagccgggagggtccctgtcgtttctgcgcaaggcgatgaagtacgaggacacccagcacattctctgccacctgaacatcaccatgcccccctgcgctaagggaagtggagccgaagataggagaaggaccccgacgcccctggccctgcgatacagcattctcagtgagtccacaccaggttctctcagtgggacagagcaggcagagatgaagatggctgttatctcagagcacctcggtctcagctgggcagagttggcccgggagctgcagttcagtgtggaagacatcaacaggatccgagtggaaaatcccaactccctgttggagcagagtgtggccttgctgaacctctgggtcatccgtgaaggccaaaacgcaaacatggagaatctgtacacagccctgcagagcattgaccgtggcgagatcgtgaacatgctggagggttccggccgacagagccgcaacttgaagccagacaggcggcacaccgaccgcgactactcgctgtcaccctcccagatgaatggttactcctcactgcaggacgagctgctgtcccctgcctccctgggctgtgcactttcctctccgctacgtgcagaccagtactggaatgaggtggccgtcctagacgccatccccttggcggccacggagcatgacaccatgctggagatgtctgacatgcaggtgtggtctgcgggcctcacgccttctctggtcactgctgaggactcctctctggagtgtagcaaggctgaggactctgatgccacaggtcacgagtggaagttggagggggcactctcagaggaaccgcggggccccgagttgggctctctggaacttgtggaggacgacacagtggattcagatgccacaaatggccttatcgatttgcttgaacaggaggaaggtcagaggtcagaagagaagctgccaggttctaagaggcaggatgacgcgacaggtgcagggcaggactcagagaatgaagtgtctcttgtttcaggccatcagagggggcaagcccgaatcacacattcccccaccgtgagtcaggtgacggagaggagtcaggacagactgcaggactgggatgcagacggctcgattgtctcatacctgcaagatgctgcacaaggttcctggcaagaggaggtcacgcaaggtccacactcattccagggaacaagtaccatgactgaagggctagagcccggtggatctcaggagtacgagaaggtcctggtgtctgtaagtgagcacacgtggacagaacagcccgaggctgagagctcccaggccgacagggaccggaggcagcaaggccaagaagagcaggtgcaggaggccaagaacaccttcacccaagtggtgcaggggaatgagtttcagaatattccaggggagcaggtgacagaggagcaattcacggatgagcagggcaacattgtcaccaagaagatcattcgcaaggtggttcgacagatagacttgtccagcgccgatgccgcccaggagcacgaggaggtggagctgagagggagtggcctacagccggacctgatagagggcaggaagggggcgcagatagtgaagcgggccagcctgaaaagggggaaacagtgaccccgagccgctctccttggagtagcctctcgggaggatcacacctcgacacccaacccctgaaccccacacactctgccatgcacacaggaggagagctggacctgagggccaccgcagcggtgcacacattcctctgggctgacggcatgacctctgtaagggactcctgctagtcccctcttggcatgaatgactgactgtagacgcatgacctccaggcttcaatcctgcctcttgcaatgacagctgatctgtcggaaccaggacacaaaagcagcaagaagcggggagagagagggatagaaaacaagcgcaggagagcctgcgaacgcaaaagtgaatgagggctttttgtggctggggatgggttttggttttggggttttttttttaaattgttttgacttcgtacagggtactttttcccaacctcatctgtcagaaatccatgtgggcttcctggaaagaaaaaaaaaaaaaaagaaaactaggcatgaaatcagtttaacaccttaatcttaagccatgtcctcatctgcccaccctccccaacccacatacctccattccacttgtgacaccccctcgactccctggtgacgctcctcccagatcgctctacatgacattcaggacacacacacacacacacacacacacaccactcgcctccactgaatctacacacagattttactgtgacttctgaagctgtggataaattggaattttttatgttgtctctctctctgccaatttcaatacgaatcatcttccaatggaaaatcattaccttgaagagtgcattcggggttccttgtgttagggacttaagaatctgaggcgaggacccccaggcttacctgtaggactcaaagggagccaggaccccatctgaaagggtctcctctctcagttgggggacaggccggtggctgacccaggattgcaccagcatgtccatagagaagaggttttctatgtcttcaagcactatatcatagtccgtgttcaaagtgtaaactgtacagtaatcagccttgtgtatatgaaaaacaataaatactatgcaaaccaatagaaacatttagcagtacgtacagagcctgacagcgcagctcctgaggacttctgcggctgcaggagaaggagctgtggcctgtctttcagtgaaagaggaaggaaaggagtagggctagtgaatgtatctgccaggtcttagaagtcaggaccacccagggtctcccagagtgaacttggtgctctaagtccaggcagcctgcaggctggggaccctgggtgcaggtgccaggctcgaggctgttccctgtcctgcctcagtgcctcccctctgcccagcccctgtggcctcttggagaggcgagccagggggctccccggaccgcatggccggtgagagtagagtcggaggcggagagcctggacgcccagaggccggggccaggctctgggtcaaggcaggaaggagacagacagctggcagttcctcgcctcggtgccatcagggaggagccttaagttccactagagcctccggcccagggaggccagaatcagcacaatcccggccccgccctcgcggcgggcgcccccagggccaggagagagagacagggctggctcctctcgcccctggagccgcggtgtggacggcccggccccgtccgccccgccgctctgcgggagtgtccttcgggacacacttaaaccttccaagtagcacagaagccccctccacgtcagagccccctggccgcggggcctgtgagcggagaggggccctgcttcccacacaaatccgccccggtgcacccccggccaggcaggccccggggcggcctaggcgccttgtcggccgggggtggggctgcttttgcttcctttagaggggcgggcagggagaggaagctctagctccgggcctgagtttccccgaggctgcgtcggaggagctgcagggcgagcccggacggctgccgtctccgccagaggccaccccggcccggcctccaggcagaggcgcccccctccatcctcccccatcccgggggccacggcaggggggccgcacagcgcggctgggaccgattcggtgacggcccaaggaagctgggcgcagggctcgcctctcccgcctcgatcctgcaccttcctctcccaggtcgctgctgcagccaacccagtagcccccttagcgcccccgcggaccccgcagctccagactccgctttggcacctctgctccggctggcatggctgcacgctccggctgctagtaggagccgttaggggaggagtttggggtctccacacgatgcctagagaatgctgcagtctgcacattagacgctttttagaagttttgaaattaccttgatttttttaattgttatgaaaatggatcttttcttgactctcccacatgctctgttatgggagagaatcccctaccctactctgatgtatagaccattctcccttcaccagccgaaccaatgtcaaaattaataaagaaatggactaatggcaaaaggctc

SEQ ID NO: 284469 - DNA, 7742 bp, Homo sapiens
agaggctgcggtgagtccgccagccccagctgctcctcctcaagcccccaaggcccttcggcgggcccctgctgaaagaccggcatgccctattctgtgggcttccgcgaagccgatgctgctaccagctttctgagagcagcaagatcaggtaacttggacaaagctttggatcacctgcggaatggggtagatattaacacctgtaaccagaatgggttgaatggcttgcatctggcttctaaggaaggccatgtgaaaatggtggttgaacttctgcacaaagaaatcattctagaaacgacaaccaagaaggggaacacggccctgcacatcgctgctctagccgggcaggatgaggtggtccgggagcttgtcaactatggagccaacgtcaatgcccagtcacagaaaggttttacacccctgtacatggcagcacaagagaaccacttggaagtggttaagtttttactggaaaatggagctaaccagaatgtagccacagaagacggcttcacgcctctggcggtagccctgcagcagggccatgagaacgtcgtcgcgcacctcatcaactacggcaccaaggggaaggtgcgcctcccggccctgcacatcgcggcccgcaacgacgacacgcgcacggctgcggtgctgctgcagaacgaccccaacccggacgtgctttccaagacgggattcacgcccctgcacattgcggctcactacgagaacctcaacgtggcccagttgctcctcaacagaggagccagcgtcaatttcacaccacagaacggcatcacgccactgcacatcgcctcccgcaggggcaacgtgatcatggtgcggctgctgctggatcggggagcccagatagaaaccaagaccaaggacgaattgacacctctccactgtgcagctcgaaatgggcacgtgcgaatctcagagatcctgctggaccacggggcaccaatccaagccaaaaccaagaacggcctgtccccaattcacatggcggctcagggagaccacctcgactgtgtccggctcctgttgcaatacgacgcagagatagacgacatcaccctggaccacctgaccccactccacgtggctgcccactgtggacaccacagggtggctaaggtccttctggataaaggggccaaacccaactccagagccctgaatggctttacccccttacacatcgcctgcaaaaagaaccacgtccgtgtcatggagctgctgctgaagacgggagcctcgatcgacgcggtcaccgagtctggcctgacacctctccacgtggcctccttcatggggcaccttcccatcgtgaagaacctcctgcagcggggggcgtcgcccaacgtctccaacgtgaaagtggagaccccgctacacatggcagccagagccgggcacacggaagtggccaaatatttactccagaacaaagccaaagtcaatgccaaggccaaggatgaccagaccccacttcactgtgcagctcgcatcggccacacaaacatggtgaagctcctgctggaaaataacgccaaccccaacctggccaccaccgccgggcacacccccctgcacattgcagcccgtgagggccatgtggaaacagtcctggcccttctggaaaaggaagcatcccaggcctgcatgaccaagaaaggatttacccctctgcacgtggcggccaagtacgggaaggtgcgggtggcagagctgctgctggagcgggacgcacacccgaatgctgccggaaaaaatggcctgacccccctgcacgtggccgtccatcacaacaacctggacatcgtcaagctgctgcttccccggggcggctccccgcacagccctgcctggaatggctacacccctttgcacatcgctgccaagcagaaccaggtggaggtggcccgtagtctgctgcagtatgggggctcagcaaacgccgagtcggtgcaaggtgtgacgccccttcacctggccgcccaggagggccacgcagagatggtggctctgctgctctcgaaacaagccaatggcaacctggggaacaagagcggactcactcccctccatctggtagcacaagaaggccacgttccagtggcagatgtgctgatcaaacacggtgtcatggtggacgccaccacccggatgggctacactcccctccatgtggccagtcactatggaaacatcaagctggtgaagtttctgctgcagcaccaggcagatgtcaatgccaagaccaagctaggatacagccccctgcaccaggcagcccagcagggacacacagacatcgtgactctgcttctgaaaaacggtgcttccccaaacgaggtcagctcggatggaaccacacctctggccatagccaagcgcttgggctacatttctgtcaccgacgtgctcaaggtcgtcacggatgaaaccagtttcgtgttagtcagtgataagcatcgaatgagtttccctgagacagttgatgagatcctggatgtctcggaagatgaaggggaagaactcatcagcttcaaggctgagaggcgggattccagggatgttgatgaagagaaggagctgctggattttgtgccgaagctagaccaagtggtggaatctccagccatccccaggattccctgtgccatgcctgagacagtggtgatcaggtcagaagagcaggagcaggcatctaaagagtatgatgaggactccctcatccccagcagcccggccaccgagacctcagacaacatcagcccggtggccagcccggtgcatacagggtttctggtgagcttcatggttgacgcccggggtggttccatgagaggaagtcgccacaacggcctgcgagtggtgatcccgccacggacgtgcgcagcgcccacccgcatcacctgccgcctggtcaagccccagaagctcagcacgccgcccccactggccgaggaggagggcctggccagcaggatcatagcactggggcccacgggggcacagttcctgagccctgtaatcgtggagatcccgcactttgcctcccatggccgtggagaccgcgagctcgtggttctgaggagcgaaaacggctccgtgtggaaggagcacaggagccgctatggagagagctacctggatcagatcctcaacgggatggacgaagagctggggagcctggaggagctagagaagaagagggtgtgccgaatcatcaccaccgacttcccgctgtacttcgtgatcatgtcacggctctgccaggactacgacatcatcggtcccgaagggggctccctgaagagcaagctggtgcccctggtacaggcaacgttcccggagaatgccgtcaccaagagagtgaagctggctctgcaggcccagcctgtcccggatgagcttgtcactaagctcctgggcaaccaggccacattcagccccattgtcaccgtggagccccggcgccggaagttccaccgccccattgggcttcggatcccactacctccttcctggaccgacaacccgagggacagtggggagggagacaccaccagcctgcgcctgctttgcagcgtcattggaggaacagaccaagcccagtgggaagacataacaggaaccaccaaacttgtatatgccaacgagtgcgccaacttcaccaccaatgtctctgccaggttttggctgtcggactgtcctcggactgctgaggctgtgaactttgccaccctgctgtacaaagagctcactgcagtgccctacatggccaaattcgtcatctttgccaagatgaatgacccccgagaggggcgcctgcgctgctactgcatgacagatgataaagtggacaagaccctggagcagcatgagaacttcgtggaggtggcccggagcagggacatagaggtgttggaaggaatgtccctgtttgcagaactctctgggaacctggtgcctgtgaagaaagctgcccagcagcggagcttccacttccagtcatttcgggagaaccgtctggccatgcctgtaaaggtgagggacagcagtcgagagccgggagggtccctgtcgtttctgcgcaaggcgatgaagtacgaggacacccagcacattctctgccacctgaacatcaccatgcccccctgcgctaagggaagtggagccgaagataggagaaggaccccgacgcccctggccctgcgatacagcattctcagtgagtccacaccaggttctctcagtgggacagagcaggcagagatgaagatggctgttatctcagagcacctcggtctcagctgggcagagttggcccgggagctgcagttcagtgtggaagacatcaacaggatccgagtggaaaatcccaactccctgttggagcagagtgtggccttgctgaacctctgggtcatccgtgaaggccaaaacgcaaacatggagaatctgtacacagccctgcagagcattgaccgtggcgagatcgtgaacatgctggagggttccggccgacagagccgcaacttgaagccagacaggcggcacaccgaccgcgactactcgctgtcaccctcccagatgaatggccatcagagggggcaagcccgaatcacacattcccccaccgtgagtcaggtgacggagaggagtcaggacagactgcaggactgggatgcagacggctcgattgtctcatacctgcaagatgctgcacaaggttcctggcaagaggaggtcacgcaaggtccacactcattccagggaacaagtaccatgactgaagggctagagcccggtggatctcaggagtacgagaaggtcctggtgtctgtaagtgagcacacgtggacagaacagcccgaggctgagagctcccaggccgacagggaccggaggcagcaaggccaagaagagcaggtgcaggaggccaagaacaccttcacccaagtggtgcaggggaatgagtttcagaatattccaggggagcaggtgacagaggagcaattcacggatgagcagggcaacattgtcaccaagaagatcattcgcaaggtggttcgacagatagacttgtccagcgccgatgccgcccaggagcacgaggaggtgactgtagaggggcccctggaggatcccagtgagctggaggtcgatattgattactttatgaaacactccaaggatcacacctcgacacccaacccctgaaccccacacactctgccatgcacacaggaggagagctggacctgagggccaccgcagcggtgcacacattcctctgggctgacggcatgacctctgtaagggactcctgctagtcccctcttggcatgaatgactgactgtagacgcatgacctccaggcttcaatcctgcctcttgcaatgacagctgatctgtcggaaccaggacacaaaagcagcaagaagcggggagagagagggatagaaaacaagcgcaggagagcctgcgaacgcaaaagtgaatgagggctttttgtggctggggatgggttttggttttggggttttttttttaaattgttttgacttcgtacagggtactttttcccaacctcatctgtcagaaatccatgtgggcttcctggaaagaaaaaaaaaaaaaaagaaaactaggcatgaaatcagtttaacaccttaatcttaagccatgtcctcatctgcccaccctccccaacccacatacctccattccacttgtgacaccccctcgactccctggtgacgctcctcccagatcgctctacatgacattcaggacacacacacacacacacacacacacaccactcgcctccactgaatctacacacagattttactgtgacttctgaagctgtggataaattggaattttttatgttgtctctctctctgccaatttcaatacgaatcatcttccaatggaaaatcattaccttgaagagtgcattcggggttccttgtgttagggacttaagaatctgaggcgaggacccccaggcttacctgtaggactcaaagggagccaggaccccatctgaaagggtctcctctctcagttgggggacaggccggtggctgacccaggattgcaccagcatgtccatagagaagaggttttctatgtcttcaagcactatatcatagtccgtgttcaaagtgtaaactgtacagtaatcagccttgtgtatatgaaaaacaataaatactatgcaaaccaatagaaacatttagcagtacgtacagagcctgacagcgcagctcctgaggacttctgcggctgcaggagaaggagctgtggcctgtctttcagtgaaagaggaaggaaaggagtagggctagtgaatgtatctgccaggtcttagaagtcaggaccacccagggtctcccagagtgaacttggtgctctaagtccaggcagcctgcaggctggggaccctgggtgcaggtgccaggctcgaggctgttccctgtcctgcctcagtgcctcccctctgcccagcccctgtggcctcttggagaggcgagccagggggctccccggaccgcatggccggtgagagtagagtcggaggcggagagcctggacgcccagaggccggggccaggctctgggtcaaggcaggaaggagacagacagctggcagttcctcgcctcggtgccatcagggaggagccttaagttccactagagcctccggcccagggaggccagaatcagcacaatcccggccccgccctcgcggcgggcgcccccagggccaggagagagagacagggctggctcctctcgcccctggagccgcggtgtggacggcccggccccgtccgccccgccgctctgcgggagtgtccttcgggacacacttaaaccttccaagtagcacagaagccccctccacgtcagagccccctggccgcggggcctgtgagcggagaggggccctgcttcccacacaaatccgccccggtgcacccccggccaggcaggccccggggcggcctaggcgccttgtcggccgggggtggggctgcttttgcttcctttagaggggcgggcagggagaggaagctctagctccgggcctgagtttccccgaggctgcgtcggaggagctgcagggcgagcccggacggctgccgtctccgccagaggccaccccggcccggcctccaggcagaggcgcccccctccatcctcccccatcccgggggccacggcaggggggccgcacagcgcggctgggaccgattcggtgacggcccaaggaagctgggcgcagggctcgcctctcccgcctcgatcctgcaccttcctctcccaggtcgctgctgcagccaacccagtagcccccttagcgcccccgcggaccccgcagctccagactccgctttggcacctctgctccggctggcatggctgcacgctccggctgctagtaggagccgttaggggaggagtttggggtctccacacgatgcctagagaatgctgcagtctgcacattagacgctttttagaagttttgaaattaccttgatttttttaattgttatgaaaatggatcttttcttgactctcccacatgctctgttatgggagagaatcccctaccctactctgatgtatagaccattctcccttcaccagccgaaccaatgtcaaaattaataaagaaatggactaatggcaaaaggctc

SEQ ID NO: 284470 - DNA, 8153 bp, Homo sapiens
agaggctgcggtgagtccgccagccccagctgctcctcctcaagcccccaaggcccttcggcgggcccctgctgaaagaccggcatgccctattctgtgggcttccgcgaagccgatgctgctaccagctttctgagagcagcaagatcaggtaacttggacaaagctttggatcacctgcggaatggggtagatattaacacctgtaaccagaatgggttgaatggcttgcatctggcttctaaggaaggccatgtgaaaatggtggttgaacttctgcacaaagaaatcattctagaaacgacaaccaagaaggggaacacggccctgcacatcgctgctctagccgggcaggatgaggtggtccgggagcttgtcaactatggagccaacgtcaatgcccagtcacagaaaggttttacacccctgtacatggcagcacaagagaaccacttggaagtggttaagtttttactggaaaatggagctaaccagaatgtagccacagaagacggcttcacgcctctggcggtagccctgcagcagggccatgagaacgtcgtcgcgcacctcatcaactacggcaccaaggggaaggtgcgcctcccggccctgcacatcgcggcccgcaacgacgacacgcgcacggctgcggtgctgctgcagaacgaccccaacccggacgtgctttccaagacgggattcacgcccctgcacattgcggctcactacgagaacctcaacgtggcccagttgctcctcaacagaggagccagcgtcaatttcacaccacagaacggcatcacgccactgcacatcgcctcccgcaggggcaacgtgatcatggtgcggctgctgctggatcggggagcccagatagaaaccaagaccaaggacgaattgacacctctccactgtgcagctcgaaatgggcacgtgcgaatctcagagatcctgctggaccacggggcaccaatccaagccaaaaccaagaacggcctgtccccaattcacatggcggctcagggagaccacctcgactgtgtccggctcctgttgcaatacgacgcagagatagacgacatcaccctggaccacctgaccccactccacgtggctgcccactgtggacaccacagggtggctaaggtccttctggataaaggggccaaacccaactccagagccctgaatggctttacccccttacacatcgcctgcaaaaagaaccacgtccgtgtcatggagctgctgctgaagacgggagcctcgatcgacgcggtcaccgagtctggcctgacacctctccacgtggcctccttcatggggcaccttcccatcgtgaagaacctcctgcagcggggggcgtcgcccaacgtctccaacgtgaaagtggagaccccgctacacatggcagccagagccgggcacacggaagtggccaaatatttactccagaacaaagccaaagtcaatgccaaggccaaggatgaccagaccccacttcactgtgcagctcgcatcggccacacaaacatggtgaagctcctgctggaaaataacgccaaccccaacctggccaccaccgccgggcacacccccctgcacattgcagcccgtgagggccatgtggaaacagtcctggcccttctggaaaaggaagcatcccaggcctgcatgaccaagaaaggatttacccctctgcacgtggcggccaagtacgggaaggtgcgggtggcagagctgctgctggagcgggacgcacacccgaatgctgccggaaaaaatggcctgacccccctgcacgtggccgtccatcacaacaacctggacatcgtcaagctgctgcttccccggggcggctccccgcacagccctgcctggaatggctacacccctttgcacatcgctgccaagcagaaccaggtggaggtggcccgtagtctgctgcagtatgggggctcagcaaacgccgagtcggtgcaaggtgtgacgccccttcacctggccgcccaggagggccacgcagagatggtggctctgctgctctcgaaacaagccaatggcaacctggggaacaagagcggactcactcccctccatctggtagcacaagaaggccacgttccagtggcagatgtgctgatcaaacacggtgtcatggtggacgccaccacccggatgggctacactcccctccatgtggccagtcactatggaaacatcaagctggtgaagtttctgctgcagcaccaggcagatgtcaatgccaagaccaagctaggatacagccccctgcaccaggcagcccagcagggacacacagacatcgtgactctgcttctgaaaaacggtgcttccccaaacgaggtcagctcggatggaaccacacctctggccatagccaagcgcttgggctacatttctgtcaccgacgtgctcaaggtcgtcacggatgaaaccagtttcgtgttagtcagtgataagcatcgaatgagtttccctgagacagttgatgagatcctggatgtctcggaagatgaaggggaagaactcatcagcttcaaggctgagaggcgggattccagggatgttgatgaagagaaggagctgctggattttgtgccgaagctagaccaagtggtggaatctccagccatccccaggattccctgtgccatgcctgagacagtggtgatcaggtcagaagagcaggagcaggcatctaaagagtatgatgaggactccctcatccccagcagcccggccaccgagacctcagacaacatcagcccggtggccagcccggtgcatacagggtttctggtgagcttcatggttgacgcccggggtggttccatgagaggaagtcgccacaacggcctgcgagtggtgatcccgccacggacgtgcgcagcgcccacccgcatcacctgccgcctggtcaagccccagaagctcagcacgccgcccccactggccgaggaggagggcctggccagcaggatcatagcactggggcccacgggggcacagttcctgagccctgtaatcgtggagatcccgcactttgcctcccatggccgtggagaccgcgagctcgtggttctgaggagcgaaaacggctccgtgtggaaggagcacaggagccgctatggagagagctacctggatcagatcctcaacgggatggacgaagagctggggagcctggaggagctagagaagaagagggtgtgccgaatcatcaccaccgacttcccgctgtacttcgtgatcatgtcacggctctgccaggactacgacatcatcggtcccgaagggggctccctgaagagcaagctggtgcccctggtacaggcaacgttcccggagaatgccgtcaccaagagagtgaagctggctctgcaggcccagcctgtcccggatgagcttgtcactaagctcctgggcaaccaggccacattcagccccattgtcaccgtggagccccggcgccggaagttccaccgccccattgggcttcggatcccactacctccttcctggaccgacaacccgagggacagtggggagggagacaccaccagcctgcgcctgctttgcagcgtcattggaggaacagaccaagcccagtgggaagacataacaggaaccaccaaacttgtatatgccaacgagtgcgccaacttcaccaccaatgtctctgccaggttttggctgtcggactgtcctcggactgctgaggctgtgaactttgccaccctgctgtacaaagagctcactgcagtgccctacatggccaaattcgtcatctttgccaagatgaatgacccccgagaggggcgcctgcgctgctactgcatgacagatgataaagtggacaagaccctggagcagcatgagaacttcgtggaggtggcccggagcagggacatagaggtgttggaaggaatgtccctgtttgcagaactctctgggaacctggtgcctgtgaagaaagctgcccagcagcggagcttccacttccagtcatttcgggagaaccgtctggccatgcctgtaaaggtgagggacagcagtcgagagccgggagggtccctgtcgtttctgcgcaaggcgatgaagtacgaggacacccagcacattctctgccacctgaacatcaccatgcccccctgcgctaagggaagtggagccgaagataggagaaggaccccgacgcccctggccctgcgatacagcattctcagtgagtccacaccaggttctctcagtgggacagagcaggcagagatgaagatggctgttatctcagagcacctcggtctcagctgggcagagttggcccgggagctgcagttcagtgtggaagacatcaacaggatccgagtggaaaatcccaactccctgttggagcagagtgtggccttgctgaacctctgggtcatccgtgaaggccaaaacgcaaacatggagaatctgtacacagccctgcagagcattgaccgtggcgagatcgtgaacatgctggagggttccggccgacagagccgcaacttgaagccagacaggcggcacaccgaccgcgactactcgctgtcaccctcccagatgaatggttactcctcactgcaggacgagctgctgtcccctgcctccctgggctgtgcactttcctctccgctacgtgcagaccagtactggaatgaggtggccgtcctagacgccatccccttggcggccacggagcatgacaccatgctggagatgtctgacatgcaggtgtggtctgcgggcctcacgccttctctggtcactgctgaggactcctctctggagtgtagcaaggctgaggactctgatgccacaggtcacgagtggaagttggagggggcactctcagaggaaccgcggggccccgagttgggctctctggaacttgtggaggacgacacagtggattcagatgccacaaatggccttatcgatttgcttgaacaggaggaaggtcagaggtcagaagagaagctgccaggttctaagaggcaggatgacgcgacaggtgcagggcaggactcagagaatgaagtgtctcttgtttcaggccatcagagggggcaagcccgaatcacacattcccccaccgtgagtcaggtgacggagaggagtcaggacagactgcaggactgggatgcagacggctcgattgtctcatacctgcaagatgctgcacaaggttcctggcaagaggaggtcacgcaaggtccacactcattccagggaacaagtaccatgactgaagggctagagcccggtggatctcaggagtacgagaaggtcctggtgtctgtaagtgagcacacgtggacagaacagcccgaggctgagagctcccaggccgacagggaccggaggcagcaaggccaagaagagcaggtgcaggaggccaagaacaccttcacccaagtggtgcaggggaatgagtttcagaatattccaggggagcaggtgacagaggagcaattcacggatgagcagggcaacattgtcaccaagaagatcattcgcaaggtggttcgacagatagacttgtccagcgccgatgccgcccaggagcacgaggaggatcacacctcgacacccaacccctgaaccccacacactctgccatgcacacaggaggagagctggacctgagggccaccgcagcggtgcacacattcctctgggctgacggcatgacctctgtaagggactcctgctagtcccctcttggcatgaatgactgactgtagacgcatgacctccaggcttcaatcctgcctcttgcaatgacagctgatctgtcggaaccaggacacaaaagcagcaagaagcggggagagagagggatagaaaacaagcgcaggagagcctgcgaacgcaaaagtgaatgagggctttttgtggctggggatgggttttggttttggggttttttttttaaattgttttgacttcgtacagggtactttttcccaacctcatctgtcagaaatccatgtgggcttcctggaaagaaaaaaaaaaaaaaagaaaactaggcatgaaatcagtttaacaccttaatcttaagccatgtcctcatctgcccaccctccccaacccacatacctccattccacttgtgacaccccctcgactccctggtgacgctcctcccagatcgctctacatgacattcaggacacacacacacacacacacacacacaccactcgcctccactgaatctacacacagattttactgtgacttctgaagctgtggataaattggaattttttatgttgtctctctctctgccaatttcaatacgaatcatcttccaatggaaaatcattaccttgaagagtgcattcggggttccttgtgttagggacttaagaatctgaggcgaggacccccaggcttacctgtaggactcaaagggagccaggaccccatctgaaagggtctcctctctcagttgggggacaggccggtggctgacccaggattgcaccagcatgtccatagagaagaggttttctatgtcttcaagcactatatcatagtccgtgttcaaagtgtaaactgtacagtaatcagccttgtgtatatgaaaaacaataaatactatgcaaaccaatagaaacatttagcagtacgtacagagcctgacagcgcagctcctgaggacttctgcggctgcaggagaaggagctgtggcctgtctttcagtgaaagaggaaggaaaggagtagggctagtgaatgtatctgccaggtcttagaagtcaggaccacccagggtctcccagagtgaacttggtgctctaagtccaggcagcctgcaggctggggaccctgggtgcaggtgccaggctcgaggctgttccctgtcctgcctcagtgcctcccctctgcccagcccctgtggcctcttggagaggcgagccagggggctccccggaccgcatggccggtgagagtagagtcggaggcggagagcctggacgcccagaggccggggccaggctctgggtcaaggcaggaaggagacagacagctggcagttcctcgcctcggtgccatcagggaggagccttaagttccactagagcctccggcccagggaggccagaatcagcacaatcccggccccgccctcgcggcgggcgcccccagggccaggagagagagacagggctggctcctctcgcccctggagccgcggtgtggacggcccggccccgtccgccccgccgctctgcgggagtgtccttcgggacacacttaaaccttccaagtagcacagaagccccctccacgtcagagccccctggccgcggggcctgtgagcggagaggggccctgcttcccacacaaatccgccccggtgcacccccggccaggcaggccccggggcggcctaggcgccttgtcggccgggggtggggctgcttttgcttcctttagaggggcgggcagggagaggaagctctagctccgggcctgagtttccccgaggctgcgtcggaggagctgcagggcgagcccggacggctgccgtctccgccagaggccaccccggcccggcctccaggcagaggcgcccccctccatcctcccccatcccgggggccacggcaggggggccgcacagcgcggctgggaccgattcggtgacggcccaaggaagctgggcgcagggctcgcctctcccgcctcgatcctgcaccttcctctcccaggtcgctgctgcagccaacccagtagcccccttagcgcccccgcggaccccgcagctccagactccgctttggcacctctgctccggctggcatggctgcacgctccggctgctagtaggagccgttaggggaggagtttggggtctccacacgatgcctagagaatgctgcagtctgcacattagacgctttttagaagttttgaaattaccttgatttttttaattgttatgaaaatggatcttttcttgactctcccacatgctctgttatgggagagaatcccctaccctactctgatgtatagaccattctcccttcaccagccgaaccaatgtcaaaattaataaagaaatggactaatggcaaaaggctc

SEQ ID NO: 284471 - DNA, 458 bp, Homo sapiens
gatgagcagggcaacattgtcaccaagaagatcattcgcaaggtggttcgacagatagacttgtccagcgccgatgccgcccaggagcacgaggaggtgctttgtgctaaagcacatccaccaggagctggacaaggagctgggggagagcgagggcctctgctccggctggcatggctgcacgctccggctgctagtaggagccgttaggggaggagtttggggtctccacacgatgcctagagaatgctgcagtctgcacattagacgctttttagaagttttgaaattaccttgatttttttaattgttatgaaaatggatcttttcttgactctcccacatgctctgttatgggagagaatcccctaccctactctgatgtatagaccattctcccttcaccagccgaaccaatgtcaaaattaataaagaaatggactaatggcaaaaggctc

SEQ ID NO: 284472 - DNA, 913 bp, Homo sapiens
tgtcacccgggccactcagggcagagcctggctgctgggcagaagggcacttgggccgggctgcttcagccgagagggccattcggtgtcctgcccacagagagagaaacagtgagagaccaagagagcaaaccagagagggatagaaaacaagcgcaggagagcctgcgaacgcaaaagtgaatgagggctttttgtggctggggatgggttttggttttggggttttttttttaaattgttttgacttcgtacaatgattttgggaattacaacaatcagtcttcaaattttggacccatgaagggaggaaatttggaggcagaagctctggcccctatggcggtggaggccaatactttgcaaaaccacgaaaccaaggtggctatggcggttccagcagcagcagtagctatggcagtggcagaaagattttaattaggaaacaaagcttagcaggagaggaggagccagagaagtgacagggaagctacaggttacaaccgatttggtgaactcaggcaagcacagtggtggcgggctagctgctacaaagaagacctgttttagacaattctcctgtgttttggcgcaaaaactcgggggcgttttgtgactactgtttaccggtatttagttctgtctggggaggtgttaggcttcaccaggggtgtcttgtagttttttttttggcccctggtgggttggtttgttccgcttgttgggcgcggaaaaggcttttaaccggggtaggggcctccttgcccttgtgattcccagggtggagcctccggggcggcgtgggttcccgccgggggccggtcttgccctgtgtcttgtgttggcgcccccggccccccgggtggtgcgggccctcttttgcgcaagggtgttggtgcaaccgccgtcgtgc

SEQ ID NO: 284473 - DNA, 6807 bp, Homo sapiens
agaggctgcggtgagtccgccagccccagctgctcctcctcaagcccccaaggcccttcggcgggcccctgctgaaagaccggcatgccctattctgtgggcttccgcgaagccgatgctgctaccagctttctgagagcagcaagatcaggtaacttggacaaagctttggatcacctgcggaatggggtagatattaacacctgtaaccagaatgggttgaatggcttgcatctggcttctaaggaaggccatgtgaaaatggtggttgaacttctgcacaaagaaatcattctagaaacgacaaccaagaaggggaacacggccctgcacatcgctgctctagccgggcaggatgaggtggtccgggagcttgtcaactatggagccaacgtcaatgcccagtcacagaaaggttttacacccctgtacatggcagcacaagagaaccacttggaagtggttaagtttttactggaaaatggagctaaccagaatgtagccacagaagacggcttcacgcctctggcggtagccctgcagcagggccatgagaacgtcgtcgcgcacctcatcaactacggcaccaaggggaaggtgcgcctcccggccctgcacatcgcggcccgcaacgacgacacgcgcacggctgcggtgctgctgcagaacgaccccaacccggacgtgctttccaagacgggattcacgcccctgcacattgcggctcactacgagaacctcaacgtggcccagttgctcctcaacagaggagccagcgtcaatttcacaccacagaacggcatcacgccactgcacatcgcctcccgcaggggcaacgtgatcatggtgcggctgctgctggatcggggagcccagatagaaaccaagaccaaggacgaattgacacctctccactgtgcagctcgaaatgggcacgtgcgaatctcagagatcctgctggaccacggggcaccaatccaagccaaaaccaagaacggcctgtccccaattcacatggcggctcagggagaccacctcgactgtgtccggctcctgttgcaatacgacgcagagatagacgacatcaccctggaccacctgaccccactccacgtggctgcccactgtggacaccacagggtggctaaggtccttctggataaaggggccaaacccaactccagagccctgaatggctttacccccttacacatcgcctgcaaaaagaaccacgtccgtgtcatggagctgctgctgaagacgggagcctcgatcgacgcggtcaccgagtctggcctgacacctctccacgtggcctccttcatggggcaccttcccatcgtgaagaacctcctgcagcggggggcgtcgcccaacgtctccaacgtgaaagtggagaccccgctacacatggcagccagagccgggcacacggaagtggccaaatatttactccagaacaaagccaaagtcaatgccaaggccaaggatgaccagaccccacttcactgtgcagctcgcatcggccacacaaacatggtgaagctcctgctggaaaataacgccaaccccaacctggccaccaccgccgggcacacccccctgcacattgcagcccgtgagggccatgtggaaacagtcctggcccttctggaaaaggaagcatcccaggcctgcatgaccaagaaaggatttacccctctgcacgtggcggccaagtacgggaaggtgcgggtggcagagctgctgctggagcgggacgcacacccgaatgctgccggaaaaaatggcctgacccccctgcacgtggccgtccatcacaacaacctggacatcgtcaagctgctgcttccccggggcggctccccgcacagccctgcctggaatggctacacccctttgcacatcgctgccaagcagaaccaggtggaggtggcccgtagtctgctgcagtatgggggctcagcaaacgccgagtcggtgcaaggtgtgacgccccttcacctggccgcccaggagggccacgcagagatggtggctctgctgctctcgaaacaagccaatggcaacctggggaacaagagcggactcactcccctccatctggtagcacaagaaggccacgttccagtggcagatgtgctgatcaaacacggtgtcatggtggacgccaccacccggatgggctacactcccctccatgtggccagtcactatggaaacatcaagctggtgaagtttctgctgcagcaccaggcagatgtcaatgccaagaccaagctaggatacagccccctgcaccaggcagcccagcagggacacacagacatcgtgactctgcttctgaaaaacggtgcttccccaaacgaggtcagctcggatggaaccacacctctggccatagccaagcgcttgggctacatttctgtcaccgacgtgctcaaggtcgtcacggatgaaaccagtttcgtgttagtcagtgataagcatcgaatgagtttccctgagacagttgatgagatcctggatgtctcggaagatgaaggggaagaactcatcagcttcaaggctgagaggcgggattccagggatgttgatgaagagaaggagctgctggattttgtgccgaagctagaccaagtggtggaatctccagccatccccaggattccctgtgccatgcctgagacagtggtgatcaggtcagaagagcaggagcaggcatctaaagagtatgatgaggactccctcatccccagcagcccggccaccgagacctcagacaacatcagcccggtggccagcccggtgcatacagggtttctggtgagcttcatggttgacgcccggggtggttccatgagaggaagtcgccacaacggcctgcgagtggtgatcccgccacggacgtgcgcagcgcccacccgcatcacctgccgcctggtcaagccccagaagctcagcacgccgcccccactggccgaggaggagggcctggccagcaggatcatagcactggggcccacgggggcacagttcctgagccctgtaatcgtggagatcccgcactttgcctcccatggccgtggagaccgcgagctcgtggttctgaggagcgaaaacggctccgtgtggaaggagcacaggagccgctatggagagagctacctggatcagatcctcaacgggatggacgaagagctggggagcctggaggagctagagaagaagagggtgtgccgaatcatcaccaccgacttcccgctgtacttcgtgatcatgtcacggctctgccaggactacgacatcatcggtcccgaagggggctccctgaagagcaagctggtgcccctggtacaggcaacgttcccggagaatgccgtcaccaagagagtgaagctggctctgcaggcccagcctgtcccggatgagcttgtcactaagctcctgggcaaccaggccacattcagccccattgtcaccgtggagccccggcgccggaagttccaccgccccattgggcttcggatcccactacctccttcctggaccgacaacccgagggacagtggggagggagacaccaccagcctgcgcctgctttgcagcgtcattggaggaacagaccaagcccagtgggaagacataacaggaaccaccaaacttgtatatgccaacgagtgcgccaacttcaccaccaatgtctctgccaggttttggctgtcggactgtcctcggactgctgaggctgtgaactttgccaccctgctgtacaaagagctcactgcagtgccctacatggccaaattcgtcatctttgccaagatgaatgacccccgagaggggcgcctgcgctgctactgcatgacagatgataaagtggacaagaccctggagcagcatgagaacttcgtggaggtggcccggagcagggacatagaggtgttggaaggaatgtccctgtttgcagaactctctgggaacctggtgcctgtgaagaaagctgcccagcagcggagcttccacttccagtcatttcgggagaaccgtctggccatgcctgtaaaggtgagggacagcagtcgagagccgggagggtccctgtcgtttctgcgcaaggcgatgaagtacgaggacacccagcacattctctgccacctgaacatcaccatgcccccctgcgctaagggaagtggagccgaagataggagaaggaccccgacgcccctggccctgcgatacagcattctcagtgagtccacaccaggttctctcagtgggacagagcaggcagagatgaagatggctgttatctcagagcacctcggtctcagctgggcagagttggcccgggagctgcagttcagtgtggaagacatcaacaggatccgagtggaaaatcccaactccctgttggagcagagtgtggccttgctgaacctctgggtcatccgtgaaggccaaaacgcaaacatggagaatctgtacacagccctgcagagcattgaccgtggcgagatcgtgaacatgctggagggttccggccgacagagccgcaacttgaagccagacaggcggcacaccgaccgcgactactcgctgtcaccctcccagatgaatggttactcctcactgcaggacgagctgctgtcccctgcctccctgggctgtgcactttcctctccgctacgtgcagaccagtactggaatgaggtggccgtcctagacgccatccccttggcggccacggagcatgacaccatgctggagatgtctgacatgcaggtgtggtctgcgggcctcacgccttctctggtcactgctgaggactcctctctggagtgtagcaaggctgaggactctgatgccacaggtcacgagtggaagttggagggggcactctcagaggaaccgcggggccccgagttgggctctctggaacttgtggaggacgacacagtggattcagatgccacaaatggccttatcgatttgcttgaacaggaggaaggtcagaggtcagaagagaagctgccaggttctaagaggcaggatgacgcgacaggtgcagggcaggactcagagaatgaagtgtctcttgtttcaggccatcagagggggcaagcccgaatcacacattcccccaccgtgagtcaggtgacggagaggagtcaggacagactgcaggactgggatgcagacggctcgattgtctcatacctgcaagatgctgcacaaggttcctggcaagaggaggtcacgcaaggtccacactcattccagggaacaagtaccatgactgaagggctagagcccggtggatctcaggagtacgagaaggtcctggtgtctgtaagtgagcacacgtggacagaacagcccgaggctgagagctcccaggccgacagggaccggaggcagcaaggccaagaagagcaggtgcaggaggccaagaacaccttcacccaagtggtgcaggggaatgagtttcagaatattccaggggagcaggtgacagaggagcaattcacggatgagcagggcaacattgtcaccaagaagatcattcgcaaggtggttcgacagatagacttgtccagcgccgatgccgcccaggagcacgaggaggtggagctgagagggagtggcctacagccggacctgatagagggcaggaagggggcgcagatagtgaagcgggccagcctgaaaagggggaaacagtgaccccgagccgctctccttggagtagcctctcgggaggatcacacctcgacacccaacccctgaaccccacacactctgccatgcacacaggaggagagctggacctgagggccaccgcagcggtgcacacattcctctgggctgacggcatgacctctgtaagggactcctgctagtcccctcttggcatgaatgactgactgtagacgcatgacctccaggcttcaatcctgcctcttgcaatgacagctgatctgtcggaaccaggacacaaaagcagcaagaagcggggagagagagggatagaaaacaagcgcaggagagcctgcgaacgcaaaagtgaatgagggctttttgtggctggggatgggttttggttttggggttttttttttaaattgttttgacttcgtacagggtactttttcccaacctcatctgtcagaaatccatgtgggcttcctggaaagaaaaaaaaaaaaaaagaaaactaggcatgaaatcagtttaacaccttaatcttaagccatgtcctcatctgcccaccctccccaacccacatacctccattccacttgtgacaccccctcgactccctggtgacgctcctcccagatcgctctacatgacattcaggacacacacacacacacacacacacacaccactcgcctccactgaatctacacacagattttactgtgacttctgaagctgtggataaattggaattttttatgttgtctctctctctgccaatttcaatacgaatcatcttccaatggaaaatcattaccttgaagagtgcattcggggttccttgtgttagggacttaagaatctgaggcgaggacccccaggcttacctgtaggactcaaagggagccaggaccccatctgaaagggtctcctctctcagttgggggacaggccggtggctgacccaggattgcaccagcatgtccatagagaagaggttttctatgtcttcaagcactatatcatagtccgtgttcaaagtgtaaactgtacagtaatcagccttgtgtatatgaaaaacaataaatactatgcaaacca

SEQ ID NO: 284474 - DNA, 1812 bp, Homo sapiens
tgtcacccgggccactcagggcagagcctggctgctgggcagaagggcacttgggccgggctgcttcagccgagagggccattcggtgtcctgcccacagagagagaaacagtgagagaccaagagagcaaaccagagagatagggagggggaatgcaaggggtccctgggggactcaggagtcccagtggagaatgagaggcaggccccccgtggtggccggggccctggctgccagaggaccgggctggtgaggaggcgaggatgtggactttcgtcacccagctgttggtcacgctggtgctgctgagcttcttcctggtcagctgtcagaacgtgatgcacattgtcagggggtccctgtgctttgtgctaaagcacatccaccaggagctggacaaggagctgggggagagcgagggcctcagtgacgacgaggagaccatctccaccagggtggtccggcggcgggtcttcctgaaggggaatgagtttcagaatattccaggggagcaggtgacagaggagcaattcacggatgagcagggcaacattgtcaccaagaagatcattcgcaaggtggttcgacagatagacttgtccagcgccgatgccgcccaggagcacgaggaggtggagctgagagggagtggcctacagccggacctgatagagggcaggaagggggcgcagatagtgaagcgggccagcctgaaaagggggaaacagtgaccccgagccgctctccttggagtagcctctcgggaggatcacacctcgacacccaacccctgaaccccacacactctgccatgcacacaggaggagagctggacctgagggccaccgcagcggtgcacacattcctctgggctgacggcatgacctctgtaagggactcctgctagtcccctcttggcatgaatgactgactgtagacgcatgacctccaggcttcaatcctgcctcttgcaatgacagctgatctgtcggaaccaggacacaaaagcagcaagaagcggggagagagagggatagaaaacaagcgcaggagagcctgcgaacgcaaaagtgaatgagggctttttgtggctggggatgggttttggttttggggttttttttttaaattgttttgacttcgtacagggtactttttcccaacctcatctgtcagaaatccatgtgggcttcctggaaagaaaaaaaaaaaaaaagaaaactaggcatgaaatcagtttaacaccttaatcttaagccatgtcctcatctgcccaccctccccaacccacatacctccattccacttgtgacaccccctcgactccctggtgacgctcctcccagatcgctctacatgacattcaggacacacacacacacacacacacacacaccactcgcctccactgaatctacacacagattttactgtgacttctgaagctgtggataaattggaattttttatgttgtctctctctctgccaatttcaatacgaatcatcttccaatggaaaatcattaccttgaagagtgcattcggggttccttgtgttagggacttaagaatctgaggcgaggacccccaggcttacctgtaggactcaaagggagccaggaccccatctgaaagggtctcctctctcagttgggggacaggccggtggctgacccaggattgcaccagcatgtccatagagaagaggttttctatgtcttcaagcactatatcatagtccgtgttcaaagtgtaaactgtacagtaatcagccttgtgtatatgaaaaacaataaatactatgcaaacca

SEQ ID NO: 284475 - DNA, 1752 bp, Homo sapiens
tgtcacccgggccactcagggcagagcctggctgctgggcagaagggcacttgggccgggctgcttcagccgagagggccattcggtgtcctgcccacagagagagaaacagtgagagaccaagagagcaaaccagagagatagggagggggaatgcaaggggtccctgggggactcaggagtcccagtggagaatgagaggcaggccccccgtggtggccggggccctggctgccagaggaccgggctggtgaggaggcgaggatgtggactttcgtcacccagctgttggtcacgctggtgctgctgagcttcttcctggtcagctgtcagaacgtgatgcacattgtcagggggtccctgtgctttgtgctaaagcacatccaccaggagctggacaaggagctgggggagagcgagggcctcagtgacgacgaggagaccatctccaccagggtggtccggcggcgggtcttcctgaaggggaatgagtttcagaatattccaggggagcaggtgacagaggagcaattcacggatgagcagggcaacattgtcaccaagaagatcattcgcaaggtggttcgacagatagacttgtccagcgccgatgccgcccaggagcacgaggaggtgactgtagaggggcccctggaggatcccagtgagctggaggtcgatattgattactttatgaaacactccaaggatcacacctcgacacccaacccctgaaccccacacactctgccatgcacacaggaggagagctggacctgagggccaccgcagcggtgcacacattcctctgggctgacggcatgacctctgtaagggactcctgctagtcccctcttggcatgaatgactgactgtagacgcatgacctccaggcttcaatcctgcctcttgcaatgacagctgatctgtcggaaccaggacacaaaagcagcaagaagcggggagagagagggatagaaaacaagcgcaggagagcctgcgaacgcaaaagtgaatgagggctttttgtggctggggatgggttttggttttggggttttttttttaaattgttttgacttcgtacagggtactttttcccaacctcatctgtcagaaatccatgtgggcttcctggaaagaaaaaaaaaaaaaaagaaaactaggcatgaaatcagtttaacaccttaatcttaagccatgtcctcatctgcccaccctccccaacccacatacctccattccacttgtgacaccccctcgactccctggtgacgctcctcccagatcgctctacatgacattcaggacacacacacacacacacacacacacaccactcgcctccactgaatctacacacagattttactgtgacttctgaagctgtggataaattggaattttttatgttgtctctctctctgccaatttcaatacgaatcatcttccaatggaaaatcattaccttgaagagtgcattcggggttccttgtgttagggacttaagaatctgaggcgaggacccccaggcttacctgtaggactcaaagggagccaggaccccatctgaaagggtctcctctctcagttgggggacaggccggtggctgacccaggattgcaccagcatgtccatagagaagaggttttctatgtcttcaagcactatatcatagtccgtgttcaaagtgtaaactgtacagtaatcagccttgtgtatatgaaaaacaataaatactatgcaaacca

SEQ ID NO: 284476 - DNA, 1746 bp, Homo sapiens
tgtcacccgggccactcagggcagagcctggctgctgggcagaagggcacttgggccgggctgcttcagccgagagggccattcggtgtcctgcccacagagagagaaacagtgagagaccaagagagcaaaccagagagatagggagggggaatgcaaggggtccctgggggactcaggagtcccagtggagaatgagaggcaggccccccgtggtggccggggccctggctgccagaggaccgggctggtgaggaggcgaggatgtggactttcgtcacccagctgttggtcacgctggtgctgctgagcttcttcctggtcagctgtcagaacgtgatgcacattgtcagggggtccctgtgctttgtgctaaagcacatccaccaggagctggacaaggagctgggggagagcgagggcctcagtgacgacgaggagaccatctccaccagggtggtccggcggcgggtcttcctgaaggggaatgagtttcagaatattccaggggagcaggtgacagaggagcaattcacggatgagcagggcaacattgtcaccaagaaggtggagctgagagggagtggcctacagccggacctgatagagggcaggaagggggcgcagatagtgaagcgggccagcctgaaaagggggaaacagtgaccccgagccgctctccttggagtagcctctcgggaggatcacacctcgacacccaacccctgaaccccacacactctgccatgcacacaggaggagagctggacctgagggccaccgcagcggtgcacacattcctctgggctgacggcatgacctctgtaagggactcctgctagtcccctcttggcatgaatgactgactgtagacgcatgacctccaggcttcaatcctgcctcttgcaatgacagctgatctgtcggaaccaggacacaaaagcagcaagaagcggggagagagagggatagaaaacaagcgcaggagagcctgcgaacgcaaaagtgaatgagggctttttgtggctggggatgggttttggttttggggttttttttttaaattgttttgacttcgtacagggtactttttcccaacctcatctgtcagaaatccatgtgggcttcctggaaagaaaaaaaaaaaaaaagaaaactaggcatgaaatcagtttaacaccttaatcttaagccatgtcctcatctgcccaccctccccaacccacatacctccattccacttgtgacaccccctcgactccctggtgacgctcctcccagatcgctctacatgacattcaggacacacacacacacacacacacacacaccactcgcctccactgaatctacacacagattttactgtgacttctgaagctgtggataaattggaattttttatgttgtctctctctctgccaatttcaatacgaatcatcttccaatggaaaatcattaccttgaagagtgcattcggggttccttgtgttagggacttaagaatctgaggcgaggacccccaggcttacctgtaggactcaaagggagccaggaccccatctgaaagggtctcctctctcagttgggggacaggccggtggctgacccaggattgcaccagcatgtccatagagaagaggttttctatgtcttcaagcactatatcatagtccgtgttcaaagtgtaaactgtacagtaatcagccttgtgtatatgaaaaacaataaatactatgcaaacca

SEQ ID NO: 284477 - DNA, 1569 bp, Homo sapiens
tgtcacccgggccactcagggcagagcctggctgctgggcagaagggcacttgggccgggctgcttcagccgagagggccattcggtgtcctgcccacagagagagaaacagtgagagaccaagagagcaaaccagagagatagggagggggaatgcaaggggtccctgggggactcaggagtcccagtggagaatgagaggcaggccccccgtggtggccggggccctggctgccagaggaccgggctggtgaggaggcgaggatgtggactttcgtcacccagctgttggtcacgctggtgctgctgagcttcttcctggtcagctgtcagaacgtgatgcacattgtcagggggtccctgtgctttgtgctaaagcacatccaccaggtggagctgagagggagtggcctacagccggacctgatagagggcaggaagggggcgcagatagtgaagcgggccagcctgaaaagggggaaacagtgaccccgagccgctctccttggagtagcctctcgggaggatcacacctcgacacccaacccctgaaccccacacactctgccatgcacacaggaggagagctggacctgagggccaccgcagcggtgcacacattcctctgggctgacggcatgacctctgtaagggactcctgctagtcccctcttggcatgaatgactgactgtagacgcatgacctccaggcttcaatcctgcctcttgcaatgacagctgatctgtcggaaccaggacacaaaagcagcaagaagcggggagagagagggatagaaaacaagcgcaggagagcctgcgaacgcaaaagtgaatgagggctttttgtggctggggatgggttttggttttggggttttttttttaaattgttttgacttcgtacagggtactttttcccaacctcatctgtcagaaatccatgtgggcttcctggaaagaaaaaaaaaaaaaaagaaaactaggcatgaaatcagtttaacaccttaatcttaagccatgtcctcatctgcccaccctccccaacccacatacctccattccacttgtgacaccccctcgactccctggtgacgctcctcccagatcgctctacatgacattcaggacacacacacacacacacacacacacaccactcgcctccactgaatctacacacagattttactgtgacttctgaagctgtggataaattggaattttttatgttgtctctctctctgccaatttcaatacgaatcatcttccaatggaaaatcattaccttgaagagtgcattcggggttccttgtgttagggacttaagaatctgaggcgaggacccccaggcttacctgtaggactcaaagggagccaggaccccatctgaaagggtctcctctctcagttgggggacaggccggtggctgacccaggattgcaccagcatgtccatagagaagaggttttctatgtcttcaagcactatatcatagtccgtgttcaaagtgtaaactgtacagtaatcagccttgtgtatatgaaaaacaataaatactatgcaaacca

SEQ ID NO: 284478 - DNA, 1677 bp, Homo sapiens
tgtcacccgggccactcagggcagagcctggctgctgggcagaagggcacttgggccgggctgcttcagccgagagggccattcggtgtcctgcccacagagagagaaacagtgagagaccaagagagcaaaccagagagatagggagggggaatgcaaggggtccctgggggactcaggagtcccagtggagaatgagaggcaggccccccgtggtggccggggccctggctgccagaggaccgggctggtgaggaggcgaggatgtggactttcgtcacccagctgttggtcacgctggtgctgctgagcttcttcctggtcagctgtcagaacgtgatgcacattgtcagggggtccctgtgctttgtgctaaagcacatccaccaggagctggacaaggagctgggggagagcgagggcctcagtgacgacgaggagaccatctccaccagggtggtccggcggcgggtcttcctgaaggggaatgagtttcagaatattccaggggagcaggtgacagaggagcaattcacggatgagcagggcaacattgtcaccaagaagatcattcgcaaggtggttcgacagatagacttgtccagcgccgatgccgcccaggagcacgaggaggatcacacctcgacacccaacccctgaaccccacacactctgccatgcacacaggaggagagctggacctgagggccaccgcagcggtgcacacattcctctgggctgacggcatgacctctgtaagggactcctgctagtcccctcttggcatgaatgactgactgtagacgcatgacctccaggcttcaatcctgcctcttgcaatgacagctgatctgtcggaaccaggacacaaaagcagcaagaagcggggagagagagggatagaaaacaagcgcaggagagcctgcgaacgcaaaagtgaatgagggctttttgtggctggggatgggttttggttttggggttttttttttaaattgttttgacttcgtacagggtactttttcccaacctcatctgtcagaaatccatgtgggcttcctggaaagaaaaaaaaaaaaaaagaaaactaggcatgaaatcagtttaacaccttaatcttaagccatgtcctcatctgcccaccctccccaacccacatacctccattccacttgtgacaccccctcgactccctggtgacgctcctcccagatcgctctacatgacattcaggacacacacacacacacacacacacacaccactcgcctccactgaatctacacacagattttactgtgacttctgaagctgtggataaattggaattttttatgttgtctctctctctgccaatttcaatacgaatcatcttccaatggaaaatcattaccttgaagagtgcattcggggttccttgtgttagggacttaagaatctgaggcgaggacccccaggcttacctgtaggactcaaagggagccaggaccccatctgaaagggtctcctctctcagttgggggacaggccggtggctgacccaggattgcaccagcatgtccatagagaagaggttttctatgtcttcaagcactatatcatagtccgtgttcaaagtgtaaactgtacagtaatcagccttgtgtatatgaaaaacaataaatactatgcaaacca

SEQ ID NO: 284479 - DNA, 4205 bp, Homo sapiens
agatggtcagatggggccctttcctgtggtggcgcagtccttggatgcagcccaggacagcagcagtgagaaaccagtgggtccttgaccagcccactgtcttcaactcttggcctagggcatctaaagagtatgatgaggactccctcatccccagcagcccggccaccgagacctcagacaacatcagcccggtggccagcccggtgcatacagggtttctggtgagcttcatggttgacgcccggggtggttccatgagaggaagtcgccacaacggcctgcgagtggtgatcccgccacggacgtgcgcagcgcccacccgcatcacctgccgcctggtcaagccccagaagctcagcacgccgcccccactggccgaggaggagggcctggccagcaggatcatagcactggggcccacgggggcacagttcctgagccctgtaatcgtggagatcccgcactttgcctcccatggccgtggagaccgcgagctcgtggttctgaggagcgaaaacggctccgtgtggaaggagcacaggagccgctatggagagagctacctggatcagatcctcaacgggatggacgaagagctggggagcctggaggagctagagaagaagagggtgtgccgaatcatcaccaccgacttcccgctgtacttcgtgatcatgtcacggctctgccaggactacgacatcatcggtcccgaagggggctccctgaagagcaagctggtgcccctggtacaggcaacgttcccggagaatgccgtcaccaagagagtgaagctggctctgcaggcccagcctgtcccggatgagcttgtcactaagctcctgggcaaccaggccacattcagccccattgtcaccgtggagccccggcgccggaagttccaccgccccattgggcttcggatcccactacctccttcctggaccgacaacccgagggacagtggggagggagacaccaccagcctgcgcctgctttgcagcgtcattggaggaacagaccaagcccagtgggaagacataacaggaaccaccaaacttgtatatgccaacgagtgcgccaacttcaccaccaatgtctctgccaggttttggctgtcggactgtcctcggactgctgaggctgtgaactttgccaccctgctgtacaaagagctcactgcagtgccctacatggccaaattcgtcatctttgccaagatgaatgacccccgagaggggcgcctgcgctgctactgcatgacagatgataaagtggacaagaccctggagcagcatgagaacttcgtggaggtggcccggagcagggacatagaggtgttggaaggaatgtccctgtttgcagaactctctgggaacctggtgcctgtgaagaaagctgcccagcagcggagcttccacttccagtcatttcgggagaaccgtctggccatgcctgtaaaggtgagggacagcagtcgagagccgggagggtccctgtcgtttctgcgcaaggcgatgaagtacgaggacacccagcacattctctgccacctgaacatcaccatgcccccctgcgctaagggaagtggagccgaagataggagaaggaccccgacgcccctggccctgcgatacagcattctcagtgagtccacaccaggttctctcagtgggacagagcaggcagagatgaagatggctgttatctcagagcacctcggtctcagctgggcagagttggcccgggagctgcagttcagtgtggaagacatcaacaggatccgagtggaaaatcccaactccctgttggagcagagtgtggccttgctgaacctctgggtcatccgtgaaggccaaaacgcaaacatggagaatctgtacacagccctgcagagcattgaccgtggcgagatcgtgaacatgctggagggttccggccgacagagccgcaacttgaagccagacaggcggcacaccgaccgcgactactcgctgtcaccctcccagatgaatggttactcctcactgcaggacgagctgctgtcccctgcctccctgggctgtgcactttcctctccgctacgtgcagaccagtactggaatgaggtggccgtcctagacgccatccccttggcggccacggagcatgacaccatgctggagatgtctgacatgcaggtgtggtctgcgggcctcacgccttctctggtcactgctgaggactcctctctggagtgtagcaaggctgaggactctgatgccacaggtcacgagtggaagttggagggggcactctcagaggaaccgcggggccccgagttgggctctctggaacttgtggaggacgacacagtggattcagatgccacaaatggccttatcgatttgcttgaacaggaggaaggtcagaggtcagaagagaagctgccaggttctaagaggcaggatgacgcgacaggtgcagggcaggactcagagaatgaagtgtctcttgtttcaggccatcagagggggcaagcccgaatcacacattcccccaccgtgagtcaggtgacggagaggagtcaggacagactgcaggactgggatgcagacggctcgattgtctcatacctgcaagatgctgcacaaggttcctggcaagaggaggtcacgcaaggtccacactcattccagggaacaagtaccatgactgaagggctagagcccggtggatctcaggagtacgagaaggtcctggtgtctgtaagtgagcacacgtggacagaacagcccgaggctgagagctcccaggccgacagggaccggaggcagcaaggccaagaagagcaggtgcaggaggccaagaacaccttcacccaagtggtgcaggggaatgagtttcagaatattccaggggagcaggtgacagaggagcaattcacggatgagcagggcaacattgtcaccaagaagatcattcgcaaggtggttcgacagatagacttgtccagcgccgatgccgcccaggagcacgaggaggtggagctgagagggagtggcctacagccggacctgatagagggcaggaagggggcgcagatagtgaagcgggccagcctgaaaagggggaaacagtgaccccgagccgctctccttggagtagcctctcgggaggatcacacctcgacacccaacccctgaaccccacacactctgccatgcacacaggaggagagctggacctgagggccaccgcagcggtgcacacattcctctgggctgacggcatgacctctgtaagggactcctgctagtcccctcttggcatgaatgactgactgtagacgcatgacctccaggcttcaatcctgcctcttgcaatgacagctgatctgtcggaaccaggacacaaaagcagcaagaagcggggagagagagggatagaaaacaagcgcaggagagcctgcgaacgcaaaagtgaatgagggctttttgtggctggggatgggttttggttttggggttttttttttaaattgttttgacttcgtacagggtactttttcccaacctcatctgtcagaaatccatgtgggcttcctggaaagaaaaaaaaaaaaaaagaaaactaggcatgaaatcagtttaacaccttaatcttaagccatgtcctcatctgcccaccctccccaacccacatacctccattccacttgtgacaccccctcgactccctggtgacgctcctcccagatcgctctacatgacattcaggacacacacacacacacacacacacacaccactcgcctccactgaatctacacacagattttactgtgacttctgaagctgtggataaattggaattttttatgttgtctctctctctgccaatttcaatacgaatcatcttccaatggaaaatcattaccttgaagagtgcattcggggttccttgtgttagggacttaagaatctgaggcgaggacccccaggcttacctgtaggactcaaagggagccaggaccccatctgaaagggtctcctctctcagttgggggacaggccggtggctgacccaggattgcaccagcatgtccatagagaagaggttttctatgtcttcaagcactatatcatagtccgtgttcaaagtgtaaactgtacagtaatcagccttgtgtatatgaaaaacaataaatactatgcaaacca

SEQ ID NO: 284480 - DNA, 1611 bp, Homo sapiens
tgtcacccgggccactcagggcagagcctggctgctgggcagaagggcacttgggccgggctgcttcagccgagagggccattcggtgtcctgcccacagagagagaaacagtgagagaccaagagagcaaaccagagagatagggagggggaatgcaaggggtccctgggggactcaggagtcccagtggagaatgagaggcaggccccccgtggtggccggggccctggctgccagaggaccgggctggtgaggaggcgaggatgtggactttcgtcacccagctgttggtcacgctggtgctgctgagcttcttcctggtcagctgtcagaacgtgatgcacattgtcagggggtccctgtgctttgtgctaaagcacatccaccaggagctggacaaggagctgggggagagcgagggcctcagtgacgacgaggagaccatctccaccagggtggtccggcggcgggtcttcctgaaggggaatgagtttcagaatattccaggggagcaggtgacagaggagcaattcacggatgagcagggcaacattgtcaccaagaaggatcacacctcgacacccaacccctgaaccccacacactctgccatgcacacaggaggagagctggacctgagggccaccgcagcggtgcacacattcctctgggctgacggcatgacctctgtaagggactcctgctagtcccctcttggcatgaatgactgactgtagacgcatgacctccaggcttcaatcctgcctcttgcaatgacagctgatctgtcggaaccaggacacaaaagcagcaagaagcggggagagagagggatagaaaacaagcgcaggagagcctgcgaacgcaaaagtgaatgagggctttttgtggctggggatgggttttggttttggggttttttttttaaattgttttgacttcgtacagggtactttttcccaacctcatctgtcagaaatccatgtgggcttcctggaaagaaaaaaaaaaaaaaagaaaactaggcatgaaatcagtttaacaccttaatcttaagccatgtcctcatctgcccaccctccccaacccacatacctccattccacttgtgacaccccctcgactccctggtgacgctcctcccagatcgctctacatgacattcaggacacacacacacacacacacacacacaccactcgcctccactgaatctacacacagattttactgtgacttctgaagctgtggataaattggaattttttatgttgtctctctctctgccaatttcaatacgaatcatcttccaatggaaaatcattaccttgaagagtgcattcggggttccttgtgttagggacttaagaatctgaggcgaggacccccaggcttacctgtaggactcaaagggagccaggaccccatctgaaagggtctcctctctcagttgggggacaggccggtggctgacccaggattgcaccagcatgtccatagagaagaggttttctatgtcttcaagcactatatcatagtccgtgttcaaagtgtaaactgtacagtaatcagccttgtgtatatgaaaaacaataaatactatgcaaacca

SEQ ID NO: 284481 - DNA, 1209 bp, Homo sapiens
gggctgcaagtgcagcaccctcagcacatcgccctgcctggggagactgcttttcctgagtcagattcggcctgagctgccagcacaaaactctgtgtgtggggtttttgctggacgttgcacttttgcattctaagtgactccttctctctttgtgtctcccaggatcacacctcgacacccaacccctgaaccccacacactctgccatgcacacaggaggagagctggacctgagggccaccgcagcggtgcacacattcctctgggctgacggcatgacctctgtaagggactcctgctagtcccctcttggcatgaatgactgactgtagacgcatgacctccaggcttcaatcctgcctcttgcaatgacagctgatctgtcggaaccaggacacaaaagcagcaagaagcggggagagagagggatagaaaacaagcgcaggagagcctgcgaacgcaaaagtgaatgagggctttttgtggctggggatgggttttggttttggggttttttttttaaattgttttgacttcgtacagggtactttttcccaacctcatctgtcagaaatccatgtgggcttcctggaaagaaaaaaaaaaaaaaagaaaactaggcatgaaatcagtttaacaccttaatcttaagccatgtcctcatctgcccaccctccccaacccacatacctccattccacttgtgacaccccctcgactccctggtgacgctcctcccagatcgctctacatgacattcaggacacacacacacacacacacacacacaccactcgcctccactgaatctacacacagattttactgtgacttctgaagctgtggataaattggaattttttatgttgtctctctctctgccaatttcaatacgaatcatcttccaatggaaaatcattaccttgaagagtgcattcggggttccttgtgttagggacttaagaatctgaggcgaggacccccaggcttacctgtaggactcaaagggagccaggaccccatctgaaagggtctcctctctcagttgggggacaggccggtggctgacccaggattgcaccagcatgtccatagagaagaggttttctatgtcttcaagcactatatcatagtccgtgttcaaagtgtaaactgtacagtaatcagccttgtgtatatgaaaaacaataaatactatgcaaacca

SEQ ID NO: 284482 - DNA, 3537 bp, Homo sapiens
agatggtcagatggggccctttcctgtggtggcgcagtccttggatgcagcccaggacagcagcagtgagaaaccagtgggtccttgaccagcccactgtcttcaactcttggcctagggcatctaaagagtatgatgaggactccctcatccccagcagcccggccaccgagacctcagacaacatcagcccggtggccagcccggtgcatacagggtttctggtgagcttcatggttgacgcccggggtggttccatgagaggaagtcgccacaacggcctgcgagtggtgatcccgccacggacgtgcgcagcgcccacccgcatcacctgccgcctggtcaagccccagaagctcagcacgccgcccccactggccgaggaggagggcctggccagcaggatcatagcactggggcccacgggggcacagttcctgagccctgtaatcgtggagatcccgcactttgcctcccatggccgtggagaccgcgagctcgtggttctgaggagcgaaaacggctccgtgtggaaggagcacaggagccgctatggagagagctacctggatcagatcctcaacgggatggacgaagagctggggagcctggaggagctagagaagaagagggtgtgccgaatcatcaccaccgacttcccgctgtacttcgtgatcatgtcacggctctgccaggactacgacatcatcggtcccgaagggggctccctgaagagcaagctggtgcccctggtacaggcaacgttcccggagaatgccgtcaccaagagagtgaagctggctctgcaggcccagcctgtcccggatgagcttgtcactaagctcctgggcaaccaggccacattcagccccattgtcaccgtggagccccggcgccggaagttccaccgccccattgggcttcggatcccactacctccttcctggaccgacaacccgagggacagtggggagggagacaccaccagcctgcgcctgctttgcagcgtcattggaggaacagaccaagcccagtgggaagacataacaggaaccaccaaacttgtatatgccaacgagtgcgccaacttcaccaccaatgtctctgccaggttttggctgtcggactgtcctcggactgctgaggctgtgaactttgccaccctgctgtacaaagagctcactgcagtgccctacatggccaaattcgtcatctttgccaagatgaatgacccccgagaggggcgcctgcgctgctactgcatgacagatgataaagtggacaagaccctggagcagcatgagaacttcgtggaggtggcccggagcagggacatagaggtgttggaaggaatgtccctgtttgcagaactctctgggaacctggtgcctgtgaagaaagctgcccagcagcggagcttccacttccagtcatttcgggagaaccgtctggccatgcctgtaaaggtgagggacagcagtcgagagccgggagggtccctgtcgtttctgcgcaaggcgatgaagtacgaggacacccagcacattctctgccacctgaacatcaccatgcccccctgcgctaagggaagtggagccgaagataggagaaggaccccgacgcccctggccctgcgatacagcattctcagtgagtccacaccaggttctctcagtgggacagagcaggcagagatgaagatggctgttatctcagagcacctcggtctcagctgggcagagttggcccgggagctgcagttcagtgtggaagacatcaacaggatccgagtggaaaatcccaactccctgttggagcagagtgtggccttgctgaacctctgggtcatccgtgaaggccaaaacgcaaacatggagaatctgtacacagccctgcagagcattgaccgtggcgagatcgtgaacatgctggagggttccggccgacagagccgcaacttgaagccagacaggcggcacaccgaccgcgactactcgctgtcaccctcccagatgaatggttactcctcactgcaggacgagctgctgtcccctgcctccctgggctgtgcactttcctctccgctacgtgcagaccagtactggaatgaggtggccgtcctagacgccatccccttggcggccacggagcatgacaccatgctggagatgtctgacatgcaggtgtggtctgcgggcctcacgccttctctggtcactgctgaggactcctctctggagtgtagcaaggctgaggactctgatgccacaggtcacgagtggaagttggagggggcactctcagaggaaccgcggggccccgagttgggctctctggaacttgtggaggacgacacagtggattcagatgccacaaatggccttatcgatttgcttgaacaggaggaaggtcagaggtcagaagagaagctgccaggttctaagaggcaggatgacgcgacaggtgcagggcaggactcagagaatgaagtgtctcttgtttcaggccatcagagggggcaagcccgaatcacacattcccccaccgtgagtcaggtgacggagaggagtcaggacagactgcaggactgggatgcagacggctcgattgtctcatacctgcaagatgctgcacaaggttcctggcaagaggaggtcacgcaaggtccacactcattccagggaacaagtaccatgactgaagggctagagcccggtggatctcaggagtacgagaaggtcctggtgtctgtaagtgagcacacgtggacagaacagcccgaggctgagagctcccaggccgacagggaccggaggcagcaaggccaagaagagcaggtgcaggaggccaagaacaccttcacccaagtggtgcaggggaatgagtttcagaatattccaggggagcaggtgacagaggagcaattcacggatgagcagggcaacattgtcaccaagaagatcattcgcaaggtggttcgacagatagacttgtccagcgccgatgccgcccaggagcacgaggaggtggagctgagagggagtggcctacagccggacctgatagagggcaggaagggggcgcagatagtgaagcgggccagcctgaaaagggggaaacagtgaccccgagccgctctccttggagtagcctctcgggaggtaacgctgcccttctcatcccctctgcatggcctggtcttcagtggagtggctgctccctgtctcaccctatcccctcccagccaccccagcatgatgtgggacaaacaacttgttgttgtgtctcgaggcagagattctcacttcccaaccctgctaacagttggctctgaaccccagcttcctcatcaaggaaacagagttaataatatccacttatcagggaccgcacggttttgtaagaatgccttttgggccgggcacagtggctcatgtctgtaatcccagcattttgtgaggtcgaggcaaaaggattgctttaggccaggagttcaagaccagcctgggcaacagagcaagaccccatcacaaaaaa

SEQ ID NO: 284483 - DNA, 2030 bp, Homo sapiens
agatggtcagatggggccctttcctgtggtggcgcagtccttggatgcagcccaggacagcagcagtgagaaaccagtgggtccttgaccagcccactgtcttcaactcttggcctagggcatctaaagagtatgatgaggactccctcatccccagcagcccggccaccgagacctcagacaacatcagcccggtggccagcccggtgcatacagggtttctggtgagcttcatggttgacgcccggggtggttccatgagaggaagtcgccacaacggcctgcgagtggtgatcccgccacggacgtgcgcagcgcccacccgcatcacctgccgcctggtcaagccccagaagctcagcacgccgcccccactggccgaggaggagggcctggccagcaggatcatagcactggggcccacgggggcacagttcctgagccctgtaatcgtggagatcccgcactttgcctcccatggccgtggagaccgcgagctcgtggttctgaggagcgaaaacggctccgtgtggaaggagcacaggagccgctatggagagagctacctggatcagatcctcaacgggatggacgaagagctggggagcctggaggagctagagaagaagagggtgtgccgaatcatcaccaccgacttcccgctgtacttcgtgatcatgtcacggctctgccaggactacgacatcatcggtcccgaagggggctccctgaagagcaagctggtgcccctggtacaggcaacgttcccggagaatgccgtcaccaagagagtgaagctggctctgcaggcccagcctgtcccggatgagcttgtcactaagctcctgggcaaccaggccacattcagccccattgtcaccgtggagccccggcgccggaagttccaccgccccattgggcttcggatcccactacctccttcctggaccgacaacccgagggacagtggggagggagacaccaccagcctgcgcctgctttgcagcgtcattggaggaacagaccaagcccagtgggaagacataacaggaaccaccaaacttgtatatgccaacgagtgcgccaacttcaccaccaatgtctctgccaggttttggctgtcggactgtcctcggactgctgaggctgtgaactttgccaccctgctgtacaaagagctcactgcagtgccctacatggccaaattcgtcatctttgccaagatgaatgacccccgagaggggcgcctgcgctgctactgcatgacagatgataaagtggacaagaccctggagcagcatgagaacttcgtggaggtggcccggagcagggacatagaggtgttggaaggaatgtccctgtttgcagaactctctgggaacctggtgcctgtgaagaaagctgcccagcagcggagcttccacttccagtcatttcgggagaaccgtctggccatgcctgtaaaggtgagggacagcagtcgagagccgggagggtccctgtcgtttctgcgcaaggcgatgaagtacgaggacacccagcacattctctgccacctgaacatcaccatgcccccctgcgctaagggaagtggagccgaagataggagaaggaccccgacgcccctggccctgcgatacagcattctcagtgagtccacaccaggttctctcagtgggacagagcaggcagagatgaagatggctgttatctcagagcacctcggtctcagctgggcagagttggcccgggagctgcagttcagtgtggaagacatcaacaggatccgagtggaaaatcccaactccctgttggagcagagtgtggccttgctgaacctctgggtcatccgtgaaggccaaaacgcaaacatggagaatctgtacacagccctgcagagcattgaccgtggcgagatcgtcctgcagtgaggagtagccattcatctgggagggtgacagcgagtagtcgcggtcggtgtgccgcctgtctggcttcaagttgcggctctgtcggccggaaccctccag

SEQ ID NO: 284484 - DNA, 418 bp, Homo sapiens
cagctccatcgcatattaactgggtgatcttgggcaaggaactttgtctctctatgcctcagtttacgtattgatgaaatgggagtaatacagcacccacctcttaggttgccgtgaacattaaatagggcctcacaggtgatggggtgacgtgggcttgccgttattacgactgtgattaataacgcatgtgcgcttcttcagcttcccttcactcccactcctcccatgtgttactctttgtgttaagtccctgaagaaacggactgattgtttaccaggactggggtcagccttccacacccctgcagcataggagctcagatcactttctctgggaaggtggggagagtccaaaacccaaagcaccctttcttcttctgcagggaagtggagccgaagataggagaaggacccc

SEQ ID NO: 284485 - DNA, 331 bp, Homo sapiens
atcattcgcaaggtggttcgacagatagacttgtccagcgccgatgccgcccaggagcacgaggaggtgactgtagaggggcccctggaggatcccagtgagctggaggtcgatattgattactttatgaaacactccaaggtactgaggcgcccgcggccctgggggacccagcgccatcactgctgccttgctctgccgggccgtctgcatgacacctccctccactcacctctttatgagctctctctccagtctctcttctccctggtgggcagtgtgtctgcacctccgtgtggcctcctttcgatcttctgcctgtgttctgccc

SEQ ID NO: 284486 - DNA, 179 bp, Homo sapiens
acttgtgacaccccctcgactccctggtgacgctcctcccagatcgctctacatgacattcaggacacacacacacacacacacacacacaccactcgcctccactgaatctacacacagattttactgtgacttctgaagctgtatagactctgctgtggataaattggaatttttta

SEQ ID NO: 284487 - DNA, 1251 bp, Homo sapiens
ggcggctcgggcttccgccttggggagccggcggcggagtccgggacgtggagacccggggtcccggcagccgggcggcccgcgggcccagggtggggatgcaccgccgcggggtgggagctggcgccatcgccaagaagaaacttgcagaggccaagtataaggagcgagggacggtcttggctgaggaccagctagcccagatgtcaaagcagttggacatgttcaagaccaacctggaggaatttgccagcaaacacaagcaggagatccggaagaatcctgagttccgtgtgcagttccaggacatgtgtgcaaccattggcgtggatccgctggcctctggaaaaggattttggtctgagatgctgggcgtgggggacttctattacgaactaggtgtccaaattatcgaagtgtgcctggcgctgaagcatcggaatggaggtctgataactttggaggaactacatcaacaggtgttgaagggaaggggcaagttcgcccaggatgtcagtcaagatgacctgatcagagccatcaagaaactaaaggcacttggcactggcttcggcatcatccctgtgggcggcacttacctcattcagtctgttccagctgagctcaatatggatcacaccgtggtgctgcagctggcagagaagaatggctacgtgactgtcagtgagatcaaagccagtcttaaatgggagaccgagcgagcgcggcaagtgctggaacacctgctgaaggaagggttggcgtggctggacttacaggccccaggggaggcccactactggctgccagctctcttcactgacctctactcccaggagattacagctgaggaggccagagaagccctcccctgactgcatgtggaagggcacacagcagcaggcagggaggaggcggaggtggcaaataaacctgggcaattttgtttatacaaaaaatagaaaaaaagttccaagtttttctttcttccctcattcttttatttttgaaaagtgccttcacgttgcatttttattggaggaaaacctcgctcgttcagtaagcataatctgattaacacagagaacggcaagcacatataaaatgatttttgtaggtcatctgcaagttcatggaagagctgggcctagaatgtgggttgtttcctggcctgtctagtctttgtagctgtgagacatagattacagcctatgctaattcaaaccttttaaataaaatgttccttatctc

SEQ ID NO: 284488 - DNA, 1387 bp, Homo sapiens
ccaaacaattcaactgtctaaacctttcatctgtaaaatggggataacataattatttacctaatgatattggacagaaaccacccattttgagcatattatttccagctctaggaactgagtctattcttgcataagtatggtcaatcatgtttgctacccggaataacttaattcaaaggtagctaaacagtgatctctgtttaacagtttctgggaaaatggaggcagtgatttgctgaaggccacacagcaaatatttctgtagctatgttctttccactatattccactatgctaggctttacccctcttccccagcagcacaagttaaatgacttcgtagcatttttcaaattcaggcaaaggccaaggccaaacagctcgtttagttggttgtgtaaaggtttgaaggcacttagtagatttagtttgaaaacctcactgaagccaaaataggtgtgggggttgcttacctaccctttgtctatggaacctccctgttctcaaactgctcttcttcccttttccctccacaggatatagcctgggcccatctcttcctctgcctatccttgtaggacatgctcactccaagctctggaataggtctgtctttggaaaccactcaaactaagatgtcactgactgccagagcatggaccccatttccaatgagaaaacttgtcctgctctccccacccagccctgcccttccaccatgttatgcaagtcttcggtttccagacaattcatggcactttccttctccctaacagttccaggcctgggtgaggtgtggttgacaagatgatcccattcgtcctttacacaagccctcccacacccacaggcacttcctccttctgccaaaacaaactttattgcaccaaaaaggaaaacaaaaaaaacaaaaaaacttcatttatatacagtcagatataaagacatctctttgactcctgtgcatatatttcctcaactcaagattagggcataaaagtcaggctgctatgccagacatgctctgccctatggcagggccaaggagaggattgtcacttgaaagtgggaacacttaaatggatgacagacaacactggacccacagaccaagagcattcttctaagccctggagtagctcgaggaatggaagagggaaattggaagcagggtcccttttcgatcttcatgtgaagagacccagcctcttcaagggtatccaagataaacttccgttccccaagcccaccaatccctgtccagttcctttgcttcctgccctcccaaataggacattctcctttgtgcccagcccccctttgcacagatcctccaaggggagtcccatgatccacaaggcagagaccttcatagcagagggca

SEQ ID NO: 284489 - DNA, 678 bp, Homo sapiens
aagcacgttaaatggtgtggattgaagttacagaaagaaaacttaaaaccatttacaaatcatcatcaactataaatagacacggccttgatgtcaagaggacatttatagtttttcaaagatgatactgcttttgtttttagattttcgtagctctctgttgacaggcctagcaaggtctcagaatccatttctcatattatggtcagttatttcataaggagagtgttaaaaaaaaattaggaactagaatgttatttgctacttgtaggccactggaattgtaatgactgtcaacttatttaaagtgggtaatctctttttctgatttctgttccctgtctccaaacaggtctgataactttggaggaactacatcaacaggtgttgaagggaaggggcaagttcgcccaggatgtcagtcagtaggtcttgtcttccaatcccttggagtacagaaagaggtctttaaaattcagatggaactcttttctccctattcctcatgtctaggctagcttagaaatctgtatgatctccatatcatacaggaaaaaaaaaaacaaaaaacaaacaaaaaataagagatagggtctcacttttgcccgggctggagtacagtggcatgatcacagcttactgctaccaagatcattgcttactgcagcctcaaactct

SEQ ID NO: 284490 - DNA, 509 bp, Homo sapiens
  misc_feature (9)..(9): n is a, c, g, or t
  misc_feature (31)..(31): n is a, c, g, or t
cttaatggntgactcccagcttttcccccantaggtaacggaatcggctgaatccagattgcaaccgcttccaataacacggtttttgggaaaaccacttatcttccaagccacgtaggtcaagatatccactggatttgaaacaataagcaacttgcagttcgggctgtattttacaacattaggaatgagtctgttccagctgagctcaatatggatcacaccgtggtgctgcagctggcagagaagaatggctacgtgactgtcagtgagatcaaagccagtcttaaatgggagaccgagcgagcgcggcaagtgctggaacacctgctgaaggaagggttggcgtggctggacttacaggccccaggggaggcccactactggctgccagctctcttcactgacctctactcccaggtttatttgccacctccgcctcctccctgcctgctgctgtgtgcccttccacatgcagtcaggggagggcttctctggcctcctcagct

SEQ ID NO: 284491 - DNA, 2816 bp, Homo sapiens
ggcggctcgggcttccgccttggggagccggcggcggagtccgggacgtggagacccggggtcccggcagccgggcggcccgcgggcccagggtggggatgcaccgccgcggggtgggagctggcgccatcgccaagaagaaacttgcagaggccaagtataaggagcgagggacggtcttggctgaggaccagctagcccagatgtcaaagcagttggacatgttcaagaccaacctggaggaatttgccagcaaacacaagcaggagatccggaagaatcctgagttccgtgtgcagttccaggacatgtgtgcaaccattggcgtggatccgctggcctctggaaaaggattttggtctgagatgctgggcgtgggggacttctattacgaactaggtgtccaaattatcgaagtgtgcctggcgctgaagcatcggaatggaggtctgataactttggaggaactacatcaacaggtgttgaagggaaggggcaagttcgcccaggatgtcagtcaagatgacctgatcagagccatcaagaaactaaaggcacttggcactggcttcggcatcatccctgtgggcggcacttacctcattcagtctgttccagctgagctcaatatggatcacaccgtggtgctgcagctggcagagaagaatggctacgtgactgtcagtgagatcaaagccagtcttaaatgggagaccgagcgagcgcggcaagtgctggaacacctgctgaaggaagggttggcgtggctggacttacaggccccaggggaggcccactactggctgccagctctcttcactgacctctactcccaggagattacagctgaggaggccagagaagccctcccctgactgcatgtggaagggcacacagcagcaggcagggaggaggcggaggtggcaaataaacctgggcaattttgtttatacaaaaaatagaaaaaaagttccaagtttttctttcttccctcattcttttatttttgaaaagtgccttcacgttgcatttttattggaggaaaacctcgctcgttcagtaagcataatctgattaacacagagaacggcaagcacatataaaatgatttttgtaggtcatctgcaagttcatggaagagctgggcctagaatgtgggttgtttcctggcctgtctagtctttgtagctgtgagacatagattacagcctatgctaattcaaaccttttaaataaaatgttccttatctcaaactagctggtcctaatggaccagtaaataatattcactttcagtctcttctggcttcctctgtagaggctctaggttatgacagagttagctgtgagtatgaaggaaatagaagtcaatgtccaatcgtggctaaattggaggaaagaaaacaatggaatctgaggggaatcaaacaatagttagggaatgttctattttcttaaattccctactagctttctcaccctcctgtagtgattgccaggtccctctagcctcagtagtgggaaagggagtcatttactgaacacctaccctgtgccattttacatacagctcacttaaatttcaccaagtaggcagccttcaacatcacaggtgattcaatcaaagtaatttgccaggggccgccagcttcagccgagctaaagctggtgcctaggcctattaacccgagcccatgccttcatgtatcactgcatagtacagaatggcagcacatactgtgtgtagacatttttctacacacgtggtcagccaagagtaaaagcctctgcatcagaaagcaagaatctcctatagccagtagaagtggtgatgagggaagaggccagagttgtttaaggctcccaaagtccttatggtctaaaggctaagatcctaaaagtgctagtttagtactggaaatctgaaaactcaatggtttttccatactgagacccttcctttagcaggatatagcctgggcccatctcttcctctgcctatccttgtaggacatgctcactccaagctctggaataggtctgtctttggaaaccactcaaactaagatgtcactgactgccagagcatggaccccatttccaatgagaaaacttgtcctgctctccccacccagccctgcccttccaccatgttatgcaagtcttcggtttccagacaattcatggcactttccttctccctaacagttccaggcctgggtgaggtgtggttgacaagatgatcccattcgtcctttacacaagccctcccacacccacaggcacttcctccttctgccaaaacaaactttattgcaccaaaaaggaaaacaaaaaaaacaaaaaaacttcatttatatacagtcagatataaagacatctctttgactcctgtgcatatatttcctcaactcaagattagggcataaaagtcaggctgctatgccagacatgctctgccctatggcagggccaaggagaggattgtcacttgaaagtgggaacacttaaatggatgacagacaacactggacccacagaccaagagcattcttctaagccctggagtagctcgaggaatggaagagggaaattggaagcagggtcccttttcgatcttcatgtgaagagacccagcctcttcaagggtatccaagataaacttccgttccccaagcccaccaatccctgtccagttcctttgcttcctgccctcccaaataggacattctcctttgtgcccagcccccctttgcacagatcctccaaggggagtcccatgatccacaaggcagagaccttcatagcagagggca

SEQ ID NO: 284492 - DNA, 1797 bp, Homo sapiens
ggcggctcgggcttccgccttggggagccggcggcggagtccgggacgtggagacccggggtcccggcagccgggcggcccgcgggcccagggtggggatgcaccgccgcggggtgggagctggcgccatcgccaagaagaaacttgcagaggccaagtataaggagcgagggacggtcttggctgaggaccagctagcccagatgtcaaagcagttggacatgttcaagaccaacctggaggaatttgccagcaaacacaagcaggagatccggaagaatcctgagttccgtgtgcagttccaggacatgtgtgcaaccattggcgtggatccgctggcctctggaaaaggattttggtctgagatgctgggcgtgggggacttctattacgaactaggtgtccaaattatcgaagtgtgcctggcgctgaagcatcggaatggaggtctgataactttggaggaactacatcaacaggtgttgaagggaaggggcaagttcgcccaggatgtcagtcaagatgacctgatcagagccatcaagaaactaaaggcacttggcactggcttcggcatcatccctgtgggcggcacttacctcattcagtctgttccagctgagctcaatatggatcacaccgtggtgctgcagctggcagagaagaatggctacgtgactgtcagtgagatcaaagccagtcttaaatgggagaccgagcgagcgcggcaagtgctggaacacctgctgaaggaagggttggcgtggctggacttacaggccccaggggaggcccactactggctgccagctctcttcactgacctctactcccaggagattacagctgaggaggccagagaagccctcccctgactgcatgtggaagggcacacagcagcaggcagggaggaggcggaggtggcaaataaacctgggcaattttgtttatacaaaaaatagaaaaaaagttccaagtttttctttcttccctcattcttttatttttgaaaagtgccttcacgttgcatttttattggaggaaaacctcgctcgttcagtaagcataatctgattaacacagagaacggcaagcacatataaaatgatttttgtaggtcatctgcaagttcatggaagagctgggcctagaatgtgggttgtttcctggcctgtctagtctttgtagctgtgagacatagattacagcctatgctaattcaaaccttttaaataaaatgttccttatctcaaactagctggtcctaatggaccagtaaataatattcaaaaaaaaaaaaaaaaaaaaaaaaacaaaaaaaaaaaaaaaaaaaaaaaaagaaaaaaaaaaaaaaaaaaaaaaaaaaaaaaaaaaaagaaaaaaaaaaaaaaaaaaagggggggggatcatttatatatactcactcccagcagggacacctcgacgctgcaagccgtcacaatagtccatttgtctagcagcagatagagcgcggcccgtcatgtagacggtctacgtattattattataaaccaacatcggccccgcgcttccaccttgtcaactacacaagcaccgggtccagagtgagcagaaactaatcacccgtggctgccacaccactccttacgtcgcggcggaacacgacaccatcttccttgccatgctgcgggtaggaccctaacccaggcccgcgcgacacccacaccgacgagtagcaaaagagacgcaaggcccgtccggcaaggggactatattctcaatcacttgctcggcgcagctaatgtatgggctggt

SEQ ID NO: 284493 - DNA, 966 bp, Homo sapiens
ggcggctcgggcttccgccttggggagccggcggcggagtccgggacgtggagacccggggtcccggcagccgggcggcccgcgggcccagggtggggatgcaccgccgcggggtgggagctggcgccatcgccaagaagaaacttgcagaggccaagtataaggagcgagggacggtcttggctgaggaccagctagcccagatgtcaaagcagttggacatgttcaagaccaacctggaggaatttgccagcaaacacaagcaggagatccggaagaatcctgagttccgtgtgcagttccaggacatgtgtgcaaccattggcgtggatccgctggcctctggaaaaggattttggtctgagatgctgggcgtgggggacttctattacgaactaggtgtccaaattatcgaagtgtgcctggcgctgaagcatcggaatggaggtctgataactttggaggaactacatcaacaggtgttgaagggaaggggcaagttcgcccaggatgtcagtcaagatgacctgatcagagccatcaagaaactaaaggcacttggcactggcttcggcatcatccctgtgggcggcacttacctcattcagtctgttccagctgagctcaatatggatcacaccgtggtgctgcagctggcagagaagaatggctacgtgactgtcagtgagatcaaagccagtcttaaatgggagaccgagcgagcgcggcaagtgctggaacacctgctgaaggaagggttggcgtggctggacttacaggccccaggggaggcccactactggctgccagctctcttcactgacctctactcccaggagattacagctgaggaggccagagaagccctcccctgactgcatgtggaagggcacacagcagcaggcagggaggaggcggaggtggcaaataaaccaagatgcggccgccaccgcgtggagtatgagg

SEQ ID NO: 284494 - DNA, 2959 bp, Homo sapiens
gccccactgggtttctatttaggaatctgtggtaaaagtccgttttccagcctgttaaaaaaagacatggacccaagggttgggtattttatacaggaaaaaaggtttagggctgggcacatgggctcatgcctaaatcccagcactttgggaggccgagggggggggatcacttgctggtcttgaactcttggtctcgagcgatccacctagctcgatgtcccaaagtgttggaattacaggcgtgagccactgcgcccggccagaaatgacttttagattgcctgccctctggaaccgtctgaccctgttcttcagcaggagttaccgtgagtccgattgtttcctgagtagcagatggagcagaagaacttcatgccatgcagggaagacttcccatatgatagatgttttaatgcaggtttgaaagaaaagaagggatgtaaattaatcaataaccgagattttgtttttctgtcttgtagctggaaaaggattttggtctgagatgctgggcgtgggggacttctattacgaactaggtgtccaaattatcgaagtgtgcctggcgctgaagcatcggaatggaggtctgataactttggaggaactacatcaacaggtgttgaagggaaggggcaagttcgcccaggatgtcagtcaagatgacctgatcagagccatcaagaaactaaaggcacttggcactggcttcggcatcatccctgtgggcggcacttacctcattcagtctgttccagctgagctcaatatggatcacaccgtggtgctgcagctggcagagaagaatggctacgtgactgtcagtgagatcaaagccagtcttaaatgggagaccgagcgagcgcggcaagtgctggaacacctgctgaaggaagggttggcgtggctggacttacaggccccaggggaggcccactactggctgccagctctcttcactgacctctactcccaggagattacagctgaggaggccagagaagccctcccctgactgcatgtggaagggcacacagcagcaggcagggaggaggcggaggtggcaaataaacctgggcaattttgtttatacaaaaaatagaaaaaaagttccaagtttttctttcttccctcattcttttatttttgaaaagtgccttcacgttgcatttttattggaggaaaacctcgctcgttcagtaagcataatctgattaacacagagaacggcaagcacatataaaatgatttttgtaggtcatctgcaagttcatggaagagctgggcctagaatgtgggttgtttcctggcctgtctagtctttgtagctgtgagacatagattacagcctatgctaattcaaaccttttaaataaaatgttccttatctcaaactagctggtcctaatggaccagtaaataatattcactttcagtctcttctggcttcctctgtagaggctctaggttatgacagagttagctgtgagtatgaaggaaatagaagtcaatgtccaatcgtggctaaattggaggaaagaaaacaatggaatctgaggggaatcaaacaatagttagggaatgttctattttcttaaattccctactagctttctcaccctcctgtagtgattgccaggtccctctagcctcagtagtgggaaagggagtcatttactgaacacctaccctgtgccattttacatacagctcacttaaatttcaccaagtaggcagccttcaacatcacaggtgattcaatcaaagtaatttgccaggggccgccagcttcagccgagctaaagctggtgcctaggcctattaacccgagcccatgccttcatgtatcactgcatagtacagaatggcagcacatactgtgtgtagacatttttctacacacgtggtcagccaagagtaaaagcctctgcatcagaaagcaagaatctcctatagccagtagaagtggtgatgagggaagaggccagagttgtttaaggctcccaaagtccttatggtctaaaggctaagatcctaaaagtgctagtttagtactggaaatctgaaaactcaatggtttttccatactgagacccttcctttagcaggatatagcctgggcccatctcttcctctgcctatccttgtaggacatgctcactccaagctctggaataggtctgtctttggaaaccactcaaactaagatgtcactgactgccagagcatggaccccatttccaatgagaaaacttgtcctgctctccccacccagccctgcccttccaccatgttatgcaagtcttcggtttccagacaattcatggcactttccttctccctaacagttccaggcctgggtgaggtgtggttgacaagatgatcccattcgtcctttacacaagccctcccacacccacaggcacttcctccttctgccaaaacaaactttattgcaccaaaaaggaaaacaaaaaaaacaaaaaaacttcatttatatacagtcagatataaagacatctctttgactcctgtgcatatatttcctcaactcaagattagggcataaaagtcaggctgctatgccagacatgctctgccctatggcagggccaaggagaggattgtcacttgaaagtgggaacacttaaatggatgacagacaacactggacccacagaccaagagcattcttctaagccctggagtagctcgaggaatggaagagggaaattggaagcagggtcccttttcgatcttcatgtgaagagacccagcctcttcaagggtatccaagataaacttccgttccccaagcccaccaatccctgtccagttcctttgcttcctgccctcccaaataggacattctcctttgtgcccagcccccctttgcacagatcctccaaggggagtcccatgatccacaaggcagagaccttcatagcagagggca

SEQ ID NO: 284495 - DNA, 2895 bp, Homo sapiens
ggcggctcgggcttccgccttggggagccggcggcggagtccgggacgtggagacccggggtcccggcagccgggcggcccgcgggcccagggtggggatgcaccgccgcggggtgggagctggcgccatcgccaagaagaaacttgcagaggccaagtataaggagcgagggacggtcttggctgaggaccagctagcccagatgtcaaagcagttggacatgttcaagaccaacctggaggaatttgccagcaaacacaagcaggagatccggaagaatcctgagttccgtgtgcagttccaggacatgtgtgcaaccattggcgtggatccgctggcctctggaaaaggattttggtctgagatgctgggcgtgggggacttctattacgaactaggtgtccaaattatcgaagtgtgcctggcgctgaagcatcggaatggagtctacaggcctctaaggacttgagagacatcttagctgtttcatgcagttgaatccatggcaagtctccatggccaagggtctgataactttggaggaactacatcaacaggtgttgaagggaaggggcaagttcgcccaggatgtcagtcaagatgacctgatcagagccatcaagaaactaaaggcacttggcactggcttcggcatcatccctgtgggcggcacttacctcattcagtctgttccagctgagctcaatatggatcacaccgtggtgctgcagctggcagagaagaatggctacgtgactgtcagtgagatcaaagccagtcttaaatgggagaccgagcgagcgcggcaagtgctggaacacctgctgaaggaagggttggcgtggctggacttacaggccccaggggaggcccactactggctgccagctctcttcactgacctctactcccaggagattacagctgaggaggccagagaagccctcccctgactgcatgtggaagggcacacagcagcaggcagggaggaggcggaggtggcaaataaacctgggcaattttgtttatacaaaaaatagaaaaaaagttccaagtttttctttcttccctcattcttttatttttgaaaagtgccttcacgttgcatttttattggaggaaaacctcgctcgttcagtaagcataatctgattaacacagagaacggcaagcacatataaaatgatttttgtaggtcatctgcaagttcatggaagagctgggcctagaatgtgggttgtttcctggcctgtctagtctttgtagctgtgagacatagattacagcctatgctaattcaaaccttttaaataaaatgttccttatctcaaactagctggtcctaatggaccagtaaataatattcactttcagtctcttctggcttcctctgtagaggctctaggttatgacagagttagctgtgagtatgaaggaaatagaagtcaatgtccaatcgtggctaaattggaggaaagaaaacaatggaatctgaggggaatcaaacaatagttagggaatgttctattttcttaaattccctactagctttctcaccctcctgtagtgattgccaggtccctctagcctcagtagtgggaaagggagtcatttactgaacacctaccctgtgccattttacatacagctcacttaaatttcaccaagtaggcagccttcaacatcacaggtgattcaatcaaagtaatttgccaggggccgccagcttcagccgagctaaagctggtgcctaggcctattaacccgagcccatgccttcatgtatcactgcatagtacagaatggcagcacatactgtgtgtagacatttttctacacacgtggtcagccaagagtaaaagcctctgcatcagaaagcaagaatctcctatagccagtagaagtggtgatgagggaagaggccagagttgtttaaggctcccaaagtccttatggtctaaaggctaagatcctaaaagtgctagtttagtactggaaatctgaaaactcaatggtttttccatactgagacccttcctttagcaggatatagcctgggcccatctcttcctctgcctatccttgtaggacatgctcactccaagctctggaataggtctgtctttggaaaccactcaaactaagatgtcactgactgccagagcatggaccccatttccaatgagaaaacttgtcctgctctccccacccagccctgcccttccaccatgttatgcaagtcttcggtttccagacaattcatggcactttccttctccctaacagttccaggcctgggtgaggtgtggttgacaagatgatcccattcgtcctttacacaagccctcccacacccacaggcacttcctccttctgccaaaacaaactttattgcaccaaaaaggaaaacaaaaaaaacaaaaaaacttcatttatatacagtcagatataaagacatctctttgactcctgtgcatatatttcctcaactcaagattagggcataaaagtcaggctgctatgccagacatgctctgccctatggcagggccaaggagaggattgtcacttgaaagtgggaacacttaaatggatgacagacaacactggacccacagaccaagagcattcttctaagccctggagtagctcgaggaatggaagagggaaattggaagcagggtcccttttcgatcttcatgtgaagagacccagcctcttcaagggtatccaagataaacttccgttccccaagcccaccaatccctgtccagttcctttgcttcctgccctcccaaataggacattctcctttgtgcccagcccccctttgcacagatcctccaaggggagtcccatgatccacaaggcagagaccttcatagcagagggca

SEQ ID NO: 284496 - DNA, 2873 bp, Homo sapiens
tgaggatgactcgcccatgggcgagtcgccaagaagaaacttgcagaggccaagtataaggagcgagggacggtcttggctgaggaccagctagcccagatgtcaaagcagttggacatgttcaagaccaacctggaggaatttgccagcaaacacaagcaggagatccggaagaatcctgagttccgtgtgcagttccaggacatgtgtgcaaccattggcgtggatccgctggcctctggaaaaggattttggtctgagatgctgggcgtgggggacttctattacgaactaggtgtccaaattatcgaagtgtgcctggcgctgaagcatcggaatggaggtgagggtggctaggtcctgtgaactggactctggacttctctgagagggagaaaaccgtgattatcgtttccatcctgcagtctacaggcctctaaggacttgagagacatcttagctgtttcatgcagttgaatccatggcaagtctccatggccaagggtctgataactttggaggaactacatcaacaggtgttgaagggaaggggcaagttcgcccaggatgtcagtcaagatgacctgatcagagccatcaagaaactaaaggcacttggcactggcttcggcatcatccctgtgggcggcacttacctcattcagtctgttccagctgagctcaatatggatcacaccgtggtgctgcagctggcagagaagaatggctacgtgactgtcagtgagatcaaagccagtcttaaatgggagaccgagcgagcgcggcaagtgctggaacacctgctgaaggaagggttggcgtggctggacttacaggccccaggggaggcccactactggctgccagctctcttcactgacctctactcccaggagattacagctgaggaggccagagaagccctcccctgactgcatgtggaagggcacacagcagcaggcagggaggaggcggaggtggcaaataaacctgggcaattttgtttatacaaaaaatagaaaaaaagttccaagtttttctttcttccctcattcttttatttttgaaaagtgccttcacgttgcatttttattggaggaaaacctcgctcgttcagtaagcataatctgattaacacagagaacggcaagcacatataaaatgatttttgtaggtcatctgcaagttcatggaagagctgggcctagaatgtgggttgtttcctggcctgtctagtctttgtagctgtgagacatagattacagcctatgctaattcaaaccttttaaataaaatgttccttatctcaaactagctggtcctaatggaccagtaaataatattcactttcagtctcttctggcttcctctgtagaggctctaggttatgacagagttagctgtgagtatgaaggaaatagaagtcaatgtccaatcgtggctaaattggaggaaagaaaacaatggaatctgaggggaatcaaacaatagttagggaatgttctattttcttaaattccctactagctttctcaccctcctgtagtgattgccaggtccctctagcctcagtagtgggaaagggagtcatttactgaacacctaccctgtgccattttacatacagctcacttaaatttcaccaagtaggcagccttcaacatcacaggtgattcaatcaaagtaatttgccaggggccgccagcttcagccgagctaaagctggtgcctaggcctattaacccgagcccatgccttcatgtatcactgcatagtacagaatggcagcacatactgtgtgtagacatttttctacacacgtggtcagccaagagtaaaagcctctgcatcagaaagcaagaatctcctatagccagtagaagtggtgatgagggaagaggccagagttgtttaaggctcccaaagtccttatggtctaaaggctaagatcctaaaagtgctagtttagtactggaaatctgaaaactcaatggtttttccatactgagacccttcctttagcaggatatagcctgggcccatctcttcctctgcctatccttgtaggacatgctcactccaagctctggaataggtctgtctttggaaaccactcaaactaagatgtcactgactgccagagcatggaccccatttccaatgagaaaacttgtcctgctctccccacccagccctgcccttccaccatgttatgcaagtcttcggtttccagacaattcatggcactttccttctccctaacagttccaggcctgggtgaggtgtggttgacaagatgatcccattcgtcctttacacaagccctcccacacccacaggcacttcctccttctgccaaaacaaactttattgcaccaaaaaggaaaacaaaaaaaacaaaaaaacttcatttatatacagtcagatataaagacatctctttgactcctgtgcatatatttcctcaactcaagattagggcataaaagtcaggctgctatgccagacatgctctgccctatggcagggccaaggagaggattgtcacttgaaagtgggaacacttaaatggatgacagacaacactggacccacagaccaagagcattcttctaagccctggagtagctcgaggaatggaagagggaaattggaagcagggtcccttttcgatcttcatgtgaagagacccagcctcttcaagggtatccaagataaacttccgttccccaagcccaccaatccctgtccagttcctttgcttcctgccctcccaaataggacattctcctttgtgcccagcccccctttgcacagatcctccaaggggagtcccatgatccacaaggcagagaccttcatagcagagggca

SEQ ID NO: 284497 - DNA, 2855 bp, Homo sapiens
ggcggctcgggcttccgccttggggagccggcggcggagtccgggacgtggagacccggggtcccggcagccgggcggcccgcgggcccagggtggggatgcaccgccgcggggtgggagctggcgccatcgccaagaagaaacttgcagaggccaagtataaggagcgagggacggtcttggctgaggaccagctagcccagatgtcaaagcagttggacatgttcaagaccaacctggaggaatttgccagcaaacacaagcaggagatccggaagaatcctgagttccgtgtgcagttccaggacatgtgtgcaaccattggcgtggatccgctggcctctggaaaaggattttggtctgagatgctgggcgtgggggacttctattacgaactaggtgtccaaattatcgaagtgtgcctggcgctgaagcatcggaatggaggtctgataactttggaggaactacatcaacaggtgttgaagggaaggggcaagttcgcccaggatgtcagtcagtaggtcttgtcttccaatcccttggagtacagaaagagagatgacctgatcagagccatcaagaaactaaaggcacttggcactggcttcggcatcatccctgtgggcggcacttacctcattcagtctgttccagctgagctcaatatggatcacaccgtggtgctgcagctggcagagaagaatggctacgtgactgtcagtgagatcaaagccagtcttaaatgggagaccgagcgagcgcggcaagtgctggaacacctgctgaaggaagggttggcgtggctggacttacaggccccaggggaggcccactactggctgccagctctcttcactgacctctactcccaggagattacagctgaggaggccagagaagccctcccctgactgcatgtggaagggcacacagcagcaggcagggaggaggcggaggtggcaaataaacctgggcaattttgtttatacaaaaaatagaaaaaaagttccaagtttttctttcttccctcattcttttatttttgaaaagtgccttcacgttgcatttttattggaggaaaacctcgctcgttcagtaagcataatctgattaacacagagaacggcaagcacatataaaatgatttttgtaggtcatctgcaagttcatggaagagctgggcctagaatgtgggttgtttcctggcctgtctagtctttgtagctgtgagacatagattacagcctatgctaattcaaaccttttaaataaaatgttccttatctcaaactagctggtcctaatggaccagtaaataatattcactttcagtctcttctggcttcctctgtagaggctctaggttatgacagagttagctgtgagtatgaaggaaatagaagtcaatgtccaatcgtggctaaattggaggaaagaaaacaatggaatctgaggggaatcaaacaatagttagggaatgttctattttcttaaattccctactagctttctcaccctcctgtagtgattgccaggtccctctagcctcagtagtgggaaagggagtcatttactgaacacctaccctgtgccattttacatacagctcacttaaatttcaccaagtaggcagccttcaacatcacaggtgattcaatcaaagtaatttgccaggggccgccagcttcagccgagctaaagctggtgcctaggcctattaacccgagcccatgccttcatgtatcactgcatagtacagaatggcagcacatactgtgtgtagacatttttctacacacgtggtcagccaagagtaaaagcctctgcatcagaaagcaagaatctcctatagccagtagaagtggtgatgagggaagaggccagagttgtttaaggctcccaaagtccttatggtctaaaggctaagatcctaaaagtgctagtttagtactggaaatctgaaaactcaatggtttttccatactgagacccttcctttagcaggatatagcctgggcccatctcttcctctgcctatccttgtaggacatgctcactccaagctctggaataggtctgtctttggaaaccactcaaactaagatgtcactgactgccagagcatggaccccatttccaatgagaaaacttgtcctgctctccccacccagccctgcccttccaccatgttatgcaagtcttcggtttccagacaattcatggcactttccttctccctaacagttccaggcctgggtgaggtgtggttgacaagatgatcccattcgtcctttacacaagccctcccacacccacaggcacttcctccttctgccaaaacaaactttattgcaccaaaaaggaaaacaaaaaaaacaaaaaaacttcatttatatacagtcagatataaagacatctctttgactcctgtgcatatatttcctcaactcaagattagggcataaaagtcaggctgctatgccagacatgctctgccctatggcagggccaaggagaggattgtcacttgaaagtgggaacacttaaatggatgacagacaacactggacccacagaccaagagcattcttctaagccctggagtagctcgaggaatggaagagggaaattggaagcagggtcccttttcgatcttcatgtgaagagacccagcctcttcaagggtatccaagataaacttccgttccccaagcccaccaatccctgtccagttcctttgcttcctgccctcccaaataggacattctcctttgtgcccagcccccctttgcacagatcctccaaggggagtcccatgatccacaaggcagagaccttcatagcagagggca

SEQ ID NO: 284498 - DNA, 2338 bp, Homo sapiens
accgagccgcctactactactaaattcgcggcccgtcgaccaagatgacctgatcagagccatcaagaaactaaaggcacttggcactggcttcggcatcatccctgtgggcggcacttacctcattcagtctgttccagctgagctcaatatggatcacaccgtggtgctgcagctggcagagaagaatggctacgtgactgtcagtgagatcaaagccagtcttaaatgggagaccgagcgagcgcggcaagtgctggaacacctgctgaaggaagggttggcgtggctggacttacaggccccaggggaggcccactactggctgccagctctcttcactgacctctactcccaggagattacagctgaggaggccagagaagccctcccctgactgcatgtggaagggcacacagcagcaggcagggaggaggcggaggtggcaaataaacctgggcaattttgtttatacaaaaaatagaaaaaaagttccaagtttttctttcttccctcattcttttatttttgaaaagtgccttcacgttgcatttttattggaggaaaacctcgctcgttcagtaagcataatctgattaacacagagaacggcaagcacatataaaatgatttttgtaggtcatctgcaagttcatggaagagctgggcctagaatgtgggttgtttcctggcctgtctagtctttgtagctgtgagacatagattacagcctatgctaattcaaaccttttaaataaaatgttccttatctcaaactagctggtcctaatggaccagtaaataatattcactttcagtctcttctggcttcctctgtagaggctctaggttatgacagagttagctgtgagtatgaaggaaatagaagtcaatgtccaatcgtggctaaattggaggaaagaaaacaatggaatctgaggggaatcaaacaatagttagggaatgttctattttcttaaattccctactagctttctcaccctcctgtagtgattgccaggtccctctagcctcagtagtgggaaagggagtcatttactgaacacctaccctgtgccattttacatacagctcacttaaatttcaccaagtaggcagccttcaacatcacaggtgattcaatcaaagtaatttgccaggggccgccagcttcagccgagctaaagctggtgcctaggcctattaacccgagcccatgccttcatgtatcactgcatagtacagaatggcagcacatactgtgtgtagacatttttctacacacgtggtcagccaagagtaaaagcctctgcatcagaaagcaagaatctcctatagccagtagaagtggtgatgagggaagaggccagagttgtttaaggctcccaaagtccttatggtctaaaggctaagatcctaaaagtgctagtttagtactggaaatctgaaaactcaatggtttttccatactgagacccttcctttagcaggatatagcctgggcccatctcttcctctgcctatccttgtaggacatgctcactccaagctctggaataggtctgtctttggaaaccactcaaactaagatgtcactgactgccagagcatggaccccatttccaatgagaaaacttgtcctgctctccccacccagccctgcccttccaccatgttatgcaagtcttcggtttccagacaattcatggcactttccttctccctaacagttccaggcctgggtgaggtgtggttgacaagatgatcccattcgtcctttacacaagccctcccacacccacaggcacttcctccttctgccaaaacaaactttattgcaccaaaaaggaaaacaaaaaaaacaaaaaaacttcatttatatacagtcagatataaagacatctctttgactcctgtgcatatatttcctcaactcaagattagggcataaaagtcaggctgctatgccagacatgctctgccctatggcagggccaaggagaggattgtcacttgaaagtgggaacacttaaatggatgacagacaacactggacccacagaccaagagcattcttctaagccctggagtagctcgaggaatggaagagggaaattggaagcagggtcccttttcgatcttcatgtgaagagacccagcctcttcaagggtatccaagataaacttccgttccccaagcccaccaatccctgtccagttcctttgcttcctgccctcccaaataggacattctcctttgtgcccagcccccctttgcacagatcctccaaggggagtcccatgatccacaaggcagagaccttcatagcagagggca

SEQ ID NO: 284499 - DNA, 2496 bp, Homo sapiens
ggcggctcgggcttccgccttggggagccggcggcggagtccgggacgtggagacccggggtcccggcagccgggcggcccgcgggcccagggtggggatgcaccgccgcggggtgggagctggcgccatcgccaagaagaaacttgcagaggccaagtataaggagcgagggacggtcttggctgaggaccagctagcccagatgtcaaagcagttggacatgttcaagaccaacctggaggaatttgccagcaaacacaagcaggagatccggaagaatcctgagttccgtgtgcagttccaggacatgtgtgcaaccattggcgtggatccgctggcctaagaatggctacgtgactgtcagtgagatcaaagccagtcttaaatgggagaccgagcgagcgcggcaagtgctggaacacctgctgaaggaagggttggcgtggctggacttacaggccccaggggaggcccactactggctgccagctctcttcactgacctctactcccaggagattacagctgaggaggccagagaagccctcccctgactgcatgtggaagggcacacagcagcaggcagggaggaggcggaggtggcaaataaacctgggcaattttgtttatacaaaaaatagaaaaaaagttccaagtttttctttcttccctcattcttttatttttgaaaagtgccttcacgttgcatttttattggaggaaaacctcgctcgttcagtaagcataatctgattaacacagagaacggcaagcacatataaaatgatttttgtaggtcatctgcaagttcatggaagagctgggcctagaatgtgggttgtttcctggcctgtctagtctttgtagctgtgagacatagattacagcctatgctaattcaaaccttttaaataaaatgttccttatctcaaactagctggtcctaatggaccagtaaataatattcactttcagtctcttctggcttcctctgtagaggctctaggttatgacagagttagctgtgagtatgaaggaaatagaagtcaatgtccaatcgtggctaaattggaggaaagaaaacaatggaatctgaggggaatcaaacaatagttagggaatgttctattttcttaaattccctactagctttctcaccctcctgtagtgattgccaggtccctctagcctcagtagtgggaaagggagtcatttactgaacacctaccctgtgccattttacatacagctcacttaaatttcaccaagtaggcagccttcaacatcacaggtgattcaatcaaagtaatttgccaggggccgccagcttcagccgagctaaagctggtgcctaggcctattaacccgagcccatgccttcatgtatcactgcatagtacagaatggcagcacatactgtgtgtagacatttttctacacacgtggtcagccaagagtaaaagcctctgcatcagaaagcaagaatctcctatagccagtagaagtggtgatgagggaagaggccagagttgtttaaggctcccaaagtccttatggtctaaaggctaagatcctaaaagtgctagtttagtactggaaatctgaaaactcaatggtttttccatactgagacccttcctttagcaggatatagcctgggcccatctcttcctctgcctatccttgtaggacatgctcactccaagctctggaataggtctgtctttggaaaccactcaaactaagatgtcactgactgccagagcatggaccccatttccaatgagaaaacttgtcctgctctccccacccagccctgcccttccaccatgttatgcaagtcttcggtttccagacaattcatggcactttccttctccctaacagttccaggcctgggtgaggtgtggttgacaagatgatcccattcgtcctttacacaagccctcccacacccacaggcacttcctccttctgccaaaacaaactttattgcaccaaaaaggaaaacaaaaaaaacaaaaaaacttcatttatatacagtcagatataaagacatctctttgactcctgtgcatatatttcctcaactcaagattagggcataaaagtcaggctgctatgccagacatgctctgccctatggcagggccaaggagaggattgtcacttgaaagtgggaacacttaaatggatgacagacaacactggacccacagaccaagagcattcttctaagccctggagtagctcgaggaatggaagagggaaattggaagcagggtcccttttcgatcttcatgtgaagagacccagcctcttcaagggtatccaagataaacttccgttccccaagcccaccaatccctgtccagttcctttgcttcctgccctcccaaataggacattctcctttgtgcccagcccccctttgcacagatcctccaaggggagtcccatgatccacaaggcagagaccttcatagcagagggca

SEQ ID NO: 284500 - DNA, 2615 bp, Homo sapiens
ccaaacaattcaactgtctaaacctttcatctgtaaaatggggataacataattatttacctaatgatattggacagaaaccacccattttgagcatattatttccagctctaggaactgagtctattcttgcataagtatggtcaatcatgtttgctacccggaataacttaattcaaaggtagctaaacagtgatctctgtttaacagtttctgggaaaatggaggcagtgatttgctgaaggccacacagcaaatatttctgtagctatgttctttccactatattccactatgctaggctttacccctcttccccagcagcacaagttaaatgacttcgtagcatttttcaaattcaggcaaaggccaaggccaaacagctcgtttagttggttgtgtaaaggtttgaaggcacttagtagatttagtttgaaaacctcactgaagccaaaataggtgtgggggttgcttacctaccctttgtctatggaacctccctgttctcaaactgctcttcttcccttttccctccagaacacctgctgaaggaagggttggcgtggctggacttacaggccccaggggaggcccactactggctgccagctctcttcactgacctctactcccaggagattacagctgaggaggccagagaagccctcccctgactgcatgtggaagggcacacagcagcaggcagggaggaggcggaggtggcaaataaacctgggcaattttgtttatacaaaaaatagaaaaaaagttccaagtttttctttcttccctcattcttttatttttgaaaagtgccttcacgttgcatttttattggaggaaaacctcgctcgttcagtaagcataatctgattaacacagagaacggcaagcacatataaaatgatttttgtaggtcatctgcaagttcatggaagagctgggcctagaatgtgggttgtttcctggcctgtctagtctttgtagctgtgagacatagattacagcctatgctaattcaaaccttttaaataaaatgttccttatctcaaactagctggtcctaatggaccagtaaataatattcactttcagtctcttctggcttcctctgtagaggctctaggttatgacagagttagctgtgagtatgaaggaaatagaagtcaatgtccaatcgtggctaaattggaggaaagaaaacaatggaatctgaggggaatcaaacaatagttagggaatgttctattttcttaaattccctactagctttctcaccctcctgtagtgattgccaggtccctctagcctcagtagtgggaaagggagtcatttactgaacacctaccctgtgccattttacatacagctcacttaaatttcaccaagtaggcagccttcaacatcacaggtgattcaatcaaagtaatttgccaggggccgccagcttcagccgagctaaagctggtgcctaggcctattaacccgagcccatgccttcatgtatcactgcatagtacagaatggcagcacatactgtgtgtagacatttttctacacacgtggtcagccaagagtaaaagcctctgcatcagaaagcaagaatctcctatagccagtagaagtggtgatgagggaagaggccagagttgtttaaggctcccaaagtccttatggtctaaaggctaagatcctaaaagtgctagtttagtactggaaatctgaaaactcaatggtttttccatactgagacccttcctttagcaggatatagcctgggcccatctcttcctctgcctatccttgtaggacatgctcactccaagctctggaataggtctgtctttggaaaccactcaaactaagatgtcactgactgccagagcatggaccccatttccaatgagaaaacttgtcctgctctccccacccagccctgcccttccaccatgttatgcaagtcttcggtttccagacaattcatggcactttccttctccctaacagttccaggcctgggtgaggtgtggttgacaagatgatcccattcgtcctttacacaagccctcccacacccacaggcacttcctccttctgccaaaacaaactttattgcaccaaaaaggaaaacaaaaaaaacaaaaaaacttcatttatatacagtcagatataaagacatctctttgactcctgtgcatatatttcctcaactcaagattagggcataaaagtcaggctgctatgccagacatgctctgccctatggcagggccaaggagaggattgtcacttgaaagtgggaacacttaaatggatgacagacaacactggacccacagaccaagagcattcttctaagccctggagtagctcgaggaatggaagagggaaattggaagcagggtcccttttcgatcttcatgtgaagagacccagcctcttcaagggtatccaagataaacttccgttccccaagcccaccaatccctgtccagttcctttgcttcctgccctcccaaataggacattctcctttgtgcccagcccccctttgcacagatcctccaaggggagtcccatgatccacaaggcagagaccttcatagcagagggca

SEQ ID NO: 284501 - DNA, 1849 bp, Homo sapiens
cccacagagacaacacagcaagaaacacacgcgagctattatgaaaaggcgtcggggttgcatttttattggaggaaaacctcgctcgttcagtaagcataatctgattaacacagagaacggcaagcacatataaaatgatttttgtaggtcatctgcaagttcatggaagagctgggcctagaatgtgggttgtttcctggcctgtctagtctttgtagctgtgagacatagattacagcctatgctaattcaaaccttttaaataaaatgttccttatctcaaactagctggtcctaatggaccagtaaataatattcactttcagtctcttctggcttcctctgtagaggctctaggttatgacagagttagctgtgagtatgaaggaaatagaagtcaatgtccaatcgtggctaaattggaggaaagaaaacaatggaatctgaggggaatcaaacaatagttagggaatgttctattttcttaaattccctactagctttctcaccctcctgtagtgattgccaggtccctctagcctcagtagtgggaaagggagtcatttactgaacacctaccctgtgccattttacatacagctcacttaaatttcaccaagtaggcagccttcaacatcacaggtgattcaatcaaagtaatttgccaggggccgccagcttcagccgagctaaagctggtgcctaggcctattaacccgagcccatgccttcatgtatcactgcatagtacagaatggcagcacatactgtgtgtagacatttttctacacacgtggtcagccaagagtaaaagcctctgcatcagaaagcaagaatctcctatagccagtagaagtggtgatgagggaagaggccagagttgtttaaggctcccaaagtccttatggtctaaaggctaagatcctaaaagtgctagtttagtactggaaatctgaaaactcaatggtttttccatactgagacccttcctttagcaggatatagcctgggcccatctcttcctctgcctatccttgtaggacatgctcactccaagctctggaataggtctgtctttggaaaccactcaaactaagatgtcactgactgccagagcatggaccccatttccaatgagaaaacttgtcctgctctccccacccagccctgcccttccaccatgttatgcaagtcttcggtttccagacaattcatggcactttccttctccctaacagttccaggcctgggtgaggtgtggttgacaagatgatcccattcgtcctttacacaagccctcccacacccacaggcacttcctccttctgccaaaacaaactttattgcaccaaaaaggaaaacaaaaaaaacaaaaaaacttcatttatatacagtcagatataaagacatctctttgactcctgtgcatatatttcctcaactcaagattagggcataaaagtcaggctgctatgccagacatgctctgccctatggcagggccaaggagaggattgtcacttgaaagtgggaacacttaaatggatgacagacaacactggacccacagaccaagagcattcttctaagccctggagtagctcgaggaatggaagagggaaattggaagcagggtcccttttcgatcttcatgtgaagagacccagcctcttcaagggtatccaagataaacttccgttccccaagcccaccaatccctgtccagttcctttgcttcctgccctcccaaataggacattctcctttgtgcccagcccccctttgcacagatcctccaaggggagtcccatgatccacaaggcagagaccttcatagcagagggca

SEQ ID NO: 284502 - DNA, 773 bp, Homo sapiens
ggcggctcgggcttccgccttggggagccggcggcggagtccgggacgtggagacccggggtcccggcagccgggcggcccgcgggcccagggtggggatgcaccgccgcggggtgggagctggcgccatcgccaagaagaaacttgcagaggccaagtataaggagcgagggacggtcttggctgaggaccagctagcccagatgtcaaagcagttggacatgttcaagaccaacctggaggaatttgccagcaaacacaagcaggagatccggaagaatcctgagttccgtgtgcagttccaggacatgtgtgcaaccattggcgtggatccgctggcctctggaaaaggattttggtctgagatgctgggcgtgggggacttctattacgaactaggtgtccaaattatcgaagtgtgcctggcgctgaagcatcggaatggaggtctgataactttggaggaactacatcaacaggtgttgaagggaaggggcaagttcgcccaggatgtcagtcagtaggtcttgtcttccaatcccttggagtacagaaagaggtctttaaaattcagatggaactcttttctccctattcctcatgtctaggctagcttagaaatctgtatgatctccatatcatacaggaaaaaaaaaaacaaaaaacaaacaaaaaataagagatagggtctcacttttgcccgggctggagtacagtggcatgatcacagcttactgctaccaagatcattgcttactgcagcctcaaactct

SEQ ID NO: 284503 - DNA, 916 bp, Homo sapiens
gccccactgggtttctatttaggaatctgtggtaaaagtccgttttccagcctgttaaaaaaagacatggacccaagggttgggtattttatacaggaaaaaaggtttagggctgggcacatgggctcatgcctaaatcccagcactttgggaggccgagggggggggatcacttgctggtcttgaactcttggtctcgagcgatccacctagctcgatgtcccaaagtgttggaattacaggcgtgagccactgcgcccggccagaaatgacttttagattgcctgccctctggaaccgtctgaccctgttcttcagcaggagttaccgtgagtccgattgtttcctgagtagcagatggagcagaagaacttcatgccatgcagggaagacttcccatatgatagatgttttaatgcaggtttgaaagaaaagaagggatgtaaattaatcaataaccgagattttgtttttctgtcttgtagctggaaaaggattttggtctgagatgctgggcgtgggggacttctattacgaactaggtgtccaaattatcgaagtgtgcctggcgctgaagcatcggaatggaggtctgataactttggaggaactacatcaacaggtgttgaagggaaggggcaagttcgcccaggatgtcagtcagtaggtcttgtcttccaatcccttggagtacagaaagaggtctttaaaattcagatggaactcttttctccctattcctcatgtctaggctagcttagaaatctgtatgatctccatatcatacaggaaaaaaaaaaacaaaaaacaaacaaaaaataagagatagggtctcacttttgcccgggctggagtacagtggcatgatcacagcttactgctaccaagatcattgcttactgcagcctcaaactct

SEQ ID NO: 284504 - DNA, 748 bp, Homo sapiens
ggcggctcgggcttccgccttggggagccggcggcggagtccgggacgtggagacccggggtcccggcagccgggcggcccgcgggcccagggtggggatgcaccgccgcggggtgggagctggcgccatcgccaagaagaaacttgcagaggccaagtataaggagcgagggacggtcttggctgaggaccagctagcccagatgtcaaagcagttggacatgttcaagaccaacctggaggaatttgccagcaaacacaagcaggagatccggaagaatcctgagttccgtgtgcagttccaggacatgtgtgcaaccattggcgtggatccgctggcctctggaaaaggattttggtctgagatgctgggcgtgggggacttctattacgaactaggtgtccaaattatcgaagtgtgcctggcgctgaagcatcggaatggaggtgagggtggctaggtcctgtgaactggactctggacttctctgagagggagaaaaccgtgattatcgtttccatcctgcagtctacaggcctctaaggacttgagagacatcttagctgtttcatgcagttgaatccatggcaagtctccatggccaagggtaaatagaattacctgaacgattgtctctgttctccgatctttggccaggaaggtctagtccctagtcagtacaggagtgattttctcattagtaactatagtcctgcactgtctctccgacgtatgggatgccaactg

SEQ ID NO: 284505 - DNA, 934 bp, Homo sapiens
ggcggctcgggcttccgccttggggagccggcggcggagtccgggacgtggagacccggggtcccggcagccgggcggcccgcgggcccagggtggggatgcaccgccgcggggtgggagctggcgccatcgccaagaagaaacttgcagaggccaagtataaggagcgagggacggtcttggctgaggaccagctagcccagatgtcaaagcagttggacatgttcaagaccaacctggaggaatttgccagcaaacacaagcaggagatccggaagaatcctgagttccgtgtgcagttccaggacatgtgtgcaaccattggcgtggatccgctggcctctggaaaaggattttggtctgagatgctgggcgtgggggacttctattacgaactaggtgtccaaattatcgaagtgtgcctggcgctgaagcatcggaatggaggtgagggtggctaggtcctgtgaactggactctggacttctctgagagggagaaaaccgtgattatcgtttccatcctgcagtctacaggcctctaaggacttgagagacatcttagctgtttcatgcagttgaatccatggcaagtctccatggccaagggtctgataactttggaggaactacatcaacaggtgttgaagggaaggggcaagttcgcccaggatgtcagtcagtaggtcttgtcttccaatcccttggagtacagaaagaggtctttaaaattcagatggaactcttttctccctattcctcatgtctaggctagcttagaaatctgtatgatctccatatcatacaggaaaaaaaaaaacaaaaaacaaacaaaaaataagagatagggtctcacttttgcccgggctggagtacagtggcatgatcacagcttactgctaccaagatcattgcttactgcagcctcaaactct

SEQ ID NO: 284506 - DNA, 6070 bp, Homo sapiens
gggcgggcgggaggcgcggaggcagcggaggctgctcggccgcaaggaggcaggcgggaggccaggggtgcagaattggggcggggggctcccttcacccccgcagccctccgcccgggtccgtgtggccaggcctcacgtgcccgcaggcctggggaaggtggagacaggggcgggggtccgcgcagaggcctgcacggcgcggccaggtgatggtgggcctctgtgtttctccagacgaaaggggacccccggagcggccgtgcccctgggctgcccccgcgaggcgttttgacatcagccatagggaagtcggggagccctgagcctgcctgtttccgttaagtgtccttaggatgcagtgattaaggaattaggctctccctccgggaggggcactgcctgtgctagggaactcgggggcagagaaacaggacaggatgatgctgtccgagcaagcccaaaagtggtttccaacccacgtgcaggtcacagtgctccaagccaaagatctgaagccaaaaggcaaaagtggtaccaatgacacatacactataattcagctgggcaaggaaaagtactccacctctgtagctgagaaaacccttgagccagtttggaaggaggaggcctctttcgagctacctggattgctaattcagggaagtccagagaaatacattcttttccttatagttatgcacaggtccctggtgggtctggataaatttttagggcaggtggcaatcaatctcaatgacatctttgaggacaaacaaagaaggaaaacagagtggtttagattagaatccaaacaaggaaaacgaatcaaaaacaggggtgagataaaggtcaatattcagtttatgaggaacaatatgaccgcaagtatgtttgacttatcaatgaaggacaaaaccagatctccttttgcaaagttaaaagataagatgaagggtagaaaaaatgatggaacattttctgatacgtcttctgcaatcattccaagtactcacatgcccgatgccaatagtgaattttcaagtggtgaaatacagatgaaatccaaaccaaaaaagccttttctcttgggtcctcagcgactctcgtcagcgcattcaatgtctgatttatctgggtcccatatgtcttctgagaaactgaaggctggcaccataggtcaaacacatcttctcggacaccagttagattcctttggaacagttccagaaagtggaagtctcaaatctccacacagaagaacattaagctttgatacttctaaaatgaaccaacctgacagcattgtggatgaaggtgaattgtgtttcggaagacaaaatgacccatttacaaatgtgactgcttcattaccccaaaaatttgcaacactgccaaggaagaaaaatccatttgaagaaagcagcgaaacatgggacagcagcatgaatttattttcaaaaccaattgaaataagaaaagaaaataaaagagagaaaagggagaaagttagcctgtttgaaagagtgactggaaaaaaagatagcagaagatctgataaacttaacaatgggggatctgatagcccttgtgacttgaaatcacctaatgcatttagtgaaaatcgccaggactattttgattatgagtcaaccaatccatttacagcaaaattcagggcttcaaatataatgccatcttcaagttttcatatgagtccaacaagcaatgaagacctcaggaaaatcccggacagcaacccctttgatgccactgcagggtatcgtagtctgacctatgaagaggttctacaggagctggtgaaacacaaagaactccttaggaggaaagacacccacatccgggaactcgaggactacatcgacaacctccttgtaagggtaatggaagaaacgcccagtattctcagagtgccatatgaaccatccaggaaagctggcaaattctctaacagttaataaagccaattgtattgtattgataattggacaaagagagagaaagaaagaaggaaggaaggaaaaacttgttactgaaagagactacactatcaggtttcattacatattctcctttattgtgaagagtagttttacctgtaaatattagcagggactatcaagagtgacctttgaagcaagctaaatcatttaaatgtttaaattgaaaatgggccagattctcaatgaataagtggttccttaggactcactcaggtgctggtactgacccactaatctgccataggcccagaaatatcttcagaagtacgtgagttgttcctcaggaatagatttttcataaagcagaattgatcctgtggctggtttctcagaaatcagtttgtagaaatatttagcttcaggaatactgctcgttataaacactactaaaaaaacagtttatattttatatacacatatgtacatgaatatatatatattcatgtatcttgtatataaaatataggcatatacctcatatatacatgtgtttttagaacatttagaaacaattgattgcctctaaagttaggctaccaatttcttgatttgaaaatgtgtgtgctctattgatgcaagacaagtcatccttcctactgtcatggtttgttatagagaagctgcttcaaatcactcttgactacatggaccttggtttcaaagtgagctgctatatattattctagcatcaaagtttttctctttccccaaaagtgatgatctcaagtccttttttaaagaatgacaaattttaggagacttcattaacttcataacagcatgaatttatttgaattaattaacatttgagtttgtttaaggtataagcagaagataagctaatatagcttgttttgttgaaattctgcatgcctttaaatcactagcaaagcaaatattataaagttatatctgaaaataattgtgggaagtatgtgattgcctggtgtgtctgataacccaaagcagcgggcagattccaggaatgaagaattaggcttggtttcaggttacataaataatagagcagatggttgcctttgggtcttgaaccaaaataagacttactaaaggaagagtgagtttttagaagagaactttacgagcgtgacattatgcattactccacatccaccctttaagaattgatttattacaaaattatgttctattttaaagtccactcccccaaaatactgatttcttccatggattatttttatatgatttgtacaaattttttctgaaatttaagttgacaagcaatgttataaaaatattgctaatcttctgcttatttttcagcctttaaagtctgaaatactataaaacactgagagtatctatgtctttctgaatttaaaatgaaaattcatgtccatatggagacttacatattccccaatctttccatgaattgcatttttttctaatacttatctctgttaagactccattgaaagttaaacaaaaagccgatataatagtttgggttttttttttttgcttattttagtattttgaatcagagaatacttggccaagctcgtatttgtaaactaaaaccccttgttatttgtatcttctgcatttcagttttactgtaagaacatacattttgaaattatgaacatttttttcataaaaattaaatgctttaagaaatggagaaggaaaaatagcttttatcaatttttttctcctcaagattctgtaataaacctcaaagtctggtgtagaatggtattttcccgtttgaggtcttggtagttttttttttttttttaaacatggtgccacttttaattaactaaatgttacaaaattctcagcatttgtttttgtctggtagtattattgagtcttttcatacacttcttaaaatgtgaaaatctatgttttcagtattatgacagtatctgcagatactataataatatgctttggccaaatttgctgtttatagagtgaaccaagatgtcagttttgtattggggatatgttttacataaatagaactcatttaaaagtatggttcaagtactgctcttctttttatggggaaattgatttttaaggagcgattcttttcctatataaaagctattgaggcttagctttattcatacatgagtgatttggttataactcaatcaaaatttttatctttaaatctgagacaagtattatatttaaaactagatctattaatacattcatcactgcctgaaaatttgctgttctaatgtttgtgaattttcactcattacctagagtaaacttattgcatattttcataatcagtcaaaataataaaactaaaaacaaaaagtaaaaattagttcccaagtaaatatatcagtgtttcctgtgtttgggcagaagtgcaaagtagttttaatttctcacgttgtagaaaaagaggccaaaaaggtcaccttagtttatttttccaaaacataactttaggtattctaatgtattttgttagttgcttagaaatggaaataaaatatatgtgcttattaaataatgcacagtacactagattatagagtttatttttgcttttatgctttaaagaatgcatgcccaaaacactactaccaacaagaggattttttaaaatcacagaattgatatttatctcaagactatcttaagctaatgtacttctgttacataattaaactatttctgctattatttttaaagcagtattattttataaccaattctaaaattcagctttaaaaatattgaacataccttcctaccacttacgcttcaagtttcatttattgaataccagggtcatatcttagaattgtatataaaacaacatgtaacccattcatgaaaaacgtttttaagtattgctttttgctgctatgttctgcattgagcctagttttgccattgtcccctgaatgtagtattatctatagattatacataactacatctattgcttttggtggtaaatcaagatttagttgtaattttccagctgtgaaaatgttgccttgtatttaaaagggtttcatgaatggaaacctaagtaaaactaagctcattagtgacagacttgttttcttcttgttattcctccagcaactccctcaccaccacgcctccctgcctaccatccccggaagggtgcttattctttaacaaagagaatctaaaaaaaaaaacaaaaaactgttgtctaatatatctacagtaaatgttacactagagcttttattttcctctgtagcttttcagaagaagcaatttaccttggatttgtaaatcaagctgaaacttttttgatgttcatgtactcatatgtcttgtaggtggtaggtgtcacttgtgtgtatgtgtaagtgaagtatgatgcatgctcattcacttggtccctttgaaataagggaaaggatcacagtgctgctgggccatgatggtatgtagaagggtctgtcagcacacatggaaagcccccatttgcacagatgtagaactttaataatccagatgcaatcattggaagtatttaatatgcaattggtagcaccttagctaattaatctgcatatgaagcattttctgatatatttaataagaggtatagaagctcttcaagcattaaaatagagttgatgtttcattccatttgttttatccatcaaaaaatgcactctcacagtggagttgaagtctaatacatgatacatgtgggcctgttagtcttcgaagcttccagatggtttgtgttttgaggtacaaaaaaatgctgcagatctagaaatgcatatatttagcgggtatttgaaagatagaagcattatttataactgaagagtataacacttatcttcttaagtaaatgctctcataacttgtatacatttttgcaggtacaaattcaaaagtatgtaagcattgtataatgtgacaattgtataatttatgtaatctgatgcatgaatcagaatttttatataatatatgattattgacttatagttgattaaagtgtttaaacttaaaaaaaaaaa

SEQ ID NO: 284507 - DNA, 6016 bp, Homo sapiens
gggcgggcgggaggcgcggaggcagcggaggctgctcggccgcaaggaggcaggcgggaggccaggggtgcagaattggggcggggggctcccttcacccccgcagccctccgcccgggtccgtgtggccaggcctcacgtgcccgcaggcctggggaaggtggagacaggggcgggggtccgcgcagaggcctgcacggcgcggccaggtgatggtgggcctctgtgtttctccagacgaaaggggacccccggagcggccgtgcccctgggctgcccccgcgaggcgttttgacatcagccatagggaagtcggggagccctgagcctgcctgtttccgttaagtgtccttaggatgcagtgattaaggaattaggctctccctccgggaggggcactgcctgtgctagggaactcgggggcagagaaacaggacaggatgatgctgtccgagcaagcccaaaagtggtttccaacccacgtgcaggtcacagtgctccaagccaaagatctgaagccaaaaggcaaaagtggtaccaatgacacatacactataattcagctgggcaaggaaaagtactccacctctgtagctgagaaaacccttgagccagtttggaaggaggaggcctctttcgagctacctggattgctaattcagggaagtccagagaaatacattcttttccttatagttatgcacaggtccctggtgggtctggataaatttttagggcaggtggcaatcaatctcaatgacatctttgaggacaaacaaagaaggaaaacagagtggtttagattagaatccaaacaaggaaaacgaatcaaaaacaggggtgagataaaggtcaatattcagtttatgaggaacaatatgaccgcaagtatgtttgacttatcaatgaaggacaaaaccagatctccttttgcaaagttaaaagataagatgaagggtagaaaaaatgatggaacattttctgatacgtcttctgcaatcattccaagtactcacatgcccgatgccaatagtgaattttcaagtggtgaaatacagatgaaatccaaaccaaatttatctgggtcccatatgtcttctgagaaactgaaggctggcaccataggtcaaacacatcttctcggacaccagttagattcctttggaacagttccagaaagtggaagtctcaaatctccacacagaagaacattaagctttgatacttctaaaatgaaccaacctgacagcattgtggatgaaggtgaattgtgtttcggaagacaaaatgacccatttacaaatgtgactgcttcattaccccaaaaatttgcaacactgccaaggaagaaaaatccatttgaagaaagcagcgaaacatgggacagcagcatgaatttattttcaaaaccaattgaaataagaaaagaaaataaaagagagaaaagggagaaagttagcctgtttgaaagagtgactggaaaaaaagatagcagaagatctgataaacttaacaatgggggatctgatagcccttgtgacttgaaatcacctaatgcatttagtgaaaatcgccaggactattttgattatgagtcaaccaatccatttacagcaaaattcagggcttcaaatataatgccatcttcaagttttcatatgagtccaacaagcaatgaagacctcaggaaaatcccggacagcaacccctttgatgccactgcagggtatcgtagtctgacctatgaagaggttctacaggagctggtgaaacacaaagaactccttaggaggaaagacacccacatccgggaactcgaggactacatcgacaacctccttgtaagggtaatggaagaaacgcccagtattctcagagtgccatatgaaccatccaggaaagctggcaaattctctaacagttaataaagccaattgtattgtattgataattggacaaagagagagaaagaaagaaggaaggaaggaaaaacttgttactgaaagagactacactatcaggtttcattacatattctcctttattgtgaagagtagttttacctgtaaatattagcagggactatcaagagtgacctttgaagcaagctaaatcatttaaatgtttaaattgaaaatgggccagattctcaatgaataagtggttccttaggactcactcaggtgctggtactgacccactaatctgccataggcccagaaatatcttcagaagtacgtgagttgttcctcaggaatagatttttcataaagcagaattgatcctgtggctggtttctcagaaatcagtttgtagaaatatttagcttcaggaatactgctcgttataaacactactaaaaaaacagtttatattttatatacacatatgtacatgaatatatatatattcatgtatcttgtatataaaatataggcatatacctcatatatacatgtgtttttagaacatttagaaacaattgattgcctctaaagttaggctaccaatttcttgatttgaaaatgtgtgtgctctattgatgcaagacaagtcatccttcctactgtcatggtttgttatagagaagctgcttcaaatcactcttgactacatggaccttggtttcaaagtgagctgctatatattattctagcatcaaagtttttctctttccccaaaagtgatgatctcaagtccttttttaaagaatgacaaattttaggagacttcattaacttcataacagcatgaatttatttgaattaattaacatttgagtttgtttaaggtataagcagaagataagctaatatagcttgttttgttgaaattctgcatgcctttaaatcactagcaaagcaaatattataaagttatatctgaaaataattgtgggaagtatgtgattgcctggtgtgtctgataacccaaagcagcgggcagattccaggaatgaagaattaggcttggtttcaggttacataaataatagagcagatggttgcctttgggtcttgaaccaaaataagacttactaaaggaagagtgagtttttagaagagaactttacgagcgtgacattatgcattactccacatccaccctttaagaattgatttattacaaaattatgttctattttaaagtccactcccccaaaatactgatttcttccatggattatttttatatgatttgtacaaattttttctgaaatttaagttgacaagcaatgttataaaaatattgctaatcttctgcttatttttcagcctttaaagtctgaaatactataaaacactgagagtatctatgtctttctgaatttaaaatgaaaattcatgtccatatggagacttacatattccccaatctttccatgaattgcatttttttctaatacttatctctgttaagactccattgaaagttaaacaaaaagccgatataatagtttgggttttttttttttgcttattttagtattttgaatcagagaatacttggccaagctcgtatttgtaaactaaaaccccttgttatttgtatcttctgcatttcagttttactgtaagaacatacattttgaaattatgaacatttttttcataaaaattaaatgctttaagaaatggagaaggaaaaatagcttttatcaatttttttctcctcaagattctgtaataaacctcaaagtctggtgtagaatggtattttcccgtttgaggtcttggtagttttttttttttttttaaacatggtgccacttttaattaactaaatgttacaaaattctcagcatttgtttttgtctggtagtattattgagtcttttcatacacttcttaaaatgtgaaaatctatgttttcagtattatgacagtatctgcagatactataataatatgctttggccaaatttgctgtttatagagtgaaccaagatgtcagttttgtattggggatatgttttacataaatagaactcatttaaaagtatggttcaagtactgctcttctttttatggggaaattgatttttaaggagcgattcttttcctatataaaagctattgaggcttagctttattcatacatgagtgatttggttataactcaatcaaaatttttatctttaaatctgagacaagtattatatttaaaactagatctattaatacattcatcactgcctgaaaatttgctgttctaatgtttgtgaattttcactcattacctagagtaaacttattgcatattttcataatcagtcaaaataataaaactaaaaacaaaaagtaaaaattagttcccaagtaaatatatcagtgtttcctgtgtttgggcagaagtgcaaagtagttttaatttctcacgttgtagaaaaagaggccaaaaaggtcaccttagtttatttttccaaaacataactttaggtattctaatgtattttgttagttgcttagaaatggaaataaaatatatgtgcttattaaataatgcacagtacactagattatagagtttatttttgcttttatgctttaaagaatgcatgcccaaaacactactaccaacaagaggattttttaaaatcacagaattgatatttatctcaagactatcttaagctaatgtacttctgttacataattaaactatttctgctattatttttaaagcagtattattttataaccaattctaaaattcagctttaaaaatattgaacataccttcctaccacttacgcttcaagtttcatttattgaataccagggtcatatcttagaattgtatataaaacaacatgtaacccattcatgaaaaacgtttttaagtattgctttttgctgctatgttctgcattgagcctagttttgccattgtcccctgaatgtagtattatctatagattatacataactacatctattgcttttggtggtaaatcaagatttagttgtaattttccagctgtgaaaatgttgccttgtatttaaaagggtttcatgaatggaaacctaagtaaaactaagctcattagtgacagacttgttttcttcttgttattcctccagcaactccctcaccaccacgcctccctgcctaccatccccggaagggtgcttattctttaacaaagagaatctaaaaaaaaaaacaaaaaactgttgtctaatatatctacagtaaatgttacactagagcttttattttcctctgtagcttttcagaagaagcaatttaccttggatttgtaaatcaagctgaaacttttttgatgttcatgtactcatatgtcttgtaggtggtaggtgtcacttgtgtgtatgtgtaagtgaagtatgatgcatgctcattcacttggtccctttgaaataagggaaaggatcacagtgctgctgggccatgatggtatgtagaagggtctgtcagcacacatggaaagcccccatttgcacagatgtagaactttaataatccagatgcaatcattggaagtatttaatatgcaattggtagcaccttagctaattaatctgcatatgaagcattttctgatatatttaataagaggtatagaagctcttcaagcattaaaatagagttgatgtttcattccatttgttttatccatcaaaaaatgcactctcacagtggagttgaagtctaatacatgatacatgtgggcctgttagtcttcgaagcttccagatggtttgtgttttgaggtacaaaaaaatgctgcagatctagaaatgcatatatttagcgggtatttgaaagatagaagcattatttataactgaagagtataacacttatcttcttaagtaaatgctctcataacttgtatacatttttgcaggtacaaattcaaaagtatgtaagcattgtataatgtgacaattgtataatttatgtaatctgatgcatgaatcagaatttttatataatatatgattattgacttatagttgattaaagtgtttaaacttaaaaaaaaaaa

SEQ ID NO: 284508 - DNA, 6030 bp, Homo sapiens
gggcgggcgggaggcgcggaggcagcggaggctgctcggccgcaaggaggcaggcgggaggccaggggtgcagaattggggcggggggctcccttcacccccgcagccctccgcccgggtccgtgtggccaggcctcacgtgcccgcaggcctggggaaggtggagacaggggcgggggtccgcgcagaggcctgcacggcgcggccaggtgatggtgggcctctgtgtttctccagacgaaaggggacccccggagcggccgtgcccctgggctgcccccgcgaggcgttttgacatcagccatagggaagtcggggagccctgagcctgcctgtttccgttaagtgtccttaggatgcagtgattaaggaattaggctctccctccgggaggggcactgcctgtgctagggaactcgggggcagagaaacaggacaggatgatgctgtccgagcaagcccaaaagtggtttccaacccacgtgcaggtcacagtgctccaagccaaagatctgaagccaaaaggcaaaagtggtaccaatgacacatacactataattcagctgggcaaggaaaagtactccacctctgtagctgagaaaacccttgagccagtttggaaggaggaggcctctttcgagctacctggattgctaattcagggaagtccagagaaatacattcttttccttatagttatgcacaggtccctggtgggtctggataaatttttagggcaggtggcaatcaatctcaatgacatctttgaggacaaacaaagaaggaaaacagagtggtttagattagaatccaaacaaggaaaacgaatcaaaaacaggggtgagataaaggtcaatattcagtttatgaggaacaatatgaccgcaagtatgtttgacttatcaatgaaggacaaaaccagatctccttttgcaaagttaaaagataagatgaagggtagaaaaaatgatggaacattttctgatacgtcttctgcaatcattccaagtactcacatgcccgatgccaatagtgaattttcaagtggtgaaatacagatgaaatccaaaccaaaaaagccttttctcttgggtcctcagcgactctcgtcagcgcattcaatgtctgatttatctgggtcccatatgtcttctgagaaactgaaggctggcaccataggtcaaacacatcttctcggacaccagttagattcctttggaacagttccagaaagtggaagtctcaaatctccacacagaagaacattaagctttgatacttctaaaatgaaccaacctgacagcattgtggatgaaggtgaattgtgtttcggaagacaaaatgacccatttacaaatgtgactgcttcattaccccaaaaatttgcaacactgccaaggaagaaaaatccatttgaagaaagcagcgaaacatgggacagcagcatgaatttattttcaaaaccaattgaaataagaaaagaaaataaaagagagaaaagggagaaagttagcctgtttgaaagagtgactggaaaaaaagatagcagaagatctgataaacttaacaatgggggatctgatagcccttgtgacttgaaatcacctaatgcatttagtgaaaatcgccaggactattttgattatgagtcaaccaatccatttacagcaaaattcagggcttcaaatataatgccatcttcaagttttcatatgagtccaacaagcaatgaagacctcaggaaaatcccggacagcaacccctttgatgccactgcagggtatcgtagtctgacctatgaagaggttctacaggagctggtgaaacacaaagaactccttaggaggaaagacacccacatccgggaactcgaggactacatcgacaacctccttgtaagggtaatggaagaaacgcccagtattctcagagtgccatatgaaccatccaggaaagctggcaaattctctaacagttaataaagccaattgtattgtattgataattggacaaagagagagaaagaaagaaggaaggaaggaaaaacttgttactgaaagagactacactatcaggtttcattacatattctcctttattgtgaagagtagttttacctgtaaatattagcagggactatcaagagtgacctttgaagcaagctaaatcatttaaatgtttaaattgaaaatgggccagattctcaatgaataagtggttccttaggactcactcaggtgctggtactgacccactaatctgccataggcccagaaatatcttcagaagtacgtgagttgttcctcaggaatagatttttcataaagcagaattgatcctgtggctggtttctcagaaatcagtttgtagaaatatttagcttcaggaatactgctcgttataaacactactaaaaaaacagtttatattttatatacacatatgtacatgaatatatatatattcatgtatcttgtatataaaatataggcatatacctcatatatacatgtgtttttagaacatttagaaacaattgattgcctctaaagttaggctaccaatttcttgatttgaaaatgtgtgtgctctattgatgcaagacaagtcatccttcctactgtcatggtttgttatagagaagctgcttcaaatcactcttgactacatggaccttggtttcaaagtgagctgctatatattattctagcatcaaagtttttctctttccccaaaagtgatgatctcaagtccttttttaaagaatgacaaattttaggagacttcattaacttcataacagcatgaatttatttgaattaattaacatttgagtttgtttaaggtataagcagaagataagctaatatagcttgttttgttgaaattctgcatgcctttaaatcactagcaaagcaaatattataaagttatatctgaaaataattgtgggaagtatgtgattgcctggtgtgtctgataacccaaagcagcgggcagattccaggaatgaagaattaggcttggtttcaggttacataaataatagagcagatggttgcctttgggtcttgaaccaaaataagacttactaaaggaagagtgagtttttagaagagaactttacgagcgtgacattatgcattactccacatccaccctttaagaattgatttattacaaaattatgttctattttaaagtccactcccccaaaatactgatttcttccatggattatttttatatgatttgtacaaattttttctgaaatttaagttgacaagcaatgttataaaaatattgctaatcttctgcttatttttcagcctttaaagtctgaaatactataaaacactgagagtatctatgtctttctgaatttaaaatgaaaattcatgtccatatggagacttacatattccccaatctttccatgaattgcatttttttctaatacttatctctgttaagactccattgaaagttaaacaaaaagccgatataatagtttgggttttttttttttgcttattttagtattttgaatcagagaatacttggccaagctcgtatttgtaaactaaaaccccttgttatttgtatcttctgcatttcagttttactgtaagaacatacattttgaaattatgaacatttttttcataaaaattaaatgctttaagaaatggagaaggaaaaatagcttttatcaatttttttctcctcaagattctgtaataaacctcaaagtctggtgtagaatggtattttcccgtttgaggtcttggtagttttttttttttttttaaacatggtgccacttttaattaactaaatgttacaaaattctcagcatttgtttttgtctggtagtattattgagtcttttcatacacttcttaaaatgtgaaaatctatgttttcagtattatgacagtatctgcagatactataataatatgctttggccaaatttgctgtttatagagtgaaccaagatgtcagttttgtattggggatatgttttacataaatagaactcatttaaaagtatggttcaagtactgctcttctttttatggggaaattgatttttaaggagcgattcttttcctatataaaagctattgaggcttagctttattcatacatgagtgatttggttataactcaatcaaaatttttatctttaaatctgagacaagtattatatttaaaactagatctattaatacattcatcactgcctgaaaatttgctgttctaatgtttgtgaattttcactcattacctagagtaaacttattgcatattttcataatcagtcaaaataataaaactaaaaacaaaaagtaaaaattagttcccaagtaaatatatcagtgtttcctgtgtttgggcagaagtgcaaagtagttttaatttctcacgttgtagaaaaagaggccaaaaaggtcaccttagtttatttttccaaaacataactttaggtattctaatgtattttgttagttgcttagaaatggaaataaaatatatgtgcttattaaataatgcacagtacactagattatagagtttatttttgcttttatgctttaaagaatgcatgcccaaaacactactaccaacaagaggattttttaaaatcacagaattgatatttatctcaagactatcttaagctaatgtacttctgttacataattaaactatttctgctattatttttaaagcagtattattttataaccaattctaaaattcagctttaaaaatattgaacataccagggtcatatcttagaattgtatataaaacaacatgtaacccattcatgaaaaacgtttttaagtattgctttttgctgctatgttctgcattgagcctagttttgccattgtcccctgaatgtagtattatctatagattatacataactacatctattgcttttggtggtaaatcaagatttagttgtaattttccagctgtgaaaatgttgccttgtatttaaaagggtttcatgaatggaaacctaagtaaaactaagctcattagtgacagacttgttttcttcttgttattcctccagcaactccctcaccaccacgcctccctgcctaccatccccggaagggtgcttattctttaacaaagagaatctaaaaaaaaaaacaaaaaactgttgtctaatatatctacagtaaatgttacactagagcttttattttcctctgtagcttttcagaagaagcaatttaccttggatttgtaaatcaagctgaaacttttttgatgttcatgtactcatatgtcttgtaggtggtaggtgtcacttgtgtgtatgtgtaagtgaagtatgatgcatgctcattcacttggtccctttgaaataagggaaaggatcacagtgctgctgggccatgatggtatgtagaagggtctgtcagcacacatggaaagcccccatttgcacagatgtagaactttaataatccagatgcaatcattggaagtatttaatatgcaattggtagcaccttagctaattaatctgcatatgaagcattttctgatatatttaataagaggtatagaagctcttcaagcattaaaatagagttgatgtttcattccatttgttttatccatcaaaaaatgcactctcacagtggagttgaagtctaatacatgatacatgtgggcctgttagtcttcgaagcttccagatggtttgtgttttgaggtacaaaaaaatgctgcagatctagaaatgcatatatttagcgggtatttgaaagatagaagcattatttataactgaagagtataacacttatcttcttaagtaaatgctctcataacttgtatacatttttgcaggtacaaattcaaaagtatgtaagcattgtataatgtgacaattgtataatttatgtaatctgatgcatgaatcagaatttttatataatatatgattattgacttatagttgattaaagtgtttaaacttaaaaaaaaaaa

SEQ ID NO: 284509 - DNA, 980 bp, Homo sapiens
cacgcgtcgcggacgcgtgggtcgacccacgcgtccggacccacgcgtccgctccctcaccaccacgcctccctgcctaccatccccggaagggtgcttattctttaacaaagagaatctaaaaaaaaaaacaaaaaactgttgtctaatatatctacagtaaatgttacactagagcttttattttcctctgtagcttttcagaagaagcaatttaccttggatttgtaaatcaagctgaaacttttttgatgttcatgtactcatatgtcttgtaggtggtaggtgtcacttgtgtgtatgtgtaagtgaagtatgatgcatgctcattcacttggtccctttgaaataagggaaaggatcacagtgctgctgggccatgatggtatgtagaagggtctgtcagcacacatggaaagcccccatttgcacagatgtagaactttaataatccagatgcaatcattggaagtatttaatatgcaattggtagcaccttagctaattaatctgcatatgaagcattttctgatatatttaataagaggtatagaagctcttcaagcattaaaatagagttgatgtttcattccatttgttttatccatcaaaaaatgcactctcacagtggagttgaagtctaatacatgatacatgtgggcctgttagtcttcgaagcttccagatggtttgtgttttgaggtacaaaaaaatgctgcagatctagaaatgcatatatttagcgggtatttgaaagatagaagcattatttataactgaagagtataacacttatcttcttaagtaaatgctctcataacttgtatacatttttgcaggtacaaattcaaaagtatgtaagcattgtataatgtgacaattgtataatttatgtaatctgatgcatgaatcagaatttttatataatatatgattattgacttatagttgattaaagtgtttaaacttaaaaaaaaaaa

SEQ ID NO: 284510 - DNA, 759 bp, Homo sapiens
agattctctttgttaaagaataagcacccttccggggatggtaggcagggaggcgtggtggtaggtgtcacttgtgtgtatgtgtaagtgaagtatgatgcatgctcattcacttggtccctttgaaataagggaaaggatcacagtgctgctgggccatgatggtatgtagaagggtctgtcagcacacatggaaagcccccatttgcacagatgtagaactttaataatccagatgcaatcattggaagtatttaatatgcaattggtagcaccttagctaattaatctgcatatgaagcattttctgatatatttaataagaggtatagaagctcttcaagcattaaaatagagttgatgtttcattccatttgttttatccatcaaaaaatgcactctcacagtggagttgaagtctaatacatgatacatgtgggcctgttagtcttcgaagcttccagatggtttgtgttttgaggtacaaaaaaatgctgcagatctagaaatgcatatatttagcgggtatttgaaagatagaagcattatttataactgaagagtataacacttatcttcttaagtaaatgctctcataacttgtatacatttttgcaggtacaaattcaaaagtatgtaagcattgtataatgtgacaattgtataatttatgtaatctgatgcatgaatcagaatttttatataatatatgattattgacttatagttgattaaagtgtttaaacttaaaaaaaaaaa

SEQ ID NO: 284511 - DNA, 1250 bp, Homo sapiens
gggcgggcgggaggcgcggaggcagcggaggctgctcggccgcaaggaggcaggcgggaggccaggggtgcagaattggggcggggggctcccttcacccccgcagccctccgcccgggtccgtgtggccaggcctcacgtgcccgcaggcctggggaaggtggagacaggggcgggggtccgcgcagaggcctgcacggcgcggccaggtgatggtgggcctctgtgtttctccagacgaaaggggacccccggagcggccgtgcccctgggctgcccccgcgaggcgttttgacatcagccatagggaagtcggggagccctgagcctgcctgtttccgttaagtgtccttaggatgcagtgattaaggaattaggctctccctccgggaggggcactgcctgtgctagggaactcgggggcagagaaacaggacaggatgatgctgtccgagcaagcccaaaagtggtttccaacccacgtgcaggtcacagtgctccaagccaaagatctgaagccaaaaggcaaaagtggtaccaatgacacatacactataattcagctgggcaaggaaaagtactccacctctgtagctgagaaaacccttgagccagtttggaaggaggaggcctctttcgagctacctggattgctaattcagggaagtccagagaaatacattcttttccttatagttatgcacaggtccctggtgggtctggataaatttttagggcaggtggcaatcaatctcaatgacatctttgaggacaaacaaagaaggaaaacagagtggtttagattagaatccaaacaaggaaaacgaatcaaaaacaggggtgagataaaggtcaatattcagtttatgaggaacaatatgaccgcaagtatgtttgacttatcaatgaaggacaaaaccagatctccttttgcaaagttaaaagataagatgaagggtagaaaaaatgatggaacattttctgatacgtcttctgcaatcattccaagtactcacatgcccgatgccaatagtgaattttcaagtggtgaaatacagatgaaatccaaaccaaaaaagccttttctcttgggtccacgagaattcgcaaggcttcaagttcgttttctggtccctagctttggaacgggggtgtccatgttatcttcgccgcctattatctgtgaaccacaagaggatactccccaatgtttctaaacccctcggtggtgtggccacctagcggccgcg

SEQ ID NO: 284512 - DNA, 1759 bp, Homo sapiens
gggcgggcgggaggcgcggaggcagcggaggctgctcggccgcaaggaggcaggcgggaggccaggggtgcagaattggggcggggggctcccttcacccccgcagccctccgcccgggtccgtgtggccaggcctcacgtgcccgcaggcctggggaaggtggagacaggggcgggggtccgcgcagaggcctgcacggcgcggccaggtgatggtgggcctctgtgtttctccagacgaaaggggacccccggagcggccgtgcccctgggctgcccccgcgaggcgttttgacatcagccatagggaagtcggggagccctgagcctgcctgtttccgttaagtgtccttaggatgcagtgattaaggaattaggctctccctccgggaggggcactgcctgtgctagggaactcgggggcagagaaacaggacaggatgatgctgtccgagcaagcccaaaagtggtttccaacccacgtgcaggtcacagtgctccaagccaaagatctgaagccaaaaggcaaaagtggtaccaatgacacatacactataattcagctgggcaaggaaaagtactccacctctgtagctgagaaaacccttgagccagtttggaaggaggaggcctctttcgagctacctggattgctaattcagggaagtccagagaaatacattcttttccttatagttatgcacaggtccctggtgggtctggataaatttttagggcaggtggcaatcaatctcaatgacatctttgaggacaaacaaagaaggaaaacagagtggtttagattagaatccaaacaaggaaaacgaatcaaaaacaggggtgagataaaggtcaatattcagtttatgaggaacaatatgaccgcaagtatgtttgacttatcaatgaaggacaaaaccagatctccttttgcaaagttaaaagataagatgaagggtagaaaaaatgatggaacattttctgatacgtcttctgcaatcattccaagtactcacatgcccgatgccaatagtgaattttcaagtggtgaaatacagatgaaatccaaaccaaaaaagccttttctcttgggtcctcagcgactctcgtcagcgcattcaatgtctgatttatctgggtcccatatgtcttctgagaaactgaaggctggcaccataggtcaaacacatcttctcggacaccagttagattcctttggaacagttccagaaagtggaagtctcaaatctccacacagaagaacattaagctttgatacttctaaaatgaaccaacctgacagcattgtggatgaaggtgaattgtgtttcggaagacaaaatgacccatttacaaatgtgactgcttcattaccccaaaaatttgcaacactgccaaggaagaaaaatccatttgaagaaagcagcgaaacatgggacagcagcatgaatttattttcaaaaccaattgaaataagaaaagaaaataaaagagagaaaagggagaaagttagcctgtttgaaagagtgactggaaaaaaagatagcagaagatctgataaacttaacaatgggggatctgatagcccttgtgacttgaaatcacctaatgcatttagtgaaaatcgccaggactattttgattatgagtcaaccaatccatttacagcaaaattcagggcttcaaatataatgccatcttcaaggtaagcttaatatgggggaagttctactatttgggaaaatcttgtacttgaagg

SEQ ID NO: 284513 - DNA, 1588 bp, Homo sapiens
acccaggtctccctggagcccgccgacctgaagcagcggccgcaccgcgtatgcgcccgggtggtttctgggagtaggcgaggactcgcagtgcgcatgtgcagcccccacggccccgctcccagtgaccggaatgcagaggcgtacatggctaagagacgagctacctgggacacaaagatgagaaccacaagcatgagaacatgaggataaatacactttggggaaaaagaaaacagacagaggcagcagagaaggaagacgagaagaagagaaaaagagaagtaggaagaggatgaattcatttcgcttatctggcaaatgtgtaatctgagtaatagagatggtgcaatgctgggccacagagcttgccccaggtccccaagcaaagtcagtggcactgcctggactggaagttcatccccatccattttcacgtgcggagtctcagggctcagtaaagaaccatgattgacggaggtcacacagcaactggtatgacagggacaggtttccggaattccagtgtcttaacaccaaagcctgtagtatttctcagagagaacaacaccactgctcgtgtgtgctcagaagaaagtttagtggtcgtaacatccaatacatccaacctgcagatcaatacacaaagaccctggaggaaggtggggcggtaacttgtccaaatctccaaagaaaaggtaagaatggtgatcatcaaagccgctgacatttgaagggtcattgtgtgctggccattgctctgaggttcccttaattctcacaaccaccacctaaattttaacatcaaattctaacatcatcctcactttacctatgcggaaactgagacacagagtgtgtctcttgcccggggccctgaaatagtaagggagcacagcaggggtaccagacattatttcacaaaaagggaaactgaggcccagagagggtgaaaggtcaccggctcaccctttccgggacgagtggtatagggtaggtggcctcaaagacagagcttggctgagaacccacagccccttcacatcagctttctcccctcccgtgggcagctatgaagtcacaggggaactgggaggggccgttaccatggagactcgaagcccattcagagaatagggtggaatctgcgagtcgccctcatctcccagggcaccactttggagccagcattttcggcctcggaaatgagacccagagcgcctcgcgcgagcagccccaacctccccgcagacgacatgcgacaccgcccgggtgacccaggctcgggaatctctaggcttcacggacgcagaaccagggaagacacgcctcaatgcgcgtgtgcaactctatcccgtcctttaaagaaggccatgtggcctcttcaccaatcggaatcctgctttttccctggtcccgccttattcccagacttccggcgtctcgctggccgcaaaacaaccctaaactacagggctcggcgactcccagagacttctgggtattgtagtcctaaaggttcagagcgacaagagcacgttttagtaaaaagcagcttagaataaaatgcctgcactagtaatgattc

SEQ ID NO: 284514 - DNA, 925 bp, Homo sapiens
agagaatcaagcggttgccttctgagggctgaagcgtatatcagtaccagaaccagctggggacttttctcagatcttcactgtgagaacctgctagagtccttggagataaaactcacgaaagtgtaaagatagctctatggcaaggtcttcttggagtttttaattctcagacttaaccacattcagcttccagcaattcatcaattagagttcaggttttcctaaccttgttctggttcctgcagaggcacaaagattactgcttgtgagtttctgctctggaatggatgttttcttttaaaaatggtttattgaagtatcatgtacctatcttaagtgtacagcacgatgatgtgtatgcccatgtaaccatcacctagaaggatgagaaccacaagcatgagaacatgaggataaatacactttggggaaaaagaaaacagacagaggcagcagagaaggaagacgagaagaagagaaaaagagaagtaggaagaggatgaattcatttcgcttatctggcaaatgtgtaatctgagtaatagagggaacaacagattggacccaactaggatctcccttggagtggatcagactgatgatttccactatccaaaagcttcctgaataaaaaagaagaaggtgtcacctacttcaatgtgacattgaccccaccactacatcttaaagaccctgtgttatttcagcaataatgcccctgcccatcaatccaactggtgttttcattcctcatcttagtcttaagtgcattcaactgatgctttattctagaggtactctgttcctttcacctttatgtggccatctttaccctgttttgtcataatactcttttaaaaaaccaacttttaaaatgttaaattgtggtaaaatacaaacaaacaattgactggcttaacca

SEQ ID NO: 284515 - DNA, 609 bp, Homo sapiens
agagaatcaagcggttgccttctgagggctgaagcgtatatcagtaccagaaccagctggggacttttctcagatcttcactgtgagaacctgctagagtccttggagataaaactcacgaaagtgtaaagatagctctatggcaaggtcttcttggagtttttaattctcagacttaaccacattcagcttccagcaattcatcaattagagttcaggttttcctaaccttgttctggttcctgcagaggcacaaagattactgcttgtgagtttctgctctggaatggatgttttcttttaaaaatggtttattgaagtatcatgtacctatcttaagtgtacagcacgatgatgtgtatgcccatgtaaccatcacctagaaggatgagaaccacaagcatgagaacatgaggataaatacactttggggaaaaagaaaacagacagaggcagcagagaaggaagacgagaagaagagaaaaagagaagtaggaagaggatgaattcatttcgcttatctggcaaatgtgtaatctgagtaatagaggtgagtgtttctaagaggatgctgttcagagacaaatacactgtttaaaatccattaaa

SEQ ID NO: 284516 - DNA, 429 bp, Homo sapiens
tctgagaagtccgggaaacatgtttctgcagaagaaaaggaaaaggataagagtaagctttgggaagaaagcactgctcaggtgaaggacaaaaaggcaggtctccctgggttggaggaaggtggtaagtatggccgttgagttgagctgccatcatcctcatgcatggaagctgattttggtcattgcactatgccaaagcttgggaaatactactgtgacaatgctttagggattcaagattttttgctgtgtctctctttgtcacataatcatacatgtattttcagtttgctgtttgccttctcttgcacttaaaaaattactcgataatttctatccagcctgtttcctattttcggtaaattccctcctatgggaattccatctcaggaatgaaataaagcacagtatgtgtctgaaggcaag

SEQ ID NO: 284517 - DNA, 251 bp, Homo sapiens
tctgagaagtccgggaaacatgtttctgcagaagaaaaggaaaaggataagagtaagctttgggaagaaagcactgctcaggtgaaggacaaaaaggcaggtctccctgggttggaggaaggtggaaaggattcattgccattagcctatgtcctggctcttggtgcaccaacaatgaatttcatggtggatgaaacagcagcaatcaactcaacaaggaatcccagcaattggtgcaaaaaacgtataca

SEQ ID NO: 284518 - DNA, 1610 bp, Homo sapiens
acttgggttcagggagccaaggtggtttcattttgtctgggttgtaggggaatggttggagataagggtagaaaggtggtttgatgccagggcctagaggacctgagaagtagggagacaagaaatgattaagtagggcatcattttgcaggtttctgtgtggtaatgaggtcatttagactcagtgtactagtctgattgtgttatgtggcctgggttaaattggagagaggaggtggcagggaggcagcatagcagaggaagccctgacttagggaagtaaagtctttctgatgtttggttttagtggtaataaagggcttacttgggtacattttccttacctttctccattcccataactgttttcatgtaaaatggctgctttgcttgaaacgggttgcagtacctagggtcctgctctctgacatctataatactcagggggcagcctcttgggaatttgggggaattgtagagtcctttgaaatacagattaaaataacagattcatagcagctttcaagagtttgtatttttcctccttctcggtgtgcacctgtcatttggcttcttcccacttgttgaaacactaaataatacagataatgccttgtctacactggcttgctttcaaagactcagaacctcaagcttaggtaaaaggattccagccacacatttcctctcctgctcggtgactcactaggaggaattcccccgtaaggcaacagtccttgagtgccaggctatgcccatgagcaccagtatggtctgagaaggttggagtctggcaaacaaggccaagggctctgttgttgggctcacaagtaccttgactatcgcccacaggtgatggaggacgaggagaaggcagtggagatcttgggcaacacggaagctgctcatcctccatcccccatccgctgctgctggctccgcctccgctgcttggcagctactagcattatctgtggctgctcttgcctgggagtcatggctctggtgtttgccatcaaggtgaggagtgcaattcccatgggaatgggggtgggtataaggcaatggtttcatgtatctgatctatctacattgaccagtcactggatacctatcagtgctctgggcctagtgccagaatataagtattagacagggttccttgtcgtcagacgacccattatcttatgaaagaggtgacagtgaaaatgggtaattaatagaatgcagttcatcagtaccgtaatacaggaagcacaggacagtgtgggagccagggaagatctatgtatgtaattatatatgtgtatatggtagaataggtgactggaaaggcatcttaggagaggtgacaggattaatcttaaagggtgagtgagtaagtgtggaagggcattccagataaaaggagcagtgtgtacaaaggcctgtggagcatgactggaccagtgaggaatagtgagagatgaagctagaggacccagattcccaagggcctccagttctgtgcttaagagttttgactttatcttgaaagtactggggaggcattgaatggctcctgcaggggaaagtgacatggtcagatttgagttttaggaagatccact

SEQ ID NO: 284519 - DNA, 719 bp, Homo sapiens
cacatcaagcccgaatgatttcctattcgcctacacaattctccgatccgtccctaacaaactaggaggcgtccttgccctattactatccatcctcatcctagcaaagaatttgcatatataggcttatcagtgaacggacagtggaggagaacatcctaaaaaaggcaaatcagaagagaatgttgggggacatggccattgagggaggcaacttcaccacagcctatttcaaacagcagaccatccgagagctgtttgatatgcccctggaggaaccttctagctcatccgtgccctctgcccctgaagaggaggaagagactgtggccagcaagcagactcatattctggagcaggcattgtgtcgggcagaagatgaagaggatatccgtgcagccacccaggccaaggctgaacaggtggctgagcttgcagaatttaatgagaacgatgggtttcctgctggtgagggagaggaagctggccggcctggggctgaggatgaggagatgtcccgggctgagcaggaaattgctgccctcgtagaacagctgacccccattgagcgctatgccatgaaattcctggaggcctcactggaggaggtgagccgagaggagctcaaacaggcagaagtgagtatttccaggggtggggctggcagttggaagctgctaatttctttttcttttctcttttttttgagacagtctcgc

SEQ ID NO: 284520 - DNA, 166 bp, Homo sapiens
gccccaagggtgggggggggcgggctttttttgggggcccacccccatctcccctaccctagcccaccctagggcctctacccagcgggaggggttgaagaccaggcctggttttattagaattcattttgtaataaaagccttttttagtggtgaaaaaaaaaaa

SEQ ID NO: 284521 - DNA, 159 bp, Homo sapiens
  misc_feature (22)..(22): n is a, c, g, or t
  misc_feature (27)..(27): n is a, c, g, or t
aaaaaaaaaaaaaaaaaaaaanaaaanaaccccacccccatctcccctaccctagcccaccctagggcctctacccagcgggaggggttgaagaccaggcctggttttattagaattcattttgtaataaaagccttttttagtggtgaaaaaaaaaaa

SEQ ID NO: 284522 - DNA, 11693 bp, Homo sapiens
gcggccgagacggcggcggccattttggtgaggcctcgggagcggcagcggcggttcgctgggagtagcgtctgccctttttcccacccaccgtccgcatctgtgtgctgcgcgaagaggcagtggaggcaaggcggtggcagtagccgcagtctccaggggagtttaaaggccgcgaaggcggtggccaagagggggccctcccccctcctaggcgggagggggggtggtgcgcacgcccccgaggacgcaggtgtgattcccttcagtacggcggcaccgtggaagtgcagactttcacagggggtgtggtctcagctcacacaggtgctccagaggctggtggacctgagcggaggctgggacgccctggtgggccccgggccctggaaggcgggtcccggtggccggtggcccagaatgaggccagctcccagcatgccctgcagccggacgccagcccctcggccagcagtactggtgataacaacccagtcattcttcaggcatccaagggggagcctgggagtgggaccatgcagagcagcccctcccctgctcaccctcagctcccagtcctacagacacagatggtgtcggacggcatgacaggcagcaatcctgtgtcccctgcctcatccagttccccagcctctagtggggcaggcggcatctccccgcagcacatagctcaagattcctcactggatggacctccaggccccccagatggtgccacagtgcccctggaggggttcagcttatcccaggctgctgacctggctaacaagggcccgaagtgggagaagagccatgccgaaattgcagaacaggccaagcatgaggccgagatcgagactcggattgctgagctgcggaaggagggtttctggtcactgaagaggctgcctaaggtgccagagccccctcgccccaaaggtcactgggactatttgtgcgaagagatgcagtggctctctgctgactttgctcaggagcgccgttggaaacggggtgtggcccggaaggtggtgcgcatggtgatccggcaccacgaggagcagcggcagaaagaggaacgggcccggagggaggagcaggccaagctgcgtcgaattgcttccaccatggccaaggatgtcaggcagttctggagcaatgtggagaaggtggtgcaattcaagcaacagtcccggcttgaggaaaagcgcaaaaaagccctggacctgcatttggacttcattgtggggcaaactgaaaagtactcggaccttctgtctcagagcctcaaccagccattaacctccagcaaagcaggctcttccccttgcctcggctcttcctcagctgcctccagtcctccaccccctgcttctcgcctggatgatgaagatggggactttcaaccccaagaggatgaggaagaggatgatgaggaaacgattgaagttgaagaacaacaggaaggcaatgatgcagaggcccagaggcgtgagattgagctgcttcgccgtgagggagaattgccactggaagagctgctccgttcccttccccctcagctgttggaagggccttccagcccctctcaaaccccctcatctcatgatagtgacacccgagatgggcctgaagaaggtgctgaagaagagccccctcaggtgttggagataaagcccccaccctctgctgtcacacagcgcaacaaacagccttggcatccagatgaagatgatgaagagtttactgccaacgaagaggaagcggaggatgaagaggatactatagcagctgaggaacagttggaaggggaggtggatcatgccatggagctgagcgagttggctcgagaaggtgagctttccatggaggagctattgcagcagtatgcaggagcctatgccccaggctctgggagcagtgaagatgaggatgaagatgaggttgatgctaatagctctgactgtgaaccagaggggcccgtggaagcggaagagcctcctcaggaggatagtagcagtcagtcagactctgtggaggaccggagtgaggatgaggaagatgaacattcagaggaggaagaaacaagtggaagttcagcatcagaggaatctgagtctgaagagtctgaggatgcccaatcacagagccaagcagatgaagaggaggaagatgatgattttggggtggagtacttgcttgccagggatgaagagcagagtgaggcagatgcaggcagtgggcctcctactccagggcccactactctaggtccaaagaaagaaattactgacattgctgcagcagctgaaagtctccagcccaagggttacacgctggccacgacccaggtaaagacgcccattcccctgcttctgcggggccagctccgggagtaccagcacattgggctagactggctggttaccatgtatgagaagaagcttaatggcattcttgctgatgagatggggcttgggaagaccatccagaccatctctctgcttgcccacttggcttgtgagaaaggtaactggggtccccatttaatcattgttcccaccagcgtgatgttgaactgggagatggagttgaaacgttggtgccccagctttaaaatcctcacttactatggagcccagaaagagaggaagctcaagcggcagggctggaccaagcccaatgcctttcatgtgtgtatcacatcttacaagctggtgctgcaggaccaccaggccttccgtcgcaagaactggcgctatctcattctggatgaggcgcagaacatcaagaacttcaagtcacagcgctggcagtcactcctcaacttcaacagccagagacgcctgctcctgacaggaactcccttgcagaacagcctcatggagctgtggtccttgatgcactttttgatgccccatgtcttccagtctcatcgcgagttcaaggagtggttctctaatcccctaactggcatgattgagggcagccaagagtataatgaaggtctagtcaaacgcctccacaaggttttgaggccttttttactgcgccgagttaaggtggatgttgagaagcagatgcccaaaaagtacgagcatgttatccgctgcaggctctccaagcgtcaacgctgtctctatgatgacttcatggcacagaccacaactaaggagacactagccacaggccatttcatgagcgtcatcaacattttgatgcagctgagaaaagtttgcaatcatccaaatctgttcgaccctcgaccggttacctcccctttcatcaccccaggcatctgcttcagcaccgcctctctggtgctaagggccacggatgtccatcccctccagcggatagacatgggtcgatttgaccttattggcctggaaggtcgtgtctctcgatatgaggcagacacatttctgccccggcaccgcctctctcgccgggtactgttagaagtggctactgctcctgaccccccaccccggcccaagccagtcaagatgaaggtcaacaggatgctgcagccagtacctaagcaagaaggccggacagtggtggtggtgaacaacccacgggcgcccctgggccctgtcccagttcgacctcctccaggtcctgagctctcagcccagcccacccctggcccagtcccccaagtgctgccagcatcactgatggtttcagcctcacctgccgggcccccgcttattcctgcatctcggcctcctggccctgtcctcttgcctccactgcagcccaacagtggttctctcccccaggtgttgccatcccccctgggggtcctgagtgggacctcacggcctcccacgccaaccttgtccctaaagccaacaccacctgccccagttcgcctgagcccagccccacctccaggctcctctagcctgttgaagcccctgacagtgccaccaggctacaccttccctcctgctgctgccaccaccacttctaccaccacggcaactgctaccaccacagcagtgccagctccgactcctgcaccacagcgcctcattctatctcccgatatgcaggctcgcctgccctcaggcgaagtggtcagcatcgggcagttagcctcactggcacaacgtccagtggctaatgcagggggaagcaaacctctcaccttccaaatccagggcaacaagctgactttgactggtgcccaggtgcgccagcttgctgtggggcagccccgcccgctgcaaatgccaccaaccatggtgaataatacaggcgtggtgaagattgtagtgagacaagcccctcgggatggactgactcctgttcctccattggccccagcaccccggcctccgagctctgggcttccagctgtgttgaatccacgccccacgttaacccctggccggctacccacacctactctgggtactgctcgagcccccatgcccacacccactctggtgaggcctcttctcaagctggtccacagtccttcacctgaagtcagtgcttcagcccccggagctgcccccttgaccatctcttctcctctccacgtgccatcctcactccctgggccagcctcttctccaatgccaattcccaactcctctccccttgctagtcctgtgtcctctacagtctcagttccattgtcatcttcactccccatctctgtccccaccacacttcctgccccagcctcggctccactcaccatccccatctcagcccccttgactgtttctgcttcgggcccagctctgttgaccagtgtgactccaccattggcacctgttgtcccagcggctcctggacctccctccttggcaccatctggtgcttccccgtcagcatcagccttgactctaggtttggccacagctccatccctgtcttcatctcagacacctggtcaccctctgttgttggctcccacctcttcacatgttccagggttgaactcaaccgtggccccagcatgctcacctgtcctggtgccagcttcggctctggccagtccttttccgtcagcaccaaatccagctccagctcaggcttcccttctggctccagcatcttctgcatctcaggctctagccacccctctggctcctatggcggctccacagacagcaattctggctccttctccagctcctcctctggctcctcttccggtcctggcaccatcgccaggtgctgctcctgtcctggcttcatcacagactccggttccagttatggctccatcgtctactccaggaacctctttagcctcagcttcaccggtaccagctccaacccctgtgttggctccatcatcaactcaaactatgctaccagccccggttccgtcacctctcccgagcccggcttctacgcagacactggccctagccccagctttagcacccactcttggaggctcatctccatctcagacactctctttgggaacggggaacccccagggaccctttccaactcagacattgtcattaactccagcatcatccctggtaccaactccagcccagacactgtctttggcaccaggaccaccactgggtccaactcagacgctgtctctggctccagcaccccctctggctccagcttctccagtgggcccagccccagctcacacgctgactttggctccagcatcgtcatctgcttcactcctggccccagcttcagtgcagacactgaccttgagccctgccccagttcctaccctgggcccggccgcagctcagaccttggcgctggccccagcctccacacagtccccagcttcccaggcatcttcccttgtggtttcggcatctggtgccgctcccttgcctgtcaccatggtatcccggctgcctgtttccaaggatgagcctgacacactgacattgcgctctggtccccccagccctccctccactgctacctcgtttggtggcccccggcctcgacgccagccccccccaccacctcgttcccctttttatctggactccctggaggaaaagcggaagcggcagcggtctgaacgcctggaacggattttccaacttagtgaggctcatggggccctggcacctgtgtatgggactgaagtcctggatttctgtaccctgccccaacctgttgccagccccatcggccctcgttctcctggccccagccaccccaccttttggacttataccgaggctgcccaccgggctgtactgtttccccagcagcgactagaccagctgtcagaaatcattgagaggttcatctttgtcatgcctcctgtggaggcacctcccccttccctgcatgcctgccacccacctccttggctggccccacgtcaggcagccttccaggagcaattggcctctgagctctggccccgggctcgtcctttgcaccgtattgtgtgtaacatgcgcacccagttccctgacttaagactcatccagtatgattgcggaaagttgcagacgttggcagtgctgttgcggcagctcaaggcagagggccaccgagtgctcatcttcacccagatgacccgaatgctggatgtattggagcagtttctcacctaccatggccatctctacctgcgcctggatggatctactagagttgaacagagacaggccttgatggaacggttcaatgcagacaaacgcatattctgcttcatcctttcaactcggagtgggggtgtgggcgtgaacctgacaggagcagacactgttgttttttatgacagcgactggaatcccaccatggatgctcaggcccaggaccgctgtcaccgaattggccagacccgggatgtccacatatataggcttatcagtgaacggacagtggaggagaacatcctaaaaaaggcaaatcagaagagaatgttgggggacatggccattgagggaggcaacttcaccacagcctatttcaaacagcagaccatccgagagctgtttgatatgcccctggaggaaccttctagctcatccgtgccctctgcccctgaagaggaggaagagactgtggccagcaagcagactcatattctggagcaggcattgtgtcgggcagaagatgaagaggatatccgtgcagccacccaggccaaggctgaacaggtggctgagcttgcagaatttaatgagaacgatgggtttcctgctggtgagggagaggaagctggccggcctggggctgaggatgaggagatgtcccgggctgagcaggaaattgctgccctcgtagaacagctgacccccattgagcgctatgccatgaaattcctggaggcctcactggaggaggtgagccgagaggagctcaaacaggcagaagagcaagtggaagctgcccgcaaagacctggaccaagccaaggaggaggtgttccgcctaccccaagaggaggaggaggggccgggggctggggatgagagttcctgtgggactggtggaggcacccaccggcgcagtaaaaaggccaaagcccctgagaggccggggactcgtgtcagtgagcgtcttcgtggagcccgggctgagactcaaggggcaaaccacactcctgtcatatccgcccatcaaactcgcagcaccaccacaccaccccgctgcagtcctgccagggagcgagttcccaggccagcacctaggcctcgacccactccagcttcagctccggctgcaattcctgcccttgttcctgtcccagtttctgccccagtacccatttcagccccaaatccaataaccattctccctgtccatatcttgccttctcctccccctccttcacagattcctccttgttcttctcctgcctgcacccctcctcctgcctgtacccctccaccagctcatacaccgcctccagcccaaacctgtcttgtaactccttcctctcctctcttgcttggtccaccttctgtgcccatctctgcctcagtcactaatctccccttgggcttgaggcctgaggcagagctgtgtgcccaggcattggcatctccagagtccctggagctggcttctgtggccagttcagaaacctcctcactttctcttgtgccccctaaagatctgttgccagttgctgtggagatcctgcctgtgtcagagaagaacctttctctcaccccttctgcacccagcctgaccttggaggctggcagcatccccaatggtcaagagcaggaggcaccagattctgctgaggggaccacccttacagtgctgcctgaaggtgaggagttgcccctgtgtgtgagtgagagcaatggcctggagctcccaccctcagcagcatctgatgagccacttcaggagccactggaggctgacaggacctcggaagagctgacagaggccaagaccccaacctccagcccagagaagccacaggaactcgttacagctgaggttgcagctccatccacctcatcttcagccacttcctcgcctgagggtccttcacctgcccgacctcctcggcgtcgcaccagtgctgatgtggaaattaggggtcaagggactggtcggccaggacaaccaccaggccccaaagtgcttcgaaagctgccaggacggctggtaactgtggtagaggaaaaggaactggtgcggcggcggcggcagcagcggggagctgccagcaccctagtgcctggggtctctgagactagtgccagcccgggaagcccgtctgtccgcagcatgtcagggccagaatcctcccctcccattggtgggccctgtgaagctgctccttcatcctcactgcccactccaccccagcagcccttcattgctcgccgtcacattgagctgggggtgactggtggtggcagccccgagaatggagacggagcactgctcgccatcaccccacctgctgtgaaacgtcggagggggaggccccccaagaagaacaggtctccagcagatgctgggagaggtgtggatgaggcaccctcatccaccttgaagggaaaaaccaatggggctgacccagtccctgggcctgagaccctaattgttgcagatcctgtcctggaaccacagcttattcctgggccccagcctcttggaccccagccagttcacagacccaatcccctcctgtcacctgtggagaaaagaaggcgaggacgaccccctaaagcacgagatttgcccatccctgggaccatttcctctgcaggggatggcaactccgaaagtcggacacagccacccccacacccatcacccctaaccccactcccaccactgctagtttgtcccactgctactgttgccaacactgtcaccactgtcaccatttcaacgtccccacccaaacggaagaggggccgacctcccaagaatcctccatcacctcggcccagccagctccccgtcttggaccgtgacagcacttctgttctcgagagctgtggattggggaggcgacggcaaccccagggccaaggggagagtgagggtagttcctctgatgaggatggaagccgccccctcacccgcctggcccgccttcggcttgaagcagaaggaatgcgaggacggaagagtggagggtccatggtggtggctgtaattcaggatgacctggacttagcagatagcgggccaggcgggttggaattgacaccacctgtggtctcactaaccccaaaactgcgctcgacccggctgcgtccagggtctctagtccccccactagagactgagaagttgcctcgcaaacgagcaggggccccagttggtgggagtcctgggctggcaaagcggggccgcctacagcccccaagtcccctggggcctgagggttcagtagaggagtctgaggctgaagcctcaggtgaggaggaggaaggggatgggaccccacgccgacgtcctggcccccgccggcttgttgggaccaccaaccaaggggaccagcgcatcctgcgcagcagcgcccctccctccctggctggccctgctgttagtcacagaggccgcaaggccaagacgtgagtgggctgcccctccacctaggctttccaccgtggccactccctccatgaccaggcctgactctgttaaccactacttgaagtcttgagggggaaagcctccagggagacataggggccttctcccttcttcccaccaaagtagggggtaggcaactggttgtcatggaaatggggatcatcacagtccccttccccttcaccccacgtggctgggcagtgttaagggtggcaagatagtctctgtccccacccccttgtacttgattccccagctgtctttcacacagccccccacccttaggggaagggggaggggcttctctacaatgaggtttttttcttttttttttttttttaagaagaaaaaataataaacttagtttctgtatgagcatccgcgtaaggaggcttctgattttctggtctggtggagggttgggtgggaacttgggcatcgtttttctcctccctcttgttcttgcaaagatcctagcacctgatctctagcccaggactatatgttccaggcagaaatctacccaagaagagggaagattggtgaatttgatgtggtagggtgcctttccccagtcagtttgaagtcacagatatccttttcctctcatttcttttccctcggttcctagacgttcctcggagctctttgatgcctcagacctttcccttttatccctcttgctcaggtgcttcctttcacaactttttccagagggcaggcgtcctagctccagttgctccatcccttgggccctcccctgctcttcatctagccaaactggtttgagtcagccacaccccttcccagctccctgggctcttcacgtggtggctggccactcaaccccacccctgggcttggcttggagccctgagtcagctccatcaccacccaagccaaaccaaagctgaggcaggagccgaaactcagagtccttcaaggcctatagccaggtgatggaggacgaggagaaggcagtggagatcttgggcaacacggaagctgctcatcctccatcccccatccgctgctgctggctccgcctccgctgcttggcagctactagcattatctgtggctgctcttgcctgggagtcatggctctggtgtttgccatcaaggcggaagagcggcataaagcaggccggtccgaggaggcagtgcgctggggggcccgggcccggaaactcatcctggccagctttgctgtctggcttgctgtcctcattctgggtcccctgctgctgtggttgctctcctacgccatcgctcaggctgagtgaccctggatggcctctgctgagagccagccgagacctcctggatcctgcaatgcggcattgctaaggtcctgtgacagcagtggttggaaggatcctggttggaaggatggggactctctcaaggggctttggaagagctcttctagccctttataaaaggagggcagcagctgagactgatgagaggagggcagcctgctctgttctttcagggccccccacccccatctcccctaccctagcccaccctagggcctctacccagcgggaggggttgaagaccaggcctggttttattagaattcattttgtaataaaagccttttttagtggtgaaaaaaaaaaa

SEQ ID NO: 284523 - DNA, 10438 bp, Homo sapiens
gcggccgagacggcggcggccattttggtgaggcctcgggagcggcagcggcggttcgctgggagtagcgtctgccctttttcccacccaccgtccgcatctgtgtgctgcgcgaagaggcagtggaggcaaggcggtggcagtagccgcagtctccaggggagtttaaaggccgcgaaggcggtggccaagagggggccctcccccctcctaggcgggagggggggtggtgcgcacgcccccgaggacgcaggtgtgattcccttcagtacggcggcaccgtggaagtgcagactttcacagggggtgtggtctcagctcacacaggtgctccagaggctggtggacctgagcggaggctgggacgccctggtgggccccgggccctggaaggcgggtcccggtggccggtggcccagaatgaggccagctcccagcatgccctgcagccggacgccagcccctcggccagcagtactggtgataacaacccagtcattcttcaggcatccaagggggagcctgggagtgggaccatgcagagcagcccctcccctgctcaccctcagctcccagtcctacagacacagatggtgtcggacggcatgacaggcagcaatcctgtgtcccctgcctcatccagttccccagcctctagtggggcaggcggcatctccccgcagcacatagctcaagattcctcactggatggacctccaggccccccagatggtgccacagtgcccctggaggggttcagcttatcccaggctgctgacctggctaacaagggcccgaagtgggagaagagccatgccgaaattgcagaacaggccaagcatgaggccgagatcgagactcggattgctgagctgcggaaggagggtttctggtcactgaagaggctgcctaaggtgccagagccccctcgccccaaaggtcactgggactatttgtgcgaagagatgcagtggctctctgctgactttgctcaggagcgccgttggaaacggggtgtggcccggaaggtggtgcgcatggtgatccggcaccacgaggagcagcggcagaaagaggaacgggcccggagggaggagcaggccaagctgcgtcgaattgcttccaccatggccaaggatgtcaggcagttctggagcaatgtggagaaggtggtgcaattcaagcaacagtcccggcttgaggaaaagcgcaaaaaagccctggacctgcatttggacttcattgtggggcaaactgaaaagtactcggaccttctgtctcagagcctcaaccagccattaacctccagcaaagcaggctcttccccttgcctcggctcttcctcagctgcctccagtcctccaccccctgcttctcgcctggatgatgaagatggggactttcaaccccaagaggatgaggaagaggatgatgaggaaacgattgaagttgaagaacaacaggaaggcaatgatgcagaggcccagaggcgtgagattgagctgcttcgccgtgagggagaattgccactggaagagctgctccgttcccttccccctcagctgttggaagggccttccagcccctctcaaaccccctcatctcatgatagtgacacccgagatgggcctgaagaaggtgctgaagaagagccccctcaggtgttggagataaagcccccaccctctgctgtcacacagcgcaacaaacagccttggcatccagatgaagatgatgaagagtttactgccaacgaagaggaagcggaggatgaagaggatactatagcagctgaggaacagttggaaggggaggtggatcatgccatggagctgagcgagttggctcgagaaggtgagctttccatggaggagctattgcagcagtatgcaggagcctatgccccaggctctgggagcagtgaagatgaggatgaagatgaggttgatgctaatagctctgactgtgaaccagaggggcccgtggaagcggaagagcctcctcaggaggatagtagcagtcagtcagactctgtggaggaccggagtgaggatgaggaagatgaacattcagaggaggaagaaacaagtggaagttcagcatcagaggaatctgagtctgaagagtctgaggatgcccaatcacagagccaagcagatgaagaggaggaagatgatgattttggggtggagtacttgcttgccagggatgaagagcagagtgaggcagatgcaggcagtgggcctcctactccagggcccactactctaggtccaaagaaagaaattactgacattgctgcagcagctgaaagtctccagcccaagggttacacgctggccacgacccaggtaaagacgcccattcccctgcttctgcggggccagctccgggagtaccagcacattgggctagactggctggttaccatgtatgagaagaagcttaatggcattcttgctgatgagatggggcttgggaagaccatccagaccatctctctgcttgcccacttggcttgtgagaaaggtaactggggtccccatttaatcattgttcccaccagcgtgatgttgaactgggagatggagttgaaacgttggtgccccagctttaaaatcctcacttactatggagcccagaaagagaggaagctcaagcggcagggctggaccaagcccaatgcctttcatgtgtgtatcacatcttacaagctggtgctgcaggaccaccaggccttccgtcgcaagaactggcgctatctcattctggatgaggcgcagaacatcaagaacttcaagtcacagcgctggcagtcactcctcaacttcaacagccagagacgcctgctcctgacaggaactcccttgcagaacagcctcatggagctgtggtccttgatgcactttttgatgccccatgtcttccagtctcatcgcgagttcaaggagtggttctctaatcccctaactggcatgattgagggcagccaagagtataatgaaggtctagtcaaacgcctccacaaggttttgaggccttttttactgcgccgagttaaggtggatgttgagaagcagatgcccaaaaagtacgagcatgttatccgctgcaggctctccaagcgtcaacgctgtctctatgatgacttcatggcacagaccacaactaaggagacactagccacaggccatttcatgagcgtcatcaacattttgatgcagctgagaaaagtttgcaatcatccaaatctgttcgaccctcgaccggttacctcccctttcatcaccccaggcatctgcttcagcaccgcctctctggtgctaagggccacggatgtccatcccctccagcggatagacatgggtcgatttgaccttattggcctggaaggtcgtgtctctcgatatgaggcagacacatttctgccccggcaccgcctctctcgccgggtactgttagaagtggctactgctcctgaccccccaccccggcccaagccagtcaagatgaaggtcaacaggatgctgcagccagtacctaagcaagaaggccggacagtggtggtggtgaacaacccacgggcgcccctgggccctgtcccagttcgacctcctccaggtcctgagctctcagcccagcccacccctggcccagtcccccaagtgctgccagcatcactgatggtttcagcctcacctgccgggcccccgcttattcctgcatctcggcctcctggccctgtcctcttgcctccactgcagcccaacagtggttctctcccccaggtgttgccatcccccctgggggtcctgagtgggacctcacggcctcccacgccaaccttgtccctaaagccaacaccacctgccccagttcgcctgagcccagccccacctccaggctcctctagcctgttgaagcccctgacagtgccaccaggctacaccttccctcctgctgctgccaccaccacttctaccaccacggcaactgctaccaccacagcagtgccagctccgactcctgcaccacagcgcctcattctatctcccgatatgcaggctcgcctgccctcaggcgaagtggtcagcatcgggcagttagcctcactggcacaacgtccagtggctaatgcagggggaagcaaacctctcaccttccaaatccagggcaacaagctgactttgactggtgcccaggtgcgccagcttgctgtggggcagccccgcccgctgcaaatgccaccaaccatggtgaataatacaggcgtggtgaagattgtagtgagacaagcccctcgggatggactgactcctgttcctccattggccccagcaccccggcctccgagctctgggcttccagctgtgttgaatccacgccccacgttaacccctggccggctacccacacctactctgggtactgctcgagcccccatgcccacacccactctggtgaggcctcttctcaagctggtccacagtccttcacctgaagtcagtgcttcagcccccggagctgcccccttgaccatctcttctcctctccacgtgccatcctcactccctgggccagcctcttctccaatgccaattcccaactcctctccccttgctagtcctgtgtcctctacagtctcagttccattgtcatcttcactccccatctctgtccccaccacacttcctgccccagcctcggctccactcaccatccccatctcagcccccttgactgtttctgcttcgggcccagctctgttgaccagtgtgactccaccattggcacctgttgtcccagcggctcctggacctccctccttggcaccatctggtgcttccccgtcagcatcagccttgactctaggtttggccacagctccatccctgtcttcatctcagacacctggtcaccctctgttgttggctcccacctcttcacatgttccagggttgaactcaaccgtggccccagcatgctcacctgtcctggtgccagcttcggctctggccagtccttttccgtcagcaccaaatccagctccagctcaggcttcccttctggctccagcatcttctgcatctcaggctctagccacccctctggctcctatggcggctccacagacagcaattctggctccttctccagctcctcctctggctcctcttccggtcctggcaccatcgccaggtgctgctcctgtcctggcttcatcacagactccggttccagttatggctccatcgtctactccaggaacctctttagcctcagcttcaccggtaccagctccaacccctgtgttggctccatcatcaactcaaactatgctaccagccccggttccgtcacctctcccgagcccggcttctacgcagacactggccctagccccagctttagcacccactcttggaggctcatctccatctcagacactctctttgggaacggggaacccccagggaccctttccaactcagacattgtcattaactccagcatcatccctggtaccaactccagcccagacactgtctttggcaccaggaccaccactgggtccaactcagacgctgtctctggctccagcaccccctctggctccagcttctccagtgggcccagccccagctcacacgctgactttggctccagcatcgtcatctgcttcactcctggccccagcttcagtgcagacactgaccttgagccctgccccagttcctaccctgggcccggccgcagctcagaccttggcgctggccccagcctccacacagtccccagcttcccaggcatcttcccttgtggtttcggcatctggtgccgctcccttgcctgtcaccatggtatcccggctgcctgtttccaaggatgagcctgacacactgacattgcgctctggtccccccagccctccctccactgctacctcgtttggtggcccccggcctcgacgccagccccccccaccacctcgttcccctttttatctggactccctggaggaaaagcggaagcggcagcggtctgaacgcctggaacggattttccaacttagtgaggctcatggggccctggcacctgtgtatgggactgaagtcctggatttctgtaccctgccccaacctgttgccagccccatcggccctcgttctcctggccccagccaccccaccttttggacttataccgaggctgcccaccgggctgtactgtttccccagcagcgactagaccagctgtcagaaatcattgagaggttcatctttgtcatgcctcctgtggaggcacctcccccttccctgcatgcctgccacccacctccttggctggccccacgtcaggcagccttccaggagcaattggcctctgagctctggccccgggctcgtcctttgcaccgtattgtgtgtaacatgcgcacccagttccctgacttaagactcatccagtatgattgcggaaagttgcagacgttggcagtgctgttgcggcagctcaaggcagagggccaccgagtgctcatcttcacccagatgacccgaatgctggatgtattggagcagtttctcacctaccatggccatctctacctgcgcctggatggatctactagagttgaacagagacaggccttgatggaacggttcaatgcagacaaacgcatattctgcttcatcctttcaactcggagtgggggtgtgggcgtgaacctgacaggagcagacactgttgttttttatgacagcgactggaatcccaccatggatgctcaggcccaggaccgctgtcaccgaattggccagacccgggatgtccacatatataggcttatcagtgaacggacagtggaggagaacatcctaaaaaaggcaaatcagaagagaatgttgggggacatggccattgagggaggcaacttcaccacagcctatttcaaacagcagaccatccgagagctgtttgatatgcccctggaggaaccttctagctcatccgtgccctctgcccctgaagaggaggaagagactgtggccagcaagcagactcatattctggagcaggcattgtgtcgggcagaagatgaagaggatatccgtgcagccacccaggccaaggctgaacaggtggctgagcttgcagaatttaatgagaacgatgggtttcctgctggtgagggagaggaagctggccggcctggggctgaggatgaggagatgtcccgggctgagcaggaaattgctgccctcgtagaacagctgacccccattgagcgctatgccatgaaattcctggaggcctcactggaggaggtgagccgagaggagctcaaacaggcagaagagcaagtggaagctgcccgcaaagacctggaccaagccaaggaggaggtgttccgcctaccccaagaggaggaggaggggccgggggctggggatgagagttcctgtgggactggtggaggcacccaccggcgcagtaaaaaggccaaagcccctgagaggccggggactcgtgtcagtgagcgtcttcgtggagcccgggctgagactcaaggggcaaaccacactcctgtcatatccgcccatcaaactcgcagcaccaccacaccaccccgctgcagtcctgccagggagcgagttcccaggccagcacctaggcctcgacccactccagcttcagctccggctgcaattcctgcccttgttcctgtcccagtttctgccccagtacccatttcagccccaaatccaataaccattctccctgtccatatcttgccttctcctccccctccttcacagattcctccttgttcttctcctgcctgcacccctcctcctgcctgtacccctccaccagctcatacaccgcctccagcccaaacctgtcttgtaactccttcctctcctctcttgcttggtccaccttctgtgcccatctctgcctcagtcactaatctccccttgggcttgaggcctgaggcagagctgtgtgcccaggcattggcatctccagagtccctggagctggcttctgtggccagttcagaaacctcctcactttctcttgtgccccctaaagatctgttgccagttgctgtggagatcctgcctgtgtcagagaagaacctttctctcaccccttctgcacccagcctgaccttggaggctggcagcatccccaatggtcaagagcaggaggcaccagattctgctgaggggaccacccttacagtgctgcctgaaggtgaggagttgcccctgtgtgtgagtgagagcaatggcctggagctcccaccctcagcagcatctgatgagccacttcaggagccactggaggctgacaggacctcggaagagctgacagaggccaagaccccaacctccagcccagagaagccacaggaactcgttacagctgaggttgcagctccatccacctcatcttcagccacttcctcgcctgagggtccttcacctgcccgacctcctcggcgtcgcaccagtgctgatgtggaaattaggggtcaagggactggtcggccaggacaaccaccaggccccaaagtgcttcgaaagctgccaggacggctggtaactgtggtagaggaaaaggaactggtgcggcggcggcggcagcagcggggagctgccagcaccctagtgcctggggtctctgagactagtgccagcccgggaagcccgtctgtccgcagcatgtcagggccagaatcctcccctcccattggtgggccctgtgaagctgctccttcatcctcactgcccactccaccccagcagcccttcattgctcgccgtcacattgagctgggggtgactggtggtggcagccccgagaatggagacggagcactgctcgccatcaccccacctgctgtgaaacgtcggagggggaggccccccaagaagaacaggtctccagcagatgctgggagaggtgtggatgaggcaccctcatccaccttgaagggaaaaaccaatggggctgacccagtccctgggcctgagaccctaattgttgcagatcctgtcctggaaccacagcttattcctgggccccagcctcttggaccccagccagttcacagacccaatcccctcctgtcacctgtggagaaaagaaggcgaggacgaccccctaaagcacgagatttgcccatccctgggaccatttcctctgcaggggatggcaactccgaaagtcggacacagccacccccacacccatcacccctaaccccactcccaccactgctagtttgtcccactgctactgttgccaacactgtcaccactgtcaccatttcaacgtccccacccaaacggaagaggggccgacctcccaagaatcctccatcacctcggcccagccagctccccgtcttggaccgtgacagcacttctgttctcgagagctgtggattggggaggcgacggcaaccccagggccaaggggagagtgagggtagttcctctgatgaggatggaagccgccccctcacccgcctggcccgccttcggcttgaagcagaaggaatgcgaggacggaagagtggagggtccatggtggtggctgtaattcaggatgacctggacttagcagatagcgggccaggcgggttggaattgacaccacctgtggtctcactaaccccaaaactgcgctcgacccggctgcgtccagggtctctagtccccccactagagactgagaagttgcctcgcaaacgagcaggggccccagttggtgggagtcctgggctggcaaagcggggccgcctacagcccccaagtcccctggggcctgagggttcagtagaggagtctgaggctgaagcctcaggtgaggaggaggaaggggatgggaccccacgccgacgtcctggcccccgccggcttgttgggaccaccaaccaaggggaccagcgcatcctgcgcagcagcgcccctccctccctggctggccctgctgttagtcacagaggccgcaaggccaagacgtgagtgggctgcccctccacctaggctttccaccgtggccactccctccatgaccaggcctgactctgttaaccactacttgaagtcttgagggggaaagcctccagggagacataggggccttctcccttcttcccaccaaagtagggggtaggcaactggttgtcatggaaatggggatcatcacagtccccttccccttcaccccacgtggctgggcagtgttaagggtggcaagatagtctctgtccccacccccttgtacttgattccccagctgtctttcacacagccccccacccttaggggaagggggaggggcttctctacaatgaggtttttttcttttttttttttttttaagaagaaaaaataataaacttagtttctgtatgagc

SEQ ID NO: 284524 - DNA, 11775 bp, Homo sapiens
gcggccgagacggcggcggccattttggtgaggcctcgggagcggcagcggcggttcgctgggagtagcgtctgccctttttcccacccaccgtccgcatctgtgtgctgcgcgaagaggcagtggaggcaaggcggtggcagtagccgcagtctccaggggagtttaaaggccgcgaaggcggtggccaagagggggccctcccccctcctaggcgggagggggggtggtgcgcacgcccccgaggacgcaggtgtgattcccttcagtacggcggcaccgtggaagtgcagactttcacagggggtgtggtctcagctcacacaggtgctccagaggctggtggacctgagcggaggctgggacgccctggtgggccccgggccctggaaggcgggtcccggtggccggtggcccagaatgaggccagctcccagcatgccctgcagccggacgccagcccctcggccagcagtactggtgataacaacccagtcattcttcaggcatccaagggggagcctgggagtgggaccatgcagagcagcccctcccctgctcaccctcagctcccagtcctacagacacagatggtgtcggacggcatgacaggcagcaatcctgtgtcccctgcctcatccagttccccagcctctagtggggcaggcggcatctccccgcagcacatagctcaagattcctcactggatggacctccaggccccccagatggtgccacagtgcccctggaggggttcagcttatcccaggctgctgacctggctaacaagggcccgaagtgggagaagagccatgccgaaattgcagaacaggccaagcatgaggccgagatcgagactcggattgctgagctgcggaaggagggtttctggtcactgaagaggctgcctaaggtgccagagccccctcgccccaaaggtcactgggactatttgtgcgaagagatgcagtggctctctgctgactttgctcaggagcgccgttggaaacggggtgtggcccggaaggtggtgcgcatggtgatccggcaccacgaggagcagcggcagaaagaggaacgggcccggagggaggagcaggccaagctgcgtcgaattgcttccaccatggccaaggatgtcaggcagttctggagcaatgtggagaaggtggtgcaattcaagcaacagtcccggcttgaggaaaagcgcaaaaaagccctggacctgcatttggacttcattgtggggcaaactgaaaagtactcggaccttctgtctcagagcctcaaccagccattaacctccagcaaagcaggctcttccccttgcctcggctcttcctcagctgcctccagtcctccaccccctgcttctcgcctggatgatgaagatggggactttcaaccccaagaggatgaggaagaggatgatgaggaaacgattgaagttgaagaacaacaggaaggcaatgatgcagaggcccagaggcgtgagattgagctgcttcgccgtgagggagaattgccactggaagagctgctccgttcccttccccctcagctgttggaagggccttccagcccctctcaaaccccctcatctcatgatagtgacacccgagatgggcctgaagaaggtgctgaagaagagccccctcaggtgttggagataaagcccccaccctctgctgtcacacagcgcaacaaacagccttggcatccagatgaagatgatgaagagtttactgccaacgaagaggaagcggaggatgaagaggatactatagcagctgaggaacagttggaaggggaggtggatcatgccatggagctgagcgagttggctcgagaaggtgagctttccatggaggagctattgcagcagtatgcaggagcctatgccccaggctctgggagcagtgaagatgaggatgaagatgaggttgatgctaatagctctgactgtgaaccagaggggcccgtggaagcggaagagcctcctcaggaggatagtagcagtcagtcagactctgtggaggaccggagtgaggatgaggaagatgaacattcagaggaggaagaaacaagtggaagttcagcatcagaggaatctgagtctgaagagtctgaggatgcccaatcacagagccaagcagatgaagaggaggaagatgatgattttggggtggagtacttgcttgccagggatgaagagcagagtgaggcagatgcaggcagtgggcctcctactccagggcccactactctaggtccaaagaaagaaattactgacattgctgcagcagctgaaagtctccagcccaagggttacacgctggccacgacccaggtaaagacgcccattcccctgcttctgcggggccagctccgggagtaccagcacattgggctagactggctggttaccatgtatgagaagaagcttaatggcattcttgctgatgagatggggcttgggaagaccatccagaccatctctctgcttgcccacttggcttgtgagaaaggtaactggggtccccatttaatcattgttcccaccagcgtgatgttgaactgggagatggagttgaaacgttggtgccccagctttaaaatcctcacttactatggagcccagaaagagaggaagctcaagcggcagggctggaccaagcccaatgcctttcatgtgtgtatcacatcttacaagctggtgctgcaggaccaccaggccttccgtcgcaagaactggcgctatctcattctggatgaggcgcagaacatcaagaacttcaagtcacagcgctggcagtcactcctcaacttcaacagccagagacgcctgctcctgacaggaactcccttgcagaacagcctcatggagctgtggtccttgatgcactttttgatgccccatgtcttccagtctcatcgcgagttcaaggagtggttctctaatcccctaactggcatgattgagggcagccaagagtataatgaaggtctagtcaaacgcctccacaaggttttgaggccttttttactgcgccgagttaaggtggatgttgagaagcagatgcccaaaaagtacgagcatgttatccgctgcaggctctccaagcgtcaacgctgtctctatgatgacttcatggcacagaccacaactaaggagacactagccacaggccatttcatgagcgtcatcaacattttgatgcagctgagaaaagtttgcaatcatccaaatctgttcgaccctcgaccggttacctcccctttcatcaccccaggcatctgcttcagcaccgcctctctggtgctaagggccacggatgtccatcccctccagcggatagacatgggtcgatttgaccttattggcctggaaggtcgtgtctctcgatatgaggcagacacatttctgccccggcaccgcctctctcgccgggtactgttagaagtggctactgctcctgaccccccaccccggcccaagccagtcaagatgaaggtcaacaggatgctgcagccagtacctaagcaagaaggccggacagtggtggtggtgaacaacccacgggcgcccctgggccctgtcccagttcgacctcctccaggtcctgagctctcagcccagcccacccctggcccagtcccccaagtgctgccagcatcactgatggtttcagcctcacctgccgggcccccgcttattcctgcatctcggcctcctggccctgtcctcttgcctccactgcagcccaacagtggttctctcccccaggtgttgccatcccccctgggggtcctgagtgggacctcacggcctcccacgccaaccttgtccctaaagccaacaccacctgccccagttcgcctgagcccagccccacctccaggctcctctagcctgttgaagcccctgacagtgccaccaggctacaccttccctcctgctgctgccaccaccacttctaccaccacggcaactgctaccaccacagcagtgccagctccgactcctgcaccacagcgcctcattctatctcccgatatgcaggctcgcctgccctcaggcgaagtggtcagcatcgggcagttagcctcactggcacaacgtccagtggctaatgcagggggaagcaaacctctcaccttccaaatccagggcaacaagctgactttgactggtgcccaggtgcgccagcttgctgtggggcagccccgcccgctgcaaatgccaccaaccatggtgaataatacaggcgtggtgaagattgtagtgagacaagcccctcgggatggactgactcctgttcctccattggccccagcaccccggcctccgagctctgggcttccagctgtgttgaatccacgccccacgttaacccctggccggctacccacacctactctgggtactgctcgagcccccatgcccacacccactctggtgaggcctcttctcaagctggtccacagtccttcacctgaagtcagtgcttcagcccccggagctgcccccttgaccatctcttctcctctccacgtgccatcctcactccctgggccagcctcttctccaatgccaattcccaactcctctccccttgctagtcctgtgtcctctacagtctcagttccattgtcatcttcactccccatctctgtccccaccacacttcctgccccagcctcggctccactcaccatccccatctcagcccccttgactgtttctgcttcgggcccagctctgttgaccagtgtgactccaccattggcacctgttgtcccagcggctcctggacctccctccttggcaccatctggtgcttccccgtcagcatcagccttgactctaggtttggccacagctccatccctgtcttcatctcagacacctggtcaccctctgttgttggctcccacctcttcacatgttccagggttgaactcaaccgtggccccagcatgctcacctgtcctggtgccagcttcggctctggccagtccttttccgtcagcaccaaatccagctccagctcaggcttcccttctggctccagcatcttctgcatctcaggctctagccacccctctggctcctatggcggctccacagacagcaattctggctccttctccagctcctcctctggctcctcttccggtcctggcaccatcgccaggtgctgctcctgtcctggcttcatcacagactccggttccagttatggctccatcgtctactccaggaacctctttagcctcagcttcaccggtaccagctccaacccctgtgttggctccatcatcaactcaaactatgctaccagccccggttccgtcacctctcccgagcccggcttctacgcagacactggccctagccccagctttagcacccactcttggaggctcatctccatctcagacactctctttgggaacggggaacccccagggaccctttccaactcagacattgtcattaactccagcatcatccctggtaccaactccagcccagacactgtctttggcaccaggaccaccactgggtccaactcagacgctgtctctggctccagcaccccctctggctccagcttctccagtgggcccagccccagctcacacgctgactttggctccagcatcgtcatctgcttcactcctggccccagcttcagtgcagacactgaccttgagccctgccccagttcctaccctgggcccggccgcagctcagaccttggcgctggccccagcctccacacagtccccagcttcccaggcatcttcccttgtggtttcggcatctggtgccgctcccttgcctgtcaccatggtatcccggctgcctgtttccaaggatgagcctgacacactgacattgcgctctggtccccccagccctccctccactgctacctcgtttggtggcccccggcctcgacgccagccccccccaccacctcgttcccctttttatctggactccctggaggaaaagcggaagcggcagcggtctgaacgcctggaacggattttccaacttagtgaggctcatggggccctggcacctgtgtatgggactgaagtcctggatttctgtaccctgccccaacctgttgccagccccatcggccctcgttctcctggccccagccaccccaccttttggacttataccgaggctgcccaccgggctgtactgtttccccagcagcgactagaccagctgtcagaaatcattgagaggttcatctttgtcatgcctcctgtggaggcacctcccccttccctgcatgcctgccacccacctccttggctggccccacgtcaggcagccttccaggagcaattggcctctgagctctggccccgggctcgtcctttgcaccgtattgtgtgtaacatgcgcacccagttccctgacttaagactcatccagtatgattgcggaaagttgcagacgttggcagtgctgttgcggcagctcaaggcagagggccaccgagtgctcatcttcacccagatgacccgaatgctggatgtattggagcagtttctcacctaccatggccatctctacctgcgcctggatggatctactagagttgaacagagacaggccttgatggaacggttcaatgcagacaaacgcatattctgcttcatcctttcaactcggagtgggggtgtgggcgtgaacctgacaggagcagacactgttgttttttatgacagcgactggaatcccaccatggatgctcaggcccaggaccgctgtcaccgaattggccagacccgggatgtccacatatataggcttatcagtgaacggacagtggaggagaacatcctaaaaaaggcaaatcagaagagaatgttgggggacatggccattgagggaggcaacttcaccacagcctatttcaaacagcagaccatccgagagctgtttgatatgcccctggaggaaccttctagctcatccgtgccctctgcccctgaagaggaggaagagactgtggccagcaagcagactcatattctggagcaggcattgtgtcgggcagaagatgaagaggatatccgtgcagccacccaggccaaggctgaacaggtggctgagcttgcagaatttaatgagaacgatgggtttcctgctggtgagggagaggaagctggccggcctggggctgaggatgaggagatgtcccgggctgagcaggaaattgctgccctcgtagaacagctgacccccattgagcgctatgccatgaaattcctggaggcctcactggaggaggtgagccgagaggagctcaaacaggcagaagagcaagtggaagctgcccgcaaagacctggaccaagccaaggaggaggtgttccgcctaccccaagaggaggaggaggggccgggggctggggatgagagttcctgtgggactggtggaggcacccaccggcgcagtaaaaaggccaaagcccctgagaggccggggactcgtgtcagtgagcgtcttcgtggagcccgggctgagactcaaggggcaaaccacactcctgtcatatccgcccatcaaactcgcagcaccaccacaccaccccgctgcagtcctgccagggagcgagttcccaggccagcacctaggcctcgacccactccagcttcagctccggctgcaattcctgcccttgttcctgtcccagtttctgccccagtacccatttcagccccaaatccaataaccattctccctgtccatatcttgccttctcctccccctccttcacagattcctccttgttcttctcctgcctgcacccctcctcctgcctgtacccctccaccagctcatacaccgcctccagcccaaacctgtcttgtaactccttcctctcctctcttgcttggtccaccttctgtgcccatctctgcctcagtcactaatctccccttgggcttgaggcctgaggcagagctgtgtgcccaggcattggcatctccagagtccctggagctggcttctgtggccagttcagaaacctcctcactttctcttgtgccccctaaagatctgttgccagttgctgtggagatcctgcctgtgtcagagaagaacctttctctcaccccttctgcacccagcctgaccttggaggctggcagcatccccaatggtcaagagcaggaggcaccagattctgctgaggggaccacccttacagtgctgcctgaaggtgaggagttgcccctgtgtgtgagtgagagcaatggcctggagctcccaccctcagcagcatctgatgagccacttcaggagccactggaggctgacaggacctcggaagagctgacagaggccaagaccccaacctccagcccagagaagccacaggaactcgttacagctgaggttgcagctccatccacctcatcttcagccacttcctcgcctgagggtccttcacctgcccgacctcctcggcgtcgcaccagtgctgatgtggaaattaggggtcaagggactggtcggccaggacaaccaccaggccccaaagtgcttcgaaagctgccaggacggctggtaactgtggtagaggaaaaggaactggtgcggcggcggcggcagcagcggggagctgccagcaccctagtgcctggggtctctgagactagtgccagcccgggaagcccgtctgtccgcagcatgtcagggccagaatcctcccctcccattggtgggccctgtgaagctgctccttcatcctcactgcccactccaccccagcagcccttcattgctcgccgtcacattgagctgggggtgactggtggtggcagccccgagaatggagacggagcactgctcgccatcaccccacctgctgtgaaacgtcggagggggaggccccccaagaagaacaggtctccagcagatgctgggagaggtgtggatgaggcaccctcatccaccttgaagggaaaaaccaatggggctgacccagtccctgggcctgagaccctaattgttgcagatcctgtcctggaaccacagcttattcctgggccccagcctcttggaccccagccagttcacagacccaatcccctcctgtcacctgtggagaaaagaaggcgaggacgaccccctaaagcacgagatttgcccatccctgggaccatttcctctgcaggggatggcaactccgaaagtcggacacagccacccccacacccatcacccctaaccccactcccaccactgctagtttgtcccactgctactgttgccaacactgtcaccactgtcaccatttcaacgtccccacccaaacggaagaggggccgacctcccaagaatcctccatcacctcggcccagccagctccccgtcttggaccgtgacagcacttctgttctcgagagctgtggattggggaggcgacggcaaccccagggccaaggggagagtgagggtagttcctctgatgaggatggaagccgccccctcacccgcctggcccgccttcggcttgaagcagaaggaatgcgaggacggaagagtggagggtccatggtggtggctgtaattcaggatgacctggacttagcagatagcgggccaggcgggttggaattgacaccacctgtggtctcactaaccccaaaactgcgctcgacccggctgcgtccagggtctctagtccccccactagagactgagaagttgcctcgcaaacgagcaggggccccagttggtgggagtcctgggctggcaaagcggggccgcctacagcccccaagtcccctggggcctgagggttcagtagaggagtctgaggctgaagcctcaggtgaggaggaggaaggggatgggaccccacgccgacgtcctggcccccgccggcttgttgggaccaccaaccaaggggaccagcgcatcctgcgcagcagcgcccctccctccctggctggccctgctgttagtcacagaggccgcaaggccaagacgtgagtgggctgcccctccacctaggctttccaccgtggccactccctccatgaccaggcctgactctgttaaccactacttgaagtcttgagggggaaagcctccagggagacataggggccttctcccttcttcccaccaaagtagggggtaggcaactggttgtcatggaaatggggatcatcacagtccccttccccttcaccccacgtggctgggcagtgttaagggtggcaagatagtctctgtccccacccccttgtacttgattccccagctgtctttcacacagccccccacccttaggggaagggggaggggcttctctacaatgaggtttttttcttttttttttttttttaagaagaaaaaataataaacttagtttctgtatgagcatccgcgtaaggaggcttctgattttctggtctggtggagggttgggtgggaacttgggcatcgtttttctcctccctcttgttcttgcaaagatcctagcacctgatctctagcccaggactatatgttccaggcagaaatctacccaagaagagggaagattggtgaatttgatgtggtagggtgcctttccccagtcagtttgaagtcacagatatccttttcctctcatttcttttccctcggttcctagacgttcctcggagctctttgatgcctcagacctttcccttttatccctcttgctcaggtgcttcctttcacaactttttccagagggcaggcgtcctagctccagttgctccatcccttgggccctcccctgctcttcatctagccaaactggtttgagtcagccacaccccttcccagctccctgggctcttcacgtggtggctggccactcaaccccacccctgggcttggcttggagccctgagtcagctccatcaccacccaagccaaaccaaagctgaggcaggagccgaaactcagagtccttcaaggcctatagccaggtgatggaggacgaggagaaggcagtggagatcttgggcaacacggaagctgctcatcctccatcccccatccgctgctgctggctccgcctccgctgcttggcagctactagcattatctgtggctgctcttgcctgggagtcatggctctggtgtttgccatcaaggtgaggagtgcaattcccatgggaatgggggtgggtataaggcaatggtttcatgtatctgatctatctacattgaccagtcactggatacctatcagtgctctgggcctagtgccagaatataagtattagacagggttccttgtcgtcagacgacccattatcttatgaaagaggtgacagtgaaaatgggtaattaatagaatgcagttcatcagtaccgtaatacaggaagcacaggacagtgtgggagccagggaagatctatgtatgtaattatatatgtgtatatggtagaataggtgactggaaaggcatcttaggagaggtgacaggattaatcttaaagggtgagtgagtaagtgtggaagggcattccagataaaaggagcagtgtgtacaaaggcctgtggagcatgactggaccagtgaggaatagtgagagatgaagctagaggacccagattcccaagggcctccagttctgtgcttaagagttttgactttatcttgaaagtactggggaggcattgaatggctcctgcaggggaaagtgacatggtcagatttgagttttaggaagatccact

SEQ ID NO: 284525 - DNA, 10849 bp, Homo sapiens
gcggccgagacggcggcggccattttggtgaggcctcgggagcggcagcggcggttcgctgggagtagcgtctgccctttttcccacccaccgtccgcatctgtgtgctgcgcgaagaggcagtggaggcaaggcggtggcagtagccgcagtctccaggggagtttaaaggccgcgaaggcggtggccaagagggggccctcccccctcctaggcgggagggggggtggtgcgcacgcccccgaggacgcaggtgtgattcccttcagtacggcggcaccgtggaagtgcagactttcacagggggtgtggtctcagctcacacaggtgctccagaggctggtggacctgagcggaggctgggacgccctggtgggccccgggccctggaaggcgggtcccggtggccggtggcccagaatgaggccagctcccagcatgccctgcagccggacgccagcccctcggccagcagtactggtgataacaacccagtcattcttcaggcatccaagggggagcctgggagtgggaccatgcagagcagcccctcccctgctcaccctcagctcccagtcctacagacacagatggtgtcggacggcatgacaggcagcaatcctgtgtcccctgcctcatccagttccccagcctctagtggggcaggcggcatctccccgcagcacatagctcaagattcctcactggatggacctccaggccccccagatggtgccacagtgcccctggaggggttcagcttatcccaggctgctgacctggctaacaagggcccgaagtgggagaagagccatgccgaaattgcagaacaggccaagcatgaggccgagatcgagactcggattgctgagctgcggaaggagggtttctggtcactgaagaggctgcctaaggtgccagagccccctcgccccaaaggtcactgggactatttgtgcgaagagatgcagtggctctctgctgactttgctcaggagcgccgttggaaacggggtgtggcccggaaggtggtgcgcatggtgatccggcaccacgaggagcagcggcagaaagaggaacgggcccggagggaggagcaggccaagctgcgtcgaattgcttccaccatggccaaggatgtcaggcagttctggagcaatgtggagaaggtggtgcaattcaagcaacagtcccggcttgaggaaaagcgcaaaaaagccctggacctgcatttggacttcattgtggggcaaactgaaaagtactcggaccttctgtctcagagcctcaaccagccattaacctccagcaaagcaggctcttccccttgcctcggctcttcctcagctgcctccagtcctccaccccctgcttctcgcctggatgatgaagatggggactttcaaccccaagaggatgaggaagaggatgatgaggaaacgattgaagttgaagaacaacaggaaggcaatgatgcagaggcccagaggcgtgagattgagctgcttcgccgtgagggagaattgccactggaagagctgctccgttcccttccccctcagctgttggaagggccttccagcccctctcaaaccccctcatctcatgatagtgacacccgagatgggcctgaagaaggtgctgaagaagagccccctcaggtgttggagataaagcccccaccctctgctgtcacacagcgcaacaaacagccttggcatccagatgaagatgatgaagagtttactgccaacgaagaggaagcggaggatgaagaggatactatagcagctgaggaacagttggaaggggaggtggatcatgccatggagctgagcgagttggctcgagaaggtgagctttccatggaggagctattgcagcagtatgcaggagcctatgccccaggctctgggagcagtgaagatgaggatgaagatgaggttgatgctaatagctctgactgtgaaccagaggggcccgtggaagcggaagagcctcctcaggaggatagtagcagtcagtcagactctgtggaggaccggagtgaggatgaggaagatgaacattcagaggaggaagaaacaagtggaagttcagcatcagaggaatctgagtctgaagagtctgaggatgcccaatcacagagccaagcagatgaagaggaggaagatgatgattttggggtggagtacttgcttgccagggatgaagagcagagtgaggcagatgcaggcagtgggcctcctactccagggcccactactctaggtccaaagaaagaaattactgacattgctgcagcagctgaaagtctccagcccaagggttacacgctggccacgacccaggtaaagacgcccattcccctgcttctgcggggccagctccgggagtaccagcacattgggctagactggctggttaccatgtatgagaagaagcttaatggcattcttgctgatgagatggggcttgggaagaccatccagaccatctctctgcttgcccacttggcttgtgagaaaggtaactggggtccccatttaatcattgttcccaccagcgtgatgttgaactgggagatggagttgaaacgttggtgccccagctttaaaatcctcacttactatggagcccagaaagagaggaagctcaagcggcagggctggaccaagcccaatgcctttcatgtgtgtatcacatcttacaagctggtgctgcaggaccaccaggccttccgtcgcaagaactggcgctatctcattctggatgaggcgcagaacatcaagaacttcaagtcacagcgctggcagtcactcctcaacttcaacagccagagacgcctgctcctgacaggaactcccttgcagaacagcctcatggagctgtggtccttgatgcactttttgatgccccatgtcttccagtctcatcgcgagttcaaggagtggttctctaatcccctaactggcatgattgagggcagccaagagtataatgaaggtctagtcaaacgcctccacaaggttttgaggccttttttactgcgccgagttaaggtggatgttgagaagcagatgcccaaaaagtacgagcatgttatccgctgcaggctctccaagcgtcaacgctgtctctatgatgacttcatggcacagaccacaactaaggagacactagccacaggccatttcatgagcgtcatcaacattttgatgcagctgagaaaagtttgcaatcatccaaatctgttcgaccctcgaccggttacctcccctttcatcaccccaggcatctgcttcagcaccgcctctctggtgctaagggccacggatgtccatcccctccagcggatagacatgggtcgatttgaccttattggcctggaaggtcgtgtctctcgatatgaggcagacacatttctgccccggcaccgcctctctcgccgggtactgttagaagtggctactgctcctgaccccccaccccggcccaagccagtcaagatgaaggtcaacaggatgctgcagccagtacctaagcaagaaggccggacagtggtggtggtgaacaacccacgggcgcccctgggccctgtcccagttcgacctcctccaggtcctgagctctcagcccagcccacccctggcccagtcccccaagtgctgccagcatcactgatggtttcagcctcacctgccgggcccccgcttattcctgcatctcggcctcctggccctgtcctcttgcctccactgcagcccaacagtggttctctcccccaggtgttgccatcccccctgggggtcctgagtgggacctcacggcctcccacgccaaccttgtccctaaagccaacaccacctgccccagttcgcctgagcccagccccacctccaggctcctctagcctgttgaagcccctgacagtgccaccaggctacaccttccctcctgctgctgccaccaccacttctaccaccacggcaactgctaccaccacagcagtgccagctccgactcctgcaccacagcgcctcattctatctcccgatatgcaggctcgcctgccctcaggcgaagtggtcagcatcgggcagttagcctcactggcacaacgtccagtggctaatgcagggggaagcaaacctctcaccttccaaatccagggcaacaagctgactttgactggtgcccaggtgcgccagcttgctgtggggcagccccgcccgctgcaaatgccaccaaccatggtgaataatacaggcgtggtgaagattgtagtgagacaagcccctcgggatggactgactcctgttcctccattggccccagcaccccggcctccgagctctgggcttccagctgtgttgaatccacgccccacgttaacccctggccggctacccacacctactctgggtactgctcgagcccccatgcccacacccactctggtgaggcctcttctcaagctggtccacagtccttcacctgaagtcagtgcttcagcccccggagctgcccccttgaccatctcttctcctctccacgtgccatcctcactccctgggccagcctcttctccaatgccaattcccaactcctctccccttgctagtcctgtgtcctctacagtctcagttccattgtcatcttcactccccatctctgtccccaccacacttcctgccccagcctcggctccactcaccatccccatctcagcccccttgactgtttctgcttcgggcccagctctgttgaccagtgtgactccaccattggcacctgttgtcccagcggctcctggacctccctccttggcaccatctggtgcttccccgtcagcatcagccttgactctaggtttggccacagctccatccctgtcttcatctcagacacctggtcaccctctgttgttggctcccacctcttcacatgttccagggttgaactcaaccgtggccccagcatgctcacctgtcctggtgccagcttcggctctggccagtccttttccgtcagcaccaaatccagctccagctcaggcttcccttctggctccagcatcttctgcatctcaggctctagccacccctctggctcctatggcggctccacagacagcaattctggctccttctccagctcctcctctggctcctcttccggtcctggcaccatcgccaggtgctgctcctgtcctggcttcatcacagactccggttccagttatggctccatcgtctactccaggaacctctttagcctcagcttcaccggtaccagctccaacccctgtgttggctccatcatcaactcaaactatgctaccagccccggttccgtcacctctcccgagcccggcttctacgcagacactggccctagccccagctttagcacccactcttggaggctcatctccatctcagacactctctttgggaacggggaacccccagggaccctttccaactcagacattgtcattaactccagcatcatccctggtaccaactccagcccagacactgtctttggcaccaggaccaccactgggtccaactcagacgctgtctctggctccagcaccccctctggctccagcttctccagtgggcccagccccagctcacacgctgactttggctccagcatcgtcatctgcttcactcctggccccagcttcagtgcagacactgaccttgagccctgccccagttcctaccctgggcccggccgcagctcagaccttggcgctggccccagcctccacacagtccccagcttcccaggcatcttcccttgtggtttcggcatctggtgccgctcccttgcctgtcaccatggtatcccggctgcctgtttccaaggatgagcctgacacactgacattgcgctctggtccccccagccctccctccactgctacctcgtttggtggcccccggcctcgacgccagccccccccaccacctcgttcccctttttatctggactccctggaggaaaagcggaagcggcagcggtctgaacgcctggaacggattttccaacttagtgaggctcatggggccctggcacctgtgtatgggactgaagtcctggatttctgtaccctgccccaacctgttgccagccccatcggccctcgttctcctggccccagccaccccaccttttggacttataccgaggctgcccaccgggctgtactgtttccccagcagcgactagaccagctgtcagaaatcattgagaggttcatctttgtcatgcctcctgtggaggcacctcccccttccctgcatgcctgccacccacctccttggctggccccacgtcaggcagccttccaggagcaattggcctctgagctctggccccgggctcgtcctttgcaccgtattgtgtgtaacatgcgcacccagttccctgacttaagactcatccagtatgattgcggaaagttgcagacgttggcagtgctgttgcggcagctcaaggcagagggccaccgagtgctcatcttcacccagatgacccgaatgctggatgtattggagcagtttctcacctaccatggccatctctacctgcgcctggatggatctactagagttgaacagagacaggccttgatggaacggttcaatgcagacaaacgcatattctgcttcatcctttcaactcggagtgggggtgtgggcgtgaacctgacaggagcagacactgttgttttttatgacagcgactggaatcccaccatggatgctcaggcccaggaccgctgtcaccgaattggccagacccgggatgtccacatatataggcttatcagtgaacggacagtggaggagaacatcctaaaaaaggcaaatcagaagagaatgttgggggacatggccattgagggaggcaacttcaccacagcctatttcaaacagcagaccatccgagagctgtttgatatgcccctggaggaaccttctagctcatccgtgccctctgcccctgaagaggaggaagagactgtggccagcaagcagactcatattctggagcaggcattgtgtcgggcagaagatgaagaggatatccgtgcagccacccaggccaaggctgaacaggtggctgagcttgcagaatttaatgagaacgatgggtttcctgctggtgagggagaggaagctggccggcctggggctgaggatgaggagatgtcccgggctgagcaggaaattgctgccctcgtagaacagctgacccccattgagcgctatgccatgaaattcctggaggcctcactggaggaggtgagccgagaggagctcaaacaggcagaagagcaagtggaagctgcccgcaaagacctggaccaagccaaggaggaggtgttccgcctaccccaagaggaggaggaggggccgggggctggggatgagagttcctgtgggactggtggaggcacccaccggcgcagtaaaaaggccaaagcccctgagaggccggggactcgtgtcagtgagcgtcttcgtggagcccgggctgagactcaaggggcaaaccacactcctgtcatatccgcccatcaaactcgcagcaccaccacaccaccccgctgcagtcctgccagggagcgagttcccaggccagcacctaggcctcgacccactccagcttcagctccggctgcaattcctgcccttgttcctgtcccagtttctgccccagtacccatttcagccccaaatccaataaccattctccctgtccatatcttgccttctcctccccctccttcacagattcctccttgttcttctcctgcctgcacccctcctcctgcctgtacccctccaccagctcatacaccgcctccagcccaaacctgtcttgtaactccttcctctcctctcttgcttggtccaccttctgtgcccatctctgcctcagtcactaatctccccttgggcttgaggcctgaggcagagctgtgtgcccaggcattggcatctccagagtccctggagctggcttctgtggccagttcagaaacctcctcactttctcttgtgccccctaaagatctgttgccagttgctgtggagatcctgcctgtgtcagagaagaacctttctctcaccccttctgcacccagcctgaccttggaggctggcagcatccccaatggtcaagagcaggaggcaccagattctgctgaggggaccacccttacagtgctgcctgaaggtgaggagttgcccctgtgtgtgagtgagagcaatggcctggagctcccaccctcagcagcatctgatgagccacttcaggagccactggaggctgacaggacctcggaagagctgacagaggccaagaccccaacctccagcccagagaagccacaggaactcgttacagctgaggttgcagctccatccacctcatcttcagccacttcctcgcctgagggtccttcacctgcccgacctcctcggcgtcgcaccagtgctgatgtggaaattaggggtcaagggactggtcggccaggacaaccaccaggccccaaagtgcttcgaaagctgccaggacggctggtaactgtggtagaggaaaaggaactggtgcggcggcggcggcagcagcggggagctgccagcaccctagtgcctggggtctctgagactagtgccagcccgggaagcccgtctgtccgcagcatgtcagggccagaatcctcccctcccattggtgggccctgtgaagctgctccttcatcctcactgcccactccaccccagcagcccttcattgctcgccgtcacattgagctgggggtgactggtggtggcagccccgagaatggagacggagcactgctcgccatcaccccacctgctgtgaaacgtcggagggggaggccccccaagaagaacaggtctccagcagatgctgggagaggtgtggatgaggcaccctcatccaccttgaagggaaaaaccaatggggctgacccagtccctgggcctgagaccctaattgttgcagatcctgtcctggaaccacagcttattcctgggccccagcctcttggaccccagccagttcacagacccaatcccctcctgtcacctgtggagaaaagaaggcgaggacgaccccctaaagcacgagatttgcccatccctgggaccatttcctctgcaggggatggcaactccgaaagtcggacacagccacccccacacccatcacccctaaccccactcccaccactgctagtttgtcccactgctactgttgccaacactgtcaccactgtcaccatttcaacgtccccacccaaacggaagaggggccgacctcccaagaatcctccatcacctcggcccagccagctccccgtcttggaccgtgacagcacttctgttctcgagagctgtggattggggaggcgacggcaaccccagggccaaggggagagtgagggtagttcctctgatgaggatggaagccgccccctcacccgcctggcccgccttcggcttgaagcagaaggaatgcgaggacggaagagtggagggtccatggtggtggctgtaattcaggatgacctggacttagcagatagcgggccaggcgggttggaattgacaccacctgtggtctcactaaccccaaaactgcgctcgacccggctgcgtccagggtctctagtccccccactagagactgagaagttgcctcgcaaacgagcaggggccccagttggtgggagtcctgggctggcaaagcggggccgcctacagcccccaagtcccctggggcctgagggttcagtagaggagtctgaggctgaagcctcaggtgaggaggaggaaggggatgggaccccacgccgacgtcctggcccccgccggcttgttgggaccaccaaccaaggggaccagcgcatcctgcgcagcagcgcccctccctccctggctggccctgctgttagtcacagaggccgcaaggccaagacgtgagtgggctgcccctccacctaggctttccaccgtggccactccctccatgaccaggcctgactctgttaaccactacttgaagtcttgagggggaaagcctccagggagacataggggccttctcccttcttcccaccaaagtagggggtaggcaactggttgtcatggaaatggggatcatcacagtccccttccccttcaccccacgtggctgggcagtgttaagggtggcaagatagtctctgtccccacccccttgtacttgattccccagctgtctttcacacagccccccacccttaggggaagggggaggggcttctctacaatgaggtttttttcttttttttttttttttaagaagaaaaaataataaacttagtttctgtatgagcatccgcgtaaggaggcttctgattttctggtctggtggagggttgggtgggaacttgggcatcgtttttctcctccctcttgttcttgcaaagatcctagcacctgatctctagcccaggactatatgttccaggcagaaatctacccaagaagagggaagattggtgaatttgatgtggtagggtgcctttccccagtcagtttgaagtcacagatatccttttcctctcatttcttttccctcggttcctagacgttcctcggagctctttgatgcctcagacctttcccttttatccctcttgctcaggtgcttcctttcacaactttttccagagggcaggcgtcctagctccagttgctccatccgtggccctatcgagggtaccagctcgagtcgtaatatgtaa

SEQ ID NO: 284526 - DNA, 10533 bp, Homo sapiens
gcggccgagacggcggcggccattttggtgaggcctcgggagcggcagcggcggttcgctgggagtagcgtctgccctttttcccacccaccgtccgcatctgtgtgctgcgcgaagaggcagtggaggcaaggcggtggcagtagccgcagtctccaggggagtttaaaggccgcgaaggcggtggccaagagggggccctcccccctcctaggcgggagggggggtggtgcgcacgcccccgaggacgcaggtgtgattcccttcagtacggcggcaccgtggaagtgcagactttcacagggggtgtggtctcagctcacacaggtgctccagaggctggtggacctgagcggaggctgggacgccctggtgggccccgggccctggaaggcgggtcccggtggccggtggcccagaatgaggccagctcccagcatgccctgcagccggacgccagcccctcggccagcagtactggtgataacaacccagtcattcttcaggcatccaagggggagcctgggagtgggaccatgcagagcagcccctcccctgctcaccctcagctcccagtcctacagacacagatggtgtcggacggcatgacaggcagcaatcctgtgtcccctgcctcatccagttccccagcctctagtggggcaggcggcatctccccgcagcacatagctcaagattcctcactggatggacctccaggccccccagatggtgccacagtgcccctggaggggttcagcttatcccaggctgctgacctggctaacaagggcccgaagtgggagaagagccatgccgaaattgcagaacaggccaagcatgaggccgagatcgagactcggattgctgagctgcggaaggagggtttctggtcactgaagaggctgcctaaggtgccagagccccctcgccccaaaggtcactgggactatttgtgcgaagagatgcagtggctctctgctgactttgctcaggagcgccgttggaaacggggtgtggcccggaaggtggtgcgcatggtgatccggcaccacgaggagcagcggcagaaagaggaacgggcccggagggaggagcaggccaagctgcgtcgaattgcttccaccatggccaaggatgtcaggcagttctggagcaatgtggagaaggtggtgcaattcaagcaacagtcccggcttgaggaaaagcgcaaaaaagccctggacctgcatttggacttcattgtggggcaaactgaaaagtactcggaccttctgtctcagagcctcaaccagccattaacctccagcaaagcaggctcttccccttgcctcggctcttcctcagctgcctccagtcctccaccccctgcttctcgcctggatgatgaagatggggactttcaaccccaagaggatgaggaagaggatgatgaggaaacgattgaagttgaagaacaacaggaaggcaatgatgcagaggcccagaggcgtgagattgagctgcttcgccgtgagggagaattgccactggaagagctgctccgttcccttccccctcagctgttggaagggccttccagcccctctcaaaccccctcatctcatgatagtgacacccgagatgggcctgaagaaggtgctgaagaagagccccctcaggtgttggagataaagcccccaccctctgctgtcacacagcgcaacaaacagccttggcatccagatgaagatgatgaagagtttactgccaacgaagaggaagcggaggatgaagaggatactatagcagctgaggaacagttggaaggggaggtggatcatgccatggagctgagcgagttggctcgagaaggtgagctttccatggaggagctattgcagcagtatgcaggagcctatgccccaggctctgggagcagtgaagatgaggatgaagatgaggttgatgctaatagctctgactgtgaaccagaggggcccgtggaagcggaagagcctcctcaggaggatagtagcagtcagtcagactctgtggaggaccggagtgaggatgaggaagatgaacattcagaggaggaagaaacaagtggaagttcagcatcagaggaatctgagtctgaagagtctgaggatgcccaatcacagagccaagcagatgaagaggaggaagatgatgattttggggtggagtacttgcttgccagggatgaagagcagagtgaggcagatgcaggcagtgggcctcctactccagggcccactactctaggtccaaagaaagaaattactgacattgctgcagcagctgaaagtctccagcccaagggttacacgctggccacgacccaggtaaagacgcccattcccctgcttctgcggggccagctccgggagtaccagcacattgggctagactggctggttaccatgtatgagaagaagcttaatggcattcttgctgatgagatggggcttgggaagaccatccagaccatctctctgcttgcccacttggcttgtgagaaaggtaactggggtccccatttaatcattgttcccaccagcgtgatgttgaactgggagatggagttgaaacgttggtgccccagctttaaaatcctcacttactatggagcccagaaagagaggaagctcaagcggcagggctggaccaagcccaatgcctttcatgtgtgtatcacatcttacaagctggtgctgcaggaccaccaggccttccgtcgcaagaactggcgctatctcattctggatgaggcgcagaacatcaagaacttcaagtcacagcgctggcagtcactcctcaacttcaacagccagagacgcctgctcctgacaggaactcccttgcagaacagcctcatggagctgtggtccttgatgcactttttgatgccccatgtcttccagtctcatcgcgagttcaaggagtggttctctaatcccctaactggcatgattgagggcagccaagagtataatgaaggtctagtcaaacgcctccacaaggttttgaggccttttttactgcgccgagttaaggtggatgttgagaagcagatgcccaaaaagtacgagcatgttatccgctgcaggctctccaagcgtcaacgctgtctctatgatgacttcatggcacagaccacaactaaggagacactagccacaggccatttcatgagcgtcatcaacattttgatgcagctgagaaaagtttgcaatcatccaaatctgttcgaccctcgaccggttacctcccctttcatcaccccaggcatctgcttcagcaccgcctctctggtgctaagggccacggatgtccatcccctccagcggatagacatgggtcgatttgaccttattggcctggaaggtcgtgtctctcgatatgaggcagacacatttctgccccggcaccgcctctctcgccgggtactgttagaagtggctactgctcctgaccccccaccccggcccaagccagtcaagatgaaggtcaacaggatgctgcagccagtacctaagcaagaaggccggacagtggtggtggtgaacaacccacgggcgcccctgggccctgtcccagttcgacctcctccaggtcctgagctctcagcccagcccacccctggcccagtcccccaagtgctgccagcatcactgatggtttcagcctcacctgccgggcccccgcttattcctgcatctcggcctcctggccctgtcctcttgcctccactgcagcccaacagtggttctctcccccaggtgttgccatcccccctgggggtcctgagtgggacctcacggcctcccacgccaaccttgtccctaaagccaacaccacctgccccagttcgcctgagcccagccccacctccaggctcctctagcctgttgaagcccctgacagtgccaccaggctacaccttccctcctgctgctgccaccaccacttctaccaccacggcaactgctaccaccacagcagtgccagctccgactcctgcaccacagcgcctcattctatctcccgatatgcaggctcgcctgccctcaggcgaagtggtcagcatcgggcagttagcctcactggcacaacgtccagtggctaatgcagggggaagcaaacctctcaccttccaaatccagggcaacaagctgactttgactggtgcccaggtgcgccagcttgctgtggggcagccccgcccgctgcaaatgccaccaaccatggtgaataatacaggcgtggtgaagattgtagtgagacaagcccctcgggatggactgactcctgttcctccattggccccagcaccccggcctccgagctctgggcttccagctgtgttgaatccacgccccacgttaacccctggccggctacccacacctactctgggtactgctcgagcccccatgcccacacccactctggtgaggcctcttctcaagctggtccacagtccttcacctgaagtcagtgcttcagcccccggagctgcccccttgaccatctcttctcctctccacgtgccatcctcactccctgggccagcctcttctccaatgccaattcccaactcctctccccttgctagtcctgtgtcctctacagtctcagttccattgtcatcttcactccccatctctgtccccaccacacttcctgccccagcctcggctccactcaccatccccatctcagcccccttgactgtttctgcttcgggcccagctctgttgaccagtgtgactccaccattggcacctgttgtcccagcggctcctggacctccctccttggcaccatctggtgcttccccgtcagcatcagccttgactctaggtttggccacagctccatccctgtcttcatctcagacacctggtcaccctctgttgttggctcccacctcttcacatgttccagggttgaactcaaccgtggccccagcatgctcacctgtcctggtgccagcttcggctctggccagtccttttccgtcagcaccaaatccagctccagctcaggcttcccttctggctccagcatcttctgcatctcaggctctagccacccctctggctcctatggcggctccacagacagcaattctggctccttctccagctcctcctctggctcctcttccggtcctggcaccatcgccaggtgctgctcctgtcctggcttcatcacagactccggttccagttatggctccatcgtctactccaggaacctctttagcctcagcttcaccggtaccagctccaacccctgtgttggctccatcatcaactcaaactatgctaccagccccggttccgtcacctctcccgagcccggcttctacgcagacactggccctagccccagctttagcacccactcttggaggctcatctccatctcagacactctctttgggaacggggaacccccagggaccctttccaactcagacattgtcattaactccagcatcatccctggtaccaactccagcccagacactgtctttggcaccaggaccaccactgggtccaactcagacgctgtctctggctccagcaccccctctggctccagcttctccagtgggcccagccccagctcacacgctgactttggctccagcatcgtcatctgcttcactcctggccccagcttcagtgcagacactgaccttgagccctgccccagttcctaccctgggcccggccgcagctcagaccttggcgctggccccagcctccacacagtccccagcttcccaggcatcttcccttgtggtttcggcatctggtgccgctcccttgcctgtcaccatggtatcccggctgcctgtttccaaggatgagcctgacacactgacattgcgctctggtccccccagccctccctccactgctacctcgtttggtggcccccggcctcgacgccagccccccccaccacctcgttcccctttttatctggactccctggaggaaaagcggaagcggcagcggtctgaacgcctggaacggattttccaacttagtgaggctcatggggccctggcacctgtgtatgggactgaagtcctggatttctgtaccctgccccaacctgttgccagccccatcggccctcgttctcctggccccagccaccccaccttttggacttataccgaggctgcccaccgggctgtactgtttccccagcagcgactagaccagctgtcagaaatcattgagaggttcatctttgtcatgcctcctgtggaggcacctcccccttccctgcatgcctgccacccacctccttggctggccccacgtcaggcagccttccaggagcaattggcctctgagctctggccccgggctcgtcctttgcaccgtattgtgtgtaacatgcgcacccagttccctgacttaagactcatccagtatgattgcggaaagttgcagacgttggcagtgctgttgcggcagctcaaggcagagggccaccgagtgctcatcttcacccagatgacccgaatgctggatgtattggagcagtttctcacctaccatggccatctctacctgcgcctggatggatctactagagttgaacagagacaggccttgatggaacggttcaatgcagacaaacgcatattctgcttcatcctttcaactcggagtgggggtgtgggcgtgaacctgacaggagcagacactgttgttttttatgacagcgactggaatcccaccatggatgctcaggcccaggaccgctgtcaccgaattggccagacccgggatgtccacatatataggcttatcagtgaacggacagtggaggagaacatcctaaaaaaggcaaatcagaagagaatgttgggggacatggccattgagggaggcaacttcaccacagcctatttcaaacagcagaccatccgagagctgtttgatatgcccctggaggaaccttctagctcatccgtgccctctgcccctgaagaggaggaagagactgtggccagcaagcagactcatattctggagcaggcattgtgtcgggcagaagatgaagaggatatccgtgcagccacccaggccaaggctgaacaggtggctgagcttgcagaatttaatgagaacgatgggtttcctgctggtgagggagaggaagctggccggcctggggctgaggatgaggagatgtcccgggctgagcaggaaattgctgccctcgtagaacagctgacccccattgagcgctatgccatgaaattcctggaggcctcactggaggaggtgagccgagaggagctcaaacaggcagaagagcaagtggaagctgcccgcaaagacctggaccaagccaaggaggaggtgttccgcctaccccaagaggaggaggaggggccgggggctggggatgagagttcctgtgggactggtggaggcacccaccggcgcagtaaaaaggccaaagcccctgagaggccggggactcgtgtcagtgagcgtcttcgtggagcccgggctgagactcaaggggcaaaccacactcctgtcatatccgcccatcaaactcgcagcaccaccacaccaccccgctgcagtcctgccagggagcgagttcccaggccagcacctaggcctcgacccactccagcttcagctccggctgcaattcctgcccttgttcctgtcccagtttctgccccagtacccatttcagccccaaatccaataaccattctccctgtccatatcttgccttctcctccccctccttcacagattcctccttgttcttctcctgcctgcacccctcctcctgcctgtacccctccaccagctcatacaccgcctccagcccaaacctgtcttgtaactccttcctctcctctcttgcttggtccaccttctgtgcccatctctgcctcagtcactaatctccccttgggcttgaggcctgaggcagagctgtgtgcccaggcattggcatctccagagtccctggagctggcttctgtggccagttcagaaacctcctcactttctcttgtgccccctaaagatctgttgccagttgctgtggagatcctgcctgtgtcagagaagaacctttctctcaccccttctgcacccagcctgaccttggaggctggcagcatccccaatggtcaagagcaggaggcaccagattctgctgaggggaccacccttacagtgctgcctgaaggtgaggagttgcccctgtgtgtgagtgagagcaatggcctggagctcccaccctcagcagcatctgatgagccacttcaggagccactggaggctgacaggacctcggaagagctgacagaggccaagaccccaacctccagcccagagaagccacaggaactcgttacagctgaggttgcagctccatccacctcatcttcagccacttcctcgcctgagggtccttcacctgcccgacctcctcggcgtcgcaccagtgctgatgtggaaattaggggtcaagggactggtcggccaggacaaccaccaggccccaaagtgcttcgaaagctgccaggacggctggtaactgtggtagaggaaaaggaactggtgcggcggcggcggcagcagcggggagctgccagcaccctagtgcctggggtctctgagactagtgccagcccgggaagcccgtctgtccgcagcatgtcagggccagaatcctcccctcccattggtgggccctgtgaagctgctccttcatcctcactgcccactccaccccagcagcccttcattgctcgccgtcacattgagctgggggtgactggtggtggcagccccgagaatggagacggagcactgctcgccatcaccccacctgctgtgaaacgtcggagggggaggccccccaagaagaacaggtctccagcagatgctgggagaggtgtggatgaggcaccctcatccaccttgaagggaaaaaccaatggggctgacccagtccctgggcctgagaccctaattgttgcagatcctgtcctggaaccacagcttattcctgggccccagcctcttggaccccagccagttcacagacccaatcccctcctgtcacctgtggagaaaagaaggcgaggacgaccccctaaagcacgagatttgcccatccctgggaccatttcctctgcaggggatggcaactccgaaagtcggacacagccacccccacacccatcacccctaaccccactcccaccactgctagtttgtcccactgctactgttgccaacactgtcaccactgtcaccatttcaacgtccccacccaaacggaagaggggccgacctcccaagaatcctccatcacctcggcccagccagctccccgtcttggaccgtgacagcacttctgttctcgagagctgtggattggggaggcgacggcaaccccagggccaaggggagagtgagggtagttcctctgatgaggatggaagccgccccctcacccgcctggcccgccttcggcttgaagcagaaggaatgcgaggacggaagagtggagggtccatggtggtggctgtaattcaggatgacctggacttagcagatagcgggccaggcgggttggaattgacaccacctgtggtctcactaaccccaaaactgcgctcgacccggctgcgtccagggtctctagtccccccactagagactgagaagttgcctcgcaaacgagcaggggccccagttggtgggagtcctgggctggcaaagcggggccgcctacagcccccaagtcccctggggcctgagggttcagtagaggagtctgaggctgaagcctcaggtgaggaggaggaaggggatgggaccccacgccgacgtcctggcccccgccggcttgttgggaccaccaaccaaggggaccagcgcatcctgcgcagcagcgcccctccctccctggctggccctgctgttagtcacagaggccgcaaggccaagacgtgagtgggctgcccctccacctaggctttccaccgtggccactccctccatgaccaggcctgactctgttaaccactacttgaagtcttgagggggaaagcctccagggagacataggggccttctcccttcttcccaccaaagtagggggtaggcaactggttgtcatggaaatggggatcatcacagtccccttccccttcaccccacgtggctgggcagtgttaagggtggcaagatagtctctgtccccacccccttgtacttgattccccagctgtctttcacacagccccccacccttaggggaagggggaggggcttctctacaatgaggaacatttctttggtttgtattattaactgtacatacgttgaatctaaataatgctttgagctggaaacccattgctgtgatgtggcttgcctgaggtcccattatcaatgacagtgacgagtgtgtccaatccagtaggtgtgtatgttcataaat

SEQ ID NO: 284527 - DNA, 11581 bp, Homo sapiens
gcggccgagacggcggcggccattttggtgaggcctcgggagcggcagcggcggttcgctgggagtagcgtctgccctttttcccacccaccgtccgcatctgtgtgctgcgcgaagaggcagtggaggcaaggcggtggcagtagccgcagtctccaggggagtttaaaggccgcgaaggcggtggccaagagggggccctcccccctcctaggcgggagggggggtggtgcgcacgcccccgaggacgcaggtgtgattcccttcagtacggcggcaccgtggaagtgcagactttcacagggggtgtggtctcagctcacacaggtgctccagaggctggtggacctgagcggaggctgggacgccctggtgggccccgggccctggaaggcgggtcccggtggccggtggcccagaatgaggccagctcccagcatgccctgcagccggacgccagcccctcggccagcagtactggtgataacaacccagtcattcttcaggcatccaagggggagcctgggagtgggaccatgcagagcagcccctcccctgctcaccctcagctcccagtcctacagacacagatggtgtcggacggcatgacaggcagcaatcctgtgtcccctgcctcatccagttccccagcctctagtggggcaggcggcatctccccgcagcacatagctcaagattcctcactggatggacctccaggccccccagatggtgccacagtgcccctggaggggttcagcttatcccaggctgctgacctggctaacaagggcccgaagtgggagaagagccatgccgaaattgcagaacaggccaagcatgaggccgagatcgagactcggattgctgagctgcggaaggagggtttctggtcactgaagaggctgcctaaggtgccagagccccctcgccccaaaggtcactgggactatttgtgcgaagagatgcagtggctctctgctgactttgctcaggagcgccgttggaaacggggtgtggcccggaaggtggtgcgcatggtgatccggcaccacgaggagcagcggcagaaagaggaacgggcccggagggaggagcaggccaagctgcgtcgaattgcttccaccatggccaaggatgtcaggcagttctggagcaatgtggagaaggtggtgcaattcaagcaacagtcccggcttgaggaaaagcgcaaaaaagccctggacctgcatttggacttcattgtggggcaaactgaaaagtactcggaccttctgtctcagagcctcaaccagccattaacctccagcaaagcaggctcttccccttgcctcggctcttcctcagctgcctccagtcctccaccccctgcttctcgcctggatgatgaagatggggactttcaaccccaagaggatgaggaagaggatgatgaggaaacgattgaagttgaagaacaacaggaaggcaatgatgcagaggcccagaggcgtgagattgagctgcttcgccgtgagggagaattgccactggaagagctgctccgttcccttccccctcagctgttggaagggccttccagcccctctcaaaccccctcatctcatgatagtgacacccgagatgggcctgaagaaggtgctgaagaagagccccctcaggtgttggagataaagcccccaccctctgctgtcacacagcgcaacaaacagccttggcatccagatgaagatgatgaagagtttactgccaacgaagaggaagcggaggatgaagaggatactatagcagctgaggaacagttggaaggggaggtggatcatgccatggagctgagcgagttggctcgagaaggtgagctttccatggaggagctattgcagcagtatgcaggagcctatgccccaggctctgggagcagtgaagatgaggatgaagatgaggttgatgctaatagctctgactgtgaaccagaggggcccgtggaagcggaagagcctcctcaggaggatagtagcagtcagtcagactctgtggaggaccggagtgaggatgaggaagatgaacattcagaggaggaagaaacaagtggaagttcagcatcagaggaatctgagtctgaagagtctgaggatgcccaatcacagagccaagcagatgaagaggaggaagatgatgattttggggtggagtacttgcttgccagggatgaagagcagagtgaggcagatgcaggcagtgggcctcctactccagggcccactactctaggtccaaagaaagaaattactgacattgctgcagcagctgaaagtctccagcccaagggttacacgctggccacgacccaggtaaagacgcccattcccctgcttctgcggggccagctccgggagtaccagcacattgggctagactggctggttaccatgtatgagaagaagcttaatggcattcttgctgatgagatggggcttgggaagaccatccagaccatctctctgcttgcccacttggcttgtgagaaaggtaactggggtccccatttaatcattgttcccaccagcgtgatgttgaactgggagatggagttgaaacgttggtgccccagctttaaaatcctcacttactatggagcccagaaagagaggaagctcaagcggcagggctggaccaagcccaatgcctttcatgtgtgtatcacatcttacaagctggtgctgcaggaccaccaggccttccgtcgcaagaactggcgctatctcattctggatgaggcgcagaacatcaagaacttcaagtcacagcgctggcagtcactcctcaacttcaacagccagagacgcctgctcctgacaggaactcccttgcagaacagcctcatggagctgtggtccttgatgcactttttgatgccccatgtcttccagtctcatcgcgagttcaaggagtggttctctaatcccctaactggcatgattgagggcagccaagagtataatgaaggtctagtcaaacgcctccacaaggttttgaggccttttttactgcgccgagttaaggtggatgttgagaagcagatgcccaaaaagtacgagcatgttatccgctgcaggctctccaagcgtcaacgctgtctctatgatgacttcatggcacagaccacaactaaggagacactagccacaggccatttcatgagcgtcatcaacattttgatgcagctgagaaaagtttgcaatcatccaaatctgttcgaccctcgaccggttacctcccctttcatcaccccaggcatctgcttcagcaccgcctctctggtgctaagggccacggatgtccatcccctccagcggatagacatgggtcgatttgaccttattggcctggaaggtcgtgtctctcgatatgaggcagacacatttctgccccggcaccgcctctctcgccgggtactgttagaagtggctactgctcctgaccccccaccccggcccaagccagtcaagatgaaggtcaacaggatgctgcagccagtacctaagcaagaaggccggacagtggtggtggtgaacaacccacgggcgcccctgggccctgtcccagttcgacctcctccaggtcctgagctctcagcccagcccacccctggcccagtcccccaagtgctgccagcatcactgatggtttcagcctcacctgccgggcccccgcttattcctgcatctcggcctcctggccctgtcctcttgcctccactgcagcccaacagtggttctctcccccaggtgttgccatcccccctgggggtcctgagtgggacctcacggcctcccacgccaaccttgtccctaaagccaacaccacctgccccagttcgcctgagcccagccccacctccaggctcctctagcctgttgaagcccctgacagtgccaccaggctacaccttccctcctgctgctgccaccaccacttctaccaccacggcaactgctaccaccacagcagtgccagctccgactcctgcaccacagcgcctcattctatctcccgatatgcaggctcgcctgccctcaggcgaagtggtcagcatcgggcagttagcctcactggcacaacgtccagtggctaatgcagggggaagcaaacctctcaccttccaaatccagggcaacaagctgactttgactggtgcccaggtgcgccagcttgctgtggggcagccccgcccgctgcaaatgccaccaaccatggtgaataatacaggcgtggtgaagattgtagtgagacaagcccctcgggatggactgactcctgttcctccattggccccagcaccccggcctccgagctctgggcttccagctgtgttgaatccacgccccacgttaacccctggccggctacccacacctactctgggtactgctcgagcccccatgcccacacccactctggtgaggcctcttctcaagctggtccacagtccttcacctgaagtcagtgcttcagcccccggagctgcccccttgaccatctcttctcctctccacgtgccatcctcactccctgggccagcctcttctccaatgccaattcccaactcctctccccttgctagtcctgtgtcctctacagtctcagttccattgtcatcttcactccccatctctgtccccaccacacttcctgccccagcctcggctccactcaccatccccatctcagcccccttgactgtttctgcttcgggcccagctctgttgaccagtgtgactccaccattggcacctgttgtcccagcggctcctggacctccctccttggcaccatctggtgcttccccgtcagcatcagccttgactctaggtttggccacagctccatccctgtcttcatctcagacacctggtcaccctctgttgttggctcccacctcttcacatgttccagggttgaactcaaccgtggccccagcatgctcacctgtcctggtgccagcttcggctctggccagtccttttccgtcagcaccaaatccactcctcctctggctcctcttccggtcctggcaccatcgccaggtgctgctcctgtcctggcttcatcacagactccggttccagttatggctccatcgtctactccaggaacctctttagcctcagcttcaccggtaccagctccaacccctgtgttggctccatcatcaactcaaactatgctaccagccccggttccgtcacctctcccgagcccggcttctacgcagacactggccctagccccagctttagcacccactcttggaggctcatctccatctcagacactctctttgggaacggggaacccccagggaccctttccaactcagacattgtcattaactccagcatcatccctggtaccaactccagcccagacactgtctttggcaccaggaccaccactgggtccaactcagacgctgtctctggctccagcaccccctctggctccagcttctccagtgggcccagccccagctcacacgctgactttggctccagcatcgtcatctgcttcactcctggccccagcttcagtgcagacactgaccttgagccctgccccagttcctaccctgggcccggccgcagctcagaccttggcgctggccccagcctccacacagtccccagcttcccaggcatcttcccttgtggtttcggcatctggtgccgctcccttgcctgtcaccatggtatcccggctgcctgtttccaaggatgagcctgacacactgacattgcgctctggtccccccagccctccctccactgctacctcgtttggtggcccccggcctcgacgccagccccccccaccacctcgttcccctttttatctggactccctggaggaaaagcggaagcggcagcggtctgaacgcctggaacggattttccaacttagtgaggctcatggggccctggcacctgtgtatgggactgaagtcctggatttctgtaccctgccccaacctgttgccagccccatcggccctcgttctcctggccccagccaccccaccttttggacttataccgaggctgcccaccgggctgtactgtttccccagcagcgactagaccagctgtcagaaatcattgagaggttcatctttgtcatgcctcctgtggaggcacctcccccttccctgcatgcctgccacccacctccttggctggccccacgtcaggcagccttccaggagcaattggcctctgagctctggccccgggctcgtcctttgcaccgtattgtgtgtaacatgcgcacccagttccctgacttaagactcatccagtatgattgcggaaagttgcagacgttggcagtgctgttgcggcagctcaaggcagagggccaccgagtgctcatcttcacccagatgacccgaatgctggatgtattggagcagtttctcacctaccatggccatctctacctgcgcctggatggatctactagagttgaacagagacaggccttgatggaacggttcaatgcagacaaacgcatattctgcttcatcctttcaactcggagtgggggtgtgggcgtgaacctgacaggagcagacactgttgttttttatgacagcgactggaatcccaccatggatgctcaggcccaggaccgctgtcaccgaattggccagacccgggatgtccacatatataggcttatcagtgaacggacagtggaggagaacatcctaaaaaaggcaaatcagaagagaatgttgggggacatggccattgagggaggcaacttcaccacagcctatttcaaacagcagaccatccgagagctgtttgatatgcccctggaggaaccttctagctcatccgtgccctctgcccctgaagaggaggaagagactgtggccagcaagcagactcatattctggagcaggcattgtgtcgggcagaagatgaagaggatatccgtgcagccacccaggccaaggctgaacaggtggctgagcttgcagaatttaatgagaacgatgggtttcctgctggtgagggagaggaagctggccggcctggggctgaggatgaggagatgtcccgggctgagcaggaaattgctgccctcgtagaacagctgacccccattgagcgctatgccatgaaattcctggaggcctcactggaggaggtgagccgagaggagctcaaacaggcagaagagcaagtggaagctgcccgcaaagacctggaccaagccaaggaggaggtgttccgcctaccccaagaggaggaggaggggccgggggctggggatgagagttcctgtgggactggtggaggcacccaccggcgcagtaaaaaggccaaagcccctgagaggccggggactcgtgtcagtgagcgtcttcgtggagcccgggctgagactcaaggggcaaaccacactcctgtcatatccgcccatcaaactcgcagcaccaccacaccaccccgctgcagtcctgccagggagcgagttcccaggccagcacctaggcctcgacccactccagcttcagctccggctgcaattcctgcccttgttcctgtcccagtttctgccccagtacccatttcagccccaaatccaataaccattctccctgtccatatcttgccttctcctccccctccttcacagattcctccttgttcttctcctgcctgcacccctcctcctgcctgtacccctccaccagctcatacaccgcctccagcccaaacctgtcttgtaactccttcctctcctctcttgcttggtccaccttctgtgcccatctctgcctcagtcactaatctccccttgggcttgaggcctgaggcagagctgtgtgcccaggcattggcatctccagagtccctggagctggcttctgtggccagttcagaaacctcctcactttctcttgtgccccctaaagatctgttgccagttgctgtggagatcctgcctgtgtcagagaagaacctttctctcaccccttctgcacccagcctgaccttggaggctggcagcatccccaatggtcaagagcaggaggcaccagattctgctgaggggaccacccttacagtgctgcctgaaggtgaggagttgcccctgtgtgtgagtgagagcaatggcctggagctcccaccctcagcagcatctgatgagccacttcaggagccactggaggctgacaggacctcggaagagctgacagaggccaagaccccaacctccagcccagagaagccacaggaactcgttacagctgaggttgcagctccatccacctcatcttcagccacttcctcgcctgagggtccttcacctgcccgacctcctcggcgtcgcaccagtgctgatgtggaaattaggggtcaagggactggtcggccaggacaaccaccaggccccaaagtgcttcgaaagctgccaggacggctggtaactgtggtagaggaaaaggaactggtgcggcggcggcggcagcagcggggagctgccagcaccctagtgcctggggtctctgagactagtgccagcccgggaagcccgtctgtccgcagcatgtcagggccagaatcctcccctcccattggtgggccctgtgaagctgctccttcatcctcactgcccactccaccccagcagcccttcattgctcgccgtcacattgagctgggggtgactggtggtggcagccccgagaatggagacggagcactgctcgccatcaccccacctgctgtgaaacgtcggagggggaggccccccaagaagaacaggtctccagcagatgctgggagaggtgtggatgaggcaccctcatccaccttgaagggaaaaaccaatggggctgacccagtccctgggcctgagaccctaattgttgcagatcctgtcctggaaccacagcttattcctgggccccagcctcttggaccccagccagttcacagacccaatcccctcctgtcacctgtggagaaaagaaggcgaggacgaccccctaaagcacgagatttgcccatccctgggaccatttcctctgcaggggatggcaactccgaaagtcggacacagccacccccacacccatcacccctaaccccactcccaccactgctagtttgtcccactgctactgttgccaacactgtcaccactgtcaccatttcaacgtccccacccaaacggaagaggggccgacctcccaagaatcctccatcacctcggcccagccagctccccgtcttggaccgtgacagcacttctgttctcgagagctgtggattggggaggcgacggcaaccccagggccaaggggagagtgagggtagttcctctgatgaggatggaagccgccccctcacccgcctggcccgccttcggcttgaagcagaaggaatgcgaggacggaagagtggagggtccatggtggtggctgtaattcaggatgacctggacttagcagatagcgggccaggcgggttggaattgacaccacctgtggtctcactaaccccaaaactgcgctcgacccggctgcgtccagggtctctagtccccccactagagactgagaagttgcctcgcaaacgagcaggggccccagttggtgggagtcctgggctggcaaagcggggccgcctacagcccccaagtcccctggggcctgagggttcagtagaggagtctgaggctgaagcctcaggtgaggaggaggaaggggatgggaccccacgccgacgtcctggcccccgccggcttgttgggaccaccaaccaaggggaccagcgcatcctgcgcagcagcgcccctccctccctggctggccctgctgttagtcacagaggccgcaaggccaagacgtgagtgggctgcccctccacctaggctttccaccgtggccactccctccatgaccaggcctgactctgttaaccactacttgaagtcttgagggggaaagcctccagggagacataggggccttctcccttcttcccaccaaagtagggggtaggcaactggttgtcatggaaatggggatcatcacagtccccttccccttcaccccacgtggctgggcagtgttaagggtggcaagatagtctctgtccccacccccttgtacttgattccccagctgtctttcacacagccccccacccttaggggaagggggaggggcttctctacaatgaggtttttttcttttttttttttttttaagaagaaaaaataataaacttagtttctgtatgagcatccgcgtaaggaggcttctgattttctggtctggtggagggttgggtgggaacttgggcatcgtttttctcctccctcttgttcttgcaaagatcctagcacctgatctctagcccaggactatatgttccaggcagaaatctacccaagaagagggaagattggtgaatttgatgtggtagggtgcctttccccagtcagtttgaagtcacagatatccttttcctctcatttcttttccctcggttcctagacgttcctcggagctctttgatgcctcagacctttcccttttatccctcttgctcaggtgcttcctttcacaactttttccagagggcaggcgtcctagctccagttgctccatcccttgggccctcccctgctcttcatctagccaaactggtttgagtcagccacaccccttcccagctccctgggctcttcacgtggtggctggccactcaaccccacccctgggcttggcttggagccctgagtcagctccatcaccacccaagccaaaccaaagctgaggcaggagccgaaactcagagtccttcaaggcctatagccaggtgatggaggacgaggagaaggcagtggagatcttgggcaacacggaagctgctcatcctccatcccccatccgctgctgctggctccgcctccgctgcttggcagctactagcattatctgtggctgctcttgcctgggagtcatggctctggtgtttgccatcaaggcggaagagcggcataaagcaggccggtccgaggaggcagtgcgctggggggcccgggcccggaaactcatcctggccagctttgctgtctggcttgctgtcctcattctgggtcccctgctgctgtggttgctctcctacgccatcgctcaggctgagtgaccctggatggcctctgctgagagccagccgagacctcctggatcctgcaatgcggcattgctaaggtcctgtgacagcagtggttggaaggatcctggttggaaggatggggactctctcaaggggctttggaagagctcttctagccctttataaaaggagggcagcagctgagactgatgagaggagggcagcctgctctgttctttcagggccccccacccccatctcccctaccctagcccaccctagggcctctacccagcgggaggggttgaagaccaggcctggttttattagaattcattttgtaataaaagccttttttagtggtgaaaaaaaaaaa

SEQ ID NO: 284528 - DNA, 10051 bp, Homo sapiens
  misc_feature (12)..(12): n is a, c, g, or t
  misc_feature (45)..(45): n is a, c, g, or t
  misc_feature (47)..(47): n is a, c, g, or t
agctgcatgccnaggttatctagaggatcccgtctcctcttctgnancccagcccctctcaaaccccctcatctcatgatagtgacacccgagatgggcctgaagaaggtgctgaagaagagccccctcaggtgttggagataaagcccccaccctctgctgtcacacagcgcaacaaacagccttggcatccagatgaagatgatgaagagtttactgccaacgaagaggaagcggaggatgaagaggatactatagcagctgaggaacagttggaaggggaggtggatcatgccatggagctgagcgagttggctcgagaaggtgagctttccatggaggagctattgcagcagtatgcaggagcctatgccccaggctctgggagcagtgaagatgaggatgaagatgaggttgatgctaatagctctgactgtgaaccagaggggcccgtggaagcggaagagcctcctcaggaggatagtagcagtcagtcagactctgtggaggaccggagtgaggatgaggaagatgaacattcagaggaggaagaaacaagtggaagttcagcatcagaggaatctgagtctgaagagtctgaggatgcccaatcacagagccaagcagatgaagaggaggaagatgatgattttggggtggagtacttgcttgccagggatgaagagcagagtgaggcagatgcaggcagtgggcctcctactccagggcccactactctaggtccaaagaaagaaattactgacattgctgcagcagctgaaagtctccagcccaagggttacacgctggccacgacccaggtaaagacgcccattcccctgcttctgcggggccagctccgggagtaccagcacattgggctagactggctggttaccatgtatgagaagaagcttaatggcattcttgctgatgagatggggcttgggaagaccatccagaccatctctctgcttgcccacttggcttgtgagaaaggtaactggggtccccatttaatcattgttcccaccagcgtgatgttgaactgggagatggagttgaaacgttggtgccccagctttaaaatcctcacttactatggagcccagaaagagaggaagctcaagcggcagggctggaccaagcccaatgcctttcatgtgtgtatcacatcttacaagctggtgctgcaggaccaccaggccttccgtcgcaagaactggcgctatctcattctggatgaggcgcagaacatcaagaacttcaagtcacagcgctggcagtcactcctcaacttcaacagccagagacgcctgctcctgacaggaactcccttgcagaacagcctcatggagctgtggtccttgatgcactttttgatgccccatgtcttccagtctcatcgcgagttcaaggagtggttctctaatcccctaactggcatgattgagggcagccaagagtataatgaaggtctagtcaaacgcctccacaaggttttgaggccttttttactgcgccgagttaaggtggatgttgagaagcagatgcccaaaaagtacgagcatgttatccgctgcaggctctccaagcgtcaacgctgtctctatgatgacttcatggcacagaccacaactaaggagacactagccacaggccatttcatgagcgtcatcaacattttgatgcagctgagaaaagtttgcaatcatccaaatctgttcgaccctcgaccggttacctcccctttcatcaccccaggcatctgcttcagcaccgcctctctggtgctaagggccacggatgtccatcccctccagcggatagacatgggtcgatttgaccttattggcctggaaggtcgtgtctctcgatatgaggcagacacatttctgccccggcaccgcctctctcgccgggtactgttagaagtggctactgctcctgaccccccaccccggcccaagccagtcaagatgaaggtcaacaggatgctgcagccagtacctaagcaagaaggccggacagtggtggtggtgaacaacccacgggcgcccctgggccctgtcccagttcgacctcctccaggtcctgagctctcagcccagcccacccctggcccagtcccccaagtgctgccagcatcactgatggtttcagcctcacctgccgggcccccgcttattcctgcatctcggcctcctggccctgtcctcttgcctccactgcagcccaacagtggttctctcccccaggtgttgccatcccccctgggggtcctgagtgggacctcacggcctcccacgccaaccttgtccctaaagccaacaccacctgccccagttcgcctgagcccagccccacctccaggctcctctagcctgttgaagcccctgacagtgccaccaggctacaccttccctcctgctgctgccaccaccacttctaccaccacggcaactgctaccaccacagcagtgccagctccgactcctgcaccacagcgcctcattctatctcccgatatgcaggctcgcctgccctcaggcgaagtggtcagcatcgggcagttagcctcactggcacaacgtccagtggctaatgcagggggaagcaaacctctcaccttccaaatccagggcaacaagctgactttgactggtgcccaggtgcgccagcttgctgtggggcagccccgcccgctgcaaatgccaccaaccatggtgaataatacaggcgtggtgaagattgtagtgagacaagcccctcgggatggactgactcctgttcctccattggccccagcaccccggcctccgagctctgggcttccagctgtgttgaatccacgccccacgttaacccctggccggctacccacacctactctgggtactgctcgagcccccatgcccacacccactctggtgaggcctcttctcaagctggtccacagtccttcacctgaagtcagtgcttcagcccccggagctgcccccttgaccatctcttctcctctccacgtgccatcctcactccctgggccagcctcttctccaatgccaattcccaactcctctccccttgctagtcctgtgtcctctacagtctcagttccattgtcatcttcactccccatctctgtccccaccacacttcctgccccagcctcggctccactcaccatccccatctcagcccccttgactgtttctgcttcgggcccagctctgttgaccagtgtgactccaccattggcacctgttgtcccagcggctcctggacctccctccttggcaccatctggtgcttccccgtcagcatcagccttgactctaggtttggccacagctccatccctgtcttcatctcagacacctggtcaccctctgttgttggctcccacctcttcacatgttccagggttgaactcaaccgtggccccagcatgctcacctgtcctggtgccagcttcggctctggccagtccttttccgtcagcaccaaatccactcctcctctggctcctcttccggtcctggcaccatcgccaggtgctgctcctgtcctggcttcatcacagactccggttccagttatggctccatcgtctactccaggaacctctttagcctcagcttcaccggtaccagctccaacccctgtgttggctccatcatcaactcaaactatgctaccagccccggttccgtcacctctcccgagcccggcttctacgcagacactggccctagccccagctttagcacccactcttggaggctcatctccatctcagacactctctttgggaacggggaacccccagggaccctttccaactcagacattgtcattaactccagcatcatccctggtaccaactccagcccagacactgtctttggcaccaggaccaccactgggtccaactcagacgctgtctctggctccagcaccccctctggctccagcttctccagtgggcccagccccagctcacacgctgactttggctccagcatcgtcatctgcttcactcctggccccagcttcagtgcagacactgaccttgagccctgccccagttcctaccctgggcccggccgcagctcagaccttggcgctggccccagcctccacacagtccccagcttcccaggcatcttcccttgtggtttcggcatctggtgccgctcccttgcctgtcaccatggtatcccggctgcctgtttccaaggatgagcctgacacactgacattgcgctctggtccccccagccctccctccactgctacctcgtttggtggcccccggcctcgacgccagccccccccaccacctcgttcccctttttatctggactccctggaggaaaagcggaagcggcagcggtctgaacgcctggaacggattttccaacttagtgaggctcatggggccctggcacctgtgtatgggactgaagtcctggatttctgtaccctgccccaacctgttgccagccccatcggccctcgttctcctggccccagccaccccaccttttggacttataccgaggctgcccaccgggctgtactgtttccccagcagcgactagaccagctgtcagaaatcattgagaggttcatctttgtcatgcctcctgtggaggcacctcccccttccctgcatgcctgccacccacctccttggctggccccacgtcaggcagccttccaggagcaattggcctctgagctctggccccgggctcgtcctttgcaccgtattgtgtgtaacatgcgcacccagttccctgacttaagactcatccagtatgattgcggaaagttgcagacgttggcagtgctgttgcggcagctcaaggcagagggccaccgagtgctcatcttcacccagatgacccgaatgctggatgtattggagcagtttctcacctaccatggccatctctacctgcgcctggatggatctactagagttgaacagagacaggccttgatggaacggttcaatgcagacaaacgcatattctgcttcatcctttcaactcggagtgggggtgtgggcgtgaacctgacaggagcagacactgttgttttttatgacagcgactggaatcccaccatggatgctcaggcccaggaccgctgtcaccgaattggccagacccgggatgtccacatatataggcttatcagtgaacggacagtggaggagaacatcctaaaaaaggcaaatcagaagagaatgttgggggacatggccattgagggaggcaacttcaccacagcctatttcaaacagcagaccatccgagagctgtttgatatgcccctggaggaaccttctagctcatccgtgccctctgcccctgaagaggaggaagagactgtggccagcaagcagactcatattctggagcaggcattgtgtcgggcagaagatgaagaggatatccgtgcagccacccaggccaaggctgaacaggtggctgagcttgcagaatttaatgagaacgatgggtttcctgctggtgagggagaggaagctggccggcctggggctgaggatgaggagatgtcccgggctgagcaggaaattgctgccctcgtagaacagctgacccccattgagcgctatgccatgaaattcctggaggcctcactggaggaggtgagccgagaggagctcaaacaggcagaagagcaagtggaagctgcccgcaaagacctggaccaagccaaggaggaggtgttccgcctaccccaagaggaggaggaggggccgggggctggggatgagagttcctgtgggactggtggaggcacccaccggcgcagtaaaaaggccaaagcccctgagaggccggggactcgtgtcagtgagcgtcttcgtggagcccgggctgagactcaaggggcaaaccacactcctgtcatatccgcccatcaaactcgcagcaccaccacaccaccccgctgcagtcctgccagggagcgagttcccaggccagcacctaggcctcgacccactccagcttcagctccggctgcaattcctgcccttgttcctgtcccagtttctgccccagtacccatttcagccccaaatccaataaccattctccctgtccatatcttgccttctcctccccctccttcacagattcctccttgttcttctcctgcctgcacccctcctcctgcctgtacccctccaccagctcatacaccgcctccagcccaaacctgtcttgtaactccttcctctcctctcttgcttggtccaccttctgtgcccatctctgcctcagtcactaatctccccttgggcttgaggcctgaggcagagctgtgtgcccaggcattggcatctccagagtccctggagctggcttctgtggccagttcagaaacctcctcactttctcttgtgccccctaaagatctgttgccagttgctgtggagatcctgcctgtgtcagagaagaacctttctctcaccccttctgcacccagcctgaccttggaggctggcagcatccccaatggtcaagagcaggaggcaccagattctgctgaggggaccacccttacagtgctgcctgaaggtgaggagttgcccctgtgtgtgagtgagagcaatggcctggagctcccaccctcagcagcatctgatgagccacttcaggagccactggaggctgacaggacctcggaagagctgacagaggccaagaccccaacctccagcccagagaagccacaggaactcgttacagctgaggttgcagctccatccacctcatcttcagccacttcctcgcctgagggtccttcacctgcccgacctcctcggcgtcgcaccagtgctgatgtggaaattaggggtcaagggactggtcggccaggacaaccaccaggccccaaagtgcttcgaaagctgccaggacggctggtaactgtggtagaggaaaaggaactggtgcggcggcggcggcagcagcggggagctgccagcaccctagtgcctggggtctctgagactagtgccagcccgggaagcccgtctgtccgcagcatgtcagggccagaatcctcccctcccattggtgggccctgtgaagctgctccttcatcctcactgcccactccaccccagcagcccttcattgctcgccgtcacattgagctgggggtgactggtggtggcagccccgagaatggagacggagcactgctcgccatcaccccacctgctgtgaaacgtcggagggggaggccccccaagaagaacaggtctccagcagatgctgggagaggtgtggatgaggcaccctcatccaccttgaagggaaaaaccaatggggctgacccagtccctgggcctgagaccctaattgttgcagatcctgtcctggaaccacagcttattcctgggccccagcctcttggaccccagccagttcacagacccaatcccctcctgtcacctgtggagaaaagaaggcgaggacgaccccctaaagcacgagatttgcccatccctgggaccatttcctctgcaggggatggcaactccgaaagtcggacacagccacccccacacccatcacccctaaccccactcccaccactgctagtttgtcccactgctactgttgccaacactgtcaccactgtcaccatttcaacgtccccacccaaacggaagaggggccgacctcccaagaatcctccatcacctcggcccagccagctccccgtcttggaccgtgacagcacttctgttctcgagagctgtggattggggaggcgacggcaaccccagggccaaggggagagtgagggtagttcctctgatgaggatggaagccgccccctcacccgcctggcccgccttcggcttgaagcagaaggaatgcgaggacggaagagtggagggtccatggtggtggctgtaattcaggatgacctggacttagcagatagcgggccaggcgggttggaattgacaccacctgtggtctcactaaccccaaaactgcgctcgacccggctgcgtccagggtctctagtccccccactagagactgagaagttgcctcgcaaacgagcaggggccccagttggtgggagtcctgggctggcaaagcggggccgcctacagcccccaagtcccctggggcctgagggttcagtagaggagtctgaggctgaagcctcaggtgaggaggaggaaggggatgggaccccacgccgacgtcctggcccccgccggcttgttgggaccaccaaccaaggggaccagcgcatcctgcgcagcagcgcccctccctccctggctggccctgctgttagtcacagaggccgcaaggccaagacgtgagtgggctgcccctccacctaggctttccaccgtggccactccctccatgaccaggcctgactctgttaaccactacttgaagtcttgagggggaaagcctccagggagacataggggccttctcccttcttcccaccaaagtagggggtaggcaactggttgtcatggaaatggggatcatcacagtccccttccccttcaccccacgtggctgggcagtgttaagggtggcaagatagtctctgtccccacccccttgtacttgattccccagctgtctttcacacagccccccacccttaggggaagggggaggggcttctctacaatgaggtttttttcttttttttttttttttaagaagaaaaaataataaacttagtttctgtatgagcatccgcgtaaggaggcttctgattttctggtctggtggagggttgggtgggaacttgggcatcgtttttctcctccctcttgttcttgcaaagatcctagcacctgatctctagcccaggactatatgttccaggcagaaatctacccaagaagagggaagattggtgaatttgatgtggtagggtgcctttccccagtcagtttgaagtcacagatatccttttcctctcatttcttttccctcggttcctagacgttcctcggagctctttgatgcctcagacctttcccttttatccctcttgctcaggtgcttcctttcacaactttttccagagggcaggcgtcctagctccagttgctccatcccttgggccctcccctgctcttcatctagccaaactggtttgagtcagccacaccccttcccagctccctgggctcttcacgtggtggctggccactcaaccccacccctgggcttggcttggagccctgagtcagctccatcaccacccaagccaaaccaaagctgaggcaggagccgaaactcagagtccttcaaggcctatagccaggtgatggaggacgaggagaaggcagtggagatcttgggcaacacggaagctgctcatcctccatcccccatccgctgctgctggctccgcctccgctgcttggcagctactagcattatctgtggctgctcttgcctgggagtcatggctctggtgtttgccatcaaggcggaagagcggcataaagcaggccggtccgaggaggcagtgcgctggggggcccgggcccggaaactcatcctggccagctttgctgtctggcttgctgtcctcattctgggtcccctgctgctgtggttgctctcctacgccatcgctcaggctgagtgaccctggatggcctctgctgagagccagccgagacctcctggatcctgcaatgcggcattgctaaggtcctgtgacagcagtggttggaaggatcctggttggaaggatggggactctctcaaggggctttggaagagctcttctagccctttataaaaggagggcagcagctgagactgatgagaggagggcagcctgctctgttctttcagggccccccacccccatctcccctaccctagcccaccctagggcctctacccagcgggaggggttgaagaccaggcctggttttattagaattcattttgtaataaaagccttttttagtggtgaaaaaaaaaaa

SEQ ID NO: 284529 - DNA, 7290 bp, Homo sapiens
aataggaattccggctctggggaattccggctctctgggacctccctccttggctaggtttggccacagctccatccctgtgttgaatccacgccccacgttaacccctggccggctacccacacctactctgggtactgctcgagcccccatgcccacacccactctggtgaggcctcttctcaagctggtccacagtccttcacctgaagtcagtgcttcagcccccggagctgcccccttgaccatctcttctcctctccacgtgccatcctcactccctgggccagcctcttctccaatgccaattcccaactcctctccccttgctagtcctgtgtcctctacagtctcagttccattgtcatcttcactccccatctctgtccccaccacacttcctgccccagcctcggctccactcaccatccccatctcagcccccttgactgtttctgcttcgggcccagctctgttgaccagtgtgactccaccattggcacctgttgtcccagcggctcctggacctccctccttggcaccatctggtgcttccccgtcagcatcagccttgactctaggtttggccacagctccatccctgtcttcatctcagacacctggtcaccctctgttgttggctcccacctcttcacatgttccagggttgaactcaaccgtggccccagcatgctcacctgtcctggtgccagcttcggctctggccagtccttttccgtcagcaccaaatccactcctcctctggctcctcttccggtcctggcaccatcgccaggtgctgctcctgtcctggcttcatcacagactccggttccagttatggctccatcgtctactccaggaacctctttagcctcagcttcaccggtaccagctccaacccctgtgttggctccatcatcaactcaaactatgctaccagccccggttccgtcacctctcccgagcccggcttctacgcagacactggccctagccccagctttagcacccactcttggaggctcatctccatctcagacactctctttgggaacggggaacccccagggaccctttccaactcagacattgtcattaactccagcatcatccctggtaccaactccagcccagacactgtctttggcaccaggaccaccactgggtccaactcagacgctgtctctggctccagcaccccctctggctccagcttctccagtgggcccagccccagctcacacgctgactttggctccagcatcgtcatctgcttcactcctggccccagcttcagtgcagacactgaccttgagccctgccccagttcctaccctgggcccggccgcagctcagaccttggcgctggccccagcctccacacagtccccagcttcccaggcatcttcccttgtggtttcggcatctggtgccgctcccttgcctgtcaccatggtatcccggctgcctgtttccaaggatgagcctgacacactgacattgcgctctggtccccccagccctccctccactgctacctcgtttggtggcccccggcctcgacgccagccccccccaccacctcgttcccctttttatctggactccctggaggaaaagcggaagcggcagcggtctgaacgcctggaacggattttccaacttagtgaggctcatggggccctggcacctgtgtatgggactgaagtcctggatttctgtaccctgccccaacctgttgccagccccatcggccctcgttctcctggccccagccaccccaccttttggacttataccgaggctgcccaccgggctgtactgtttccccagcagcgactagaccagctgtcagaaatcattgagaggttcatctttgtcatgcctcctgtggaggcacctcccccttccctgcatgcctgccacccacctccttggctggccccacgtcaggcagccttccaggagcaattggcctctgagctctggccccgggctcgtcctttgcaccgtattgtgtgtaacatgcgcacccagttccctgacttaagactcatccagtatgattgcggaaagttgcagacgttggcagtgctgttgcggcagctcaaggcagagggccaccgagtgctcatcttcacccagatgacccgaatgctggatgtattggagcagtttctcacctaccatggccatctctacctgcgcctggatggatctactagagttgaacagagacaggccttgatggaacggttcaatgcagacaaacgcatattctgcttcatcctttcaactcggagtgggggtgtgggcgtgaacctgacaggagcagacactgttgttttttatgacagcgactggaatcccaccatggatgctcaggcccaggaccgctgtcaccgaattggccagacccgggatgtccacatatataggcttatcagtgaacggacagtggaggagaacatcctaaaaaaggcaaatcagaagagaatgttgggggacatggccattgagggaggcaacttcaccacagcctatttcaaacagcagaccatccgagagctgtttgatatgcccctggaggaaccttctagctcatccgtgccctctgcccctgaagaggaggaagagactgtggccagcaagcagactcatattctggagcaggcattgtgtcgggcagaagatgaagaggatatccgtgcagccacccaggccaaggctgaacaggtggctgagcttgcagaatttaatgagaacgatgggtttcctgctggtgagggagaggaagctggccggcctggggctgaggatgaggagatgtcccgggctgagcaggaaattgctgccctcgtagaacagctgacccccattgagcgctatgccatgaaattcctggaggcctcactggaggaggtgagccgagaggagctcaaacaggcagaagagcaagtggaagctgcccgcaaagacctggaccaagccaaggaggaggtgttccgcctaccccaagaggaggaggaggggccgggggctggggatgagagttcctgtgggactggtggaggcacccaccggcgcagtaaaaaggccaaagcccctgagaggccggggactcgtgtcagtgagcgtcttcgtggagcccgggctgagactcaaggggcaaaccacactcctgtcatatccgcccatcaaactcgcagcaccaccacaccaccccgctgcagtcctgccagggagcgagttcccaggccagcacctaggcctcgacccactccagcttcagctccggctgcaattcctgcccttgttcctgtcccagtttctgccccagtacccatttcagccccaaatccaataaccattctccctgtccatatcttgccttctcctccccctccttcacagattcctccttgttcttctcctgcctgcacccctcctcctgcctgtacccctccaccagctcatacaccgcctccagcccaaacctgtcttgtaactccttcctctcctctcttgcttggtccaccttctgtgcccatctctgcctcagtcactaatctccccttgggcttgaggcctgaggcagagctgtgtgcccaggcattggcatctccagagtccctggagctggcttctgtggccagttcagaaacctcctcactttctcttgtgccccctaaagatctgttgccagttgctgtggagatcctgcctgtgtcagagaagaacctttctctcaccccttctgcacccagcctgaccttggaggctggcagcatccccaatggtcaagagcaggaggcaccagattctgctgaggggaccacccttacagtgctgcctgaaggtgaggagttgcccctgtgtgtgagtgagagcaatggcctggagctcccaccctcagcagcatctgatgagccacttcaggagccactggaggctgacaggacctcggaagagctgacagaggccaagaccccaacctccagcccagagaagccacaggaactcgttacagctgaggttgcagctccatccacctcatcttcagccacttcctcgcctgagggtccttcacctgcccgacctcctcggcgtcgcaccagtgctgatgtggaaattaggggtcaagggactggtcggccaggacaaccaccaggccccaaagtgcttcgaaagctgccaggacggctggtaactgtggtagaggaaaaggaactggtgcggcggcggcggcagcagcggggagctgccagcaccctagtgcctggggtctctgagactagtgccagcccgggaagcccgtctgtccgcagcatgtcagggccagaatcctcccctcccattggtgggccctgtgaagctgctccttcatcctcactgcccactccaccccagcagcccttcattgctcgccgtcacattgagctgggggtgactggtggtggcagccccgagaatggagacggagcactgctcgccatcaccccacctgctgtgaaacgtcggagggggaggccccccaagaagaacaggtctccagcagatgctgggagaggtgtggatgaggcaccctcatccaccttgaagggaaaaaccaatggggctgacccagtccctgggcctgagaccctaattgttgcagatcctgtcctggaaccacagcttattcctgggccccagcctcttggaccccagccagttcacagacccaatcccctcctgtcacctgtggagaaaagaaggcgaggacgaccccctaaagcacgagatttgcccatccctgggaccatttcctctgcaggggatggcaactccgaaagtcggacacagccacccccacacccatcacccctaaccccactcccaccactgctagtttgtcccactgctactgttgccaacactgtcaccactgtcaccatttcaacgtccccacccaaacggaagaggggccgacctcccaagaatcctccatcacctcggcccagccagctccccgtcttggaccgtgacagcacttctgttctcgagagctgtggattggggaggcgacggcaaccccagggccaaggggagagtgagggtagttcctctgatgaggatggaagccgccccctcacccgcctggcccgccttcggcttgaagcagaaggaatgcgaggacggaagagtggagggtccatggtggtggctgtaattcaggatgacctggacttagcagatagcgggccaggcgggttggaattgacaccacctgtggtctcactaaccccaaaactgcgctcgacccggctgcgtccagggtctctagtccccccactagagactgagaagttgcctcgcaaacgagcaggggccccagttggtgggagtcctgggctggcaaagcggggccgcctacagcccccaagtcccctggggcctgagggttcagtagaggagtctgaggctgaagcctcaggtgaggaggaggaaggggatgggaccccacgccgacgtcctggcccccgccggcttgttgggaccaccaaccaaggggaccagcgcatcctgcgcagcagcgcccctccctccctggctggccctgctgttagtcacagaggccgcaaggccaagacgtgagtgggctgcccctccacctaggctttccaccgtggccactccctccatgaccaggcctgactctgttaaccactacttgaagtcttgagggggaaagcctccagggagacataggggccttctcccttcttcccaccaaagtagggggtaggcaactggttgtcatggaaatggggatcatcacagtccccttccccttcaccccacgtggctgggcagtgttaagggtggcaagatagtctctgtccccacccccttgtacttgattccccagctgtctttcacacagccccccacccttaggggaagggggaggggcttctctacaatgaggtttttttcttttttttttttttttaagaagaaaaaataataaacttagtttctgtatgagcatccgcgtaaggaggcttctgattttctggtctggtggagggttgggtgggaacttgggcatcgtttttctcctccctcttgttcttgcaaagatcctagcacctgatctctagcccaggactatatgttccaggcagaaatctacccaagaagagggaagattggtgaatttgatgtggtagggtgcctttccccagtcagtttgaagtcacagatatccttttcctctcatttcttttccctcggttcctagacgttcctcggagctctttgatgcctcagacctttcccttttatccctcttgctcaggtgcttcctttcacaactttttccagagggcaggcgtcctagctccagttgctccatcccttgggccctcccctgctcttcatctagccaaactggtttgagtcagccacaccccttcccagctccctgggctcttcacgtggtggctggccactcaaccccacccctgggcttggcttggagccctgagtcagctccatcaccacccaagccaaaccaaagctgaggcaggagccgaaactcagagtccttcaaggcctatagccaggtgatggaggacgaggagaaggcagtggagatcttgggcaacacggaagctgctcatcctccatcccccatccgctgctgctggctccgcctccgctgcttggcagctactagcattatctgtggctgctcttgcctgggagtcatggctctggtgtttgccatcaaggcggaagagcggcataaagcaggccggtccgaggaggcagtgcgctggggggcccgggcccggaaactcatcctggccagctttgctgtctggcttgctgtcctcattctgggtcccctgctgctgtggttgctctcctacgccatcgctcaggctgagtgaccctggatggcctctgctgagagccagccgagacctcctggatcctgcaatgcggcattgctaaggtcctgtgacagcagtggttggaaggatcctggttggaaggatggggactctctcaaggggctttggaagagctcttctagccctttataaaaggagggcagcagctgagactgatgagaggagggcagcctgctctgttctttcagggccccccacccccatctcccctaccctagcccaccctagggcctctacccagcgggaggggttgaagaccaggcctggttttattagaattcattttgtaataaaagccttttttagtggtgaaaaaaaaaaa

SEQ ID NO: 284530 - DNA, 6940 bp, Homo sapiens
accgtaaccaaatcaacaacaacctatttttctgttccccaacctttttctccgacccagcctcggctccactcaccatccccatctcagcccccttgactgtttctgcttcgggcccagctctgttgaccagtgtgactccaccattggcacctgttgtcccagcggctcctggacctccctccttggcaccatctggtgcttccccgtcagcatcagccttgactctaggtttggccacagctccatccctgtcttcatctcagacacctggtcaccctctgttgttggctcccacctcttcacatgttccagggttgaactcaaccgtggccccagcatgctcacctgtcctggtgccagcttcggctctggccagtccttttccgtcagcaccaaatccactcctcctctggctcctcttccggtcctggcaccatcgccaggtgctgctcctgtcctggcttcatcacagactccggttccagttatggctccatcgtctactccaggaacctctttagcctcagcttcaccggtaccagctccaacccctgtgttggctccatcatcaactcaaactatgctaccagccccggttccgtcacctctcccgagcccggcttctacgcagacactggccctagccccagctttagcacccactcttggaggctcatctccatctcagacactctctttgggaacggggaacccccagggaccctttccaactcagacattgtcattaactccagcatcatccctggtaccaactccagcccagacactgtctttggcaccaggaccaccactgggtccaactcagacgctgtctctggctccagcaccccctctggctccagcttctccagtgggcccagccccagctcacacgctgactttggctccagcatcgtcatctgcttcactcctggccccagcttcagtgcagacactgaccttgagccctgccccagttcctaccctgggcccggccgcagctcagaccttggcgctggccccagcctccacacagtccccagcttcccaggcatcttcccttgtggtttcggcatctggtgccgctcccttgcctgtcaccatggtatcccggctgcctgtttccaaggatgagcctgacacactgacattgcgctctggtccccccagccctccctccactgctacctcgtttggtggcccccggcctcgacgccagccccccccaccacctcgttcccctttttatctggactccctggaggaaaagcggaagcggcagcggtctgaacgcctggaacggattttccaacttagtgaggctcatggggccctggcacctgtgtatgggactgaagtcctggatttctgtaccctgccccaacctgttgccagccccatcggccctcgttctcctggccccagccaccccaccttttggacttataccgaggctgcccaccgggctgtactgtttccccagcagcgactagaccagctgtcagaaatcattgagaggttcatctttgtcatgcctcctgtggaggcacctcccccttccctgcatgcctgccacccacctccttggctggccccacgtcaggcagccttccaggagcaattggcctctgagctctggccccgggctcgtcctttgcaccgtattgtgtgtaacatgcgcacccagttccctgacttaagactcatccagtatgattgcggaaagttgcagacgttggcagtgctgttgcggcagctcaaggcagagggccaccgagtgctcatcttcacccagatgacccgaatgctggatgtattggagcagtttctcacctaccatggccatctctacctgcgcctggatggatctactagagttgaacagagacaggccttgatggaacggttcaatgcagacaaacgcatattctgcttcatcctttcaactcggagtgggggtgtgggcgtgaacctgacaggagcagacactgttgttttttatgacagcgactggaatcccaccatggatgctcaggcccaggaccgctgtcaccgaattggccagacccgggatgtccacatatataggcttatcagtgaacggacagtggaggagaacatcctaaaaaaggcaaatcagaagagaatgttgggggacatggccattgagggaggcaacttcaccacagcctatttcaaacagcagaccatccgagagctgtttgatatgcccctggaggaaccttctagctcatccgtgccctctgcccctgaagaggaggaagagactgtggccagcaagcagactcatattctggagcaggcattgtgtcgggcagaagatgaagaggatatccgtgcagccacccaggccaaggctgaacaggtggctgagcttgcagaatttaatgagaacgatgggtttcctgctggtgagggagaggaagctggccggcctggggctgaggatgaggagatgtcccgggctgagcaggaaattgctgccctcgtagaacagctgacccccattgagcgctatgccatgaaattcctggaggcctcactggaggaggtgagccgagaggagctcaaacaggcagaagagcaagtggaagctgcccgcaaagacctggaccaagccaaggaggaggtgttccgcctaccccaagaggaggaggaggggccgggggctggggatgagagttcctgtgggactggtggaggcacccaccggcgcagtaaaaaggccaaagcccctgagaggccggggactcgtgtcagtgagcgtcttcgtggagcccgggctgagactcaaggggcaaaccacactcctgtcatatccgcccatcaaactcgcagcaccaccacaccaccccgctgcagtcctgccagggagcgagttcccaggccagcacctaggcctcgacccactccagcttcagctccggctgcaattcctgcccttgttcctgtcccagtttctgccccagtacccatttcagccccaaatccaataaccattctccctgtccatatcttgccttctcctccccctccttcacagattcctccttgttcttctcctgcctgcacccctcctcctgcctgtacccctccaccagctcatacaccgcctccagcccaaacctgtcttgtaactccttcctctcctctcttgcttggtccaccttctgtgcccatctctgcctcagtcactaatctccccttgggcttgaggcctgaggcagagctgtgtgcccaggcattggcatctccagagtccctggagctggcttctgtggccagttcagaaacctcctcactttctcttgtgccccctaaagatctgttgccagttgctgtggagatcctgcctgtgtcagagaagaacctttctctcaccccttctgcacccagcctgaccttggaggctggcagcatccccaatggtcaagagcaggaggcaccagattctgctgaggggaccacccttacagtgctgcctgaaggtgaggagttgcccctgtgtgtgagtgagagcaatggcctggagctcccaccctcagcagcatctgatgagccacttcaggagccactggaggctgacaggacctcggaagagctgacagaggccaagaccccaacctccagcccagagaagccacaggaactcgttacagctgaggttgcagctccatccacctcatcttcagccacttcctcgcctgagggtccttcacctgcccgacctcctcggcgtcgcaccagtgctgatgtggaaattaggggtcaagggactggtcggccaggacaaccaccaggccccaaagtgcttcgaaagctgccaggacggctggtaactgtggtagaggaaaaggaactggtgcggcggcggcggcagcagcggggagctgccagcaccctagtgcctggggtctctgagactagtgccagcccgggaagcccgtctgtccgcagcatgtcagggccagaatcctcccctcccattggtgggccctgtgaagctgctccttcatcctcactgcccactccaccccagcagcccttcattgctcgccgtcacattgagctgggggtgactggtggtggcagccccgagaatggagacggagcactgctcgccatcaccccacctgctgtgaaacgtcggagggggaggccccccaagaagaacaggtctccagcagatgctgggagaggtgtggatgaggcaccctcatccaccttgaagggaaaaaccaatggggctgacccagtccctgggcctgagaccctaattgttgcagatcctgtcctggaaccacagcttattcctgggccccagcctcttggaccccagccagttcacagacccaatcccctcctgtcacctgtggagaaaagaaggcgaggacgaccccctaaagcacgagatttgcccatccctgggaccatttcctctgcaggggatggcaactccgaaagtcggacacagccacccccacacccatcacccctaaccccactcccaccactgctagtttgtcccactgctactgttgccaacactgtcaccactgtcaccatttcaacgtccccacccaaacggaagaggggccgacctcccaagaatcctccatcacctcggcccagccagctccccgtcttggaccgtgacagcacttctgttctcgagagctgtggattggggaggcgacggcaaccccagggccaaggggagagtgagggtagttcctctgatgaggatggaagccgccccctcacccgcctggcccgccttcggcttgaagcagaaggaatgcgaggacggaagagtggagggtccatggtggtggctgtaattcaggatgacctggacttagcagatagcgggccaggcgggttggaattgacaccacctgtggtctcactaaccccaaaactgcgctcgacccggctgcgtccagggtctctagtccccccactagagactgagaagttgcctcgcaaacgagcaggggccccagttggtgggagtcctgggctggcaaagcggggccgcctacagcccccaagtcccctggggcctgagggttcagtagaggagtctgaggctgaagcctcaggtgaggaggaggaaggggatgggaccccacgccgacgtcctggcccccgccggcttgttgggaccaccaaccaaggggaccagcgcatcctgcgcagcagcgcccctccctccctggctggccctgctgttagtcacagaggccgcaaggccaagacgtgagtgggctgcccctccacctaggctttccaccgtggccactccctccatgaccaggcctgactctgttaaccactacttgaagtcttgagggggaaagcctccagggagacataggggccttctcccttcttcccaccaaagtagggggtaggcaactggttgtcatggaaatggggatcatcacagtccccttccccttcaccccacgtggctgggcagtgttaagggtggcaagatagtctctgtccccacccccttgtacttgattccccagctgtctttcacacagccccccacccttaggggaagggggaggggcttctctacaatgaggtttttttcttttttttttttttttaagaagaaaaaataataaacttagtttctgtatgagcatccgcgtaaggaggcttctgattttctggtctggtggagggttgggtgggaacttgggcatcgtttttctcctccctcttgttcttgcaaagatcctagcacctgatctctagcccaggactatatgttccaggcagaaatctacccaagaagagggaagattggtgaatttgatgtggtagggtgcctttccccagtcagtttgaagtcacagatatccttttcctctcatttcttttccctcggttcctagacgttcctcggagctctttgatgcctcagacctttcccttttatccctcttgctcaggtgcttcctttcacaactttttccagagggcaggcgtcctagctccagttgctccatcccttgggccctcccctgctcttcatctagccaaactggtttgagtcagccacaccccttcccagctccctgggctcttcacgtggtggctggccactcaaccccacccctgggcttggcttggagccctgagtcagctccatcaccacccaagccaaaccaaagctgaggcaggagccgaaactcagagtccttcaaggcctatagccaggtgatggaggacgaggagaaggcagtggagatcttgggcaacacggaagctgctcatcctccatcccccatccgctgctgctggctccgcctccgctgcttggcagctactagcattatctgtggctgctcttgcctgggagtcatggctctggtgtttgccatcaaggcggaagagcggcataaagcaggccggtccgaggaggcagtgcgctggggggcccgggcccggaaactcatcctggccagctttgctgtctggcttgctgtcctcattctgggtcccctgctgctgtggttgctctcctacgccatcgctcaggctgagtgaccctggatggcctctgctgagagccagccgagacctcctggatcctgcaatgcggcattgctaaggtcctgtgacagcagtggttggaaggatcctggttggaaggatggggactctctcaaggggctttggaagagctcttctagccctttataaaaggagggcagcagctgagactgatgagaggagggcagcctgctctgttctttcagggccccccacccccatctcccctaccctagcccaccctagggcctctacccagcgggaggggttgaagaccaggcctggttttattagaattcattttgtaataaaagccttttttagtggtgaaaaaaaaaaa

SEQ ID NO: 284531 - DNA, 6301 bp, Homo sapiens
agggatgatgctggagttaatgacaatgtctgagttggaaagggtccctgggggttccccgttcccaaagagagtgtctgagatggagatgagcctccaagagtgggtgctaaagctggggctagggccagtgtctgcgtagaagccgggctcgggagaggtgacggaaccggggctggtagcatagtttgagttgatgatggagccaacaccccctctggctccagcttctccagtgggcccagccccagctcacacgctgactttggctccagcatcgtcatctgcttcactcctggccccagcttcagtgcagacactgaccttgagccctgccccagttcctaccctgggcccggccgcagctcagaccttggcgctggccccagcctccacacagtccccagcttcccaggcatcttcccttgtggtttcggcatctggtgccgctcccttgcctgtcaccatggtatcccggctgcctgtttccaaggatgagcctgacacactgacattgcgctctggtccccccagccctccctccactgctacctcgtttggtggcccccggcctcgacgccagccccccccaccacctcgttcccctttttatctggactccctggaggaaaagcggaagcggcagcggtctgaacgcctggaacggattttccaacttagtgaggctcatggggccctggcacctgtgtatgggactgaagtcctggatttctgtaccctgccccaacctgttgccagccccatcggccctcgttctcctggccccagccaccccaccttttggacttataccgaggctgcccaccgggctgtactgtttccccagcagcgactagaccagctgtcagaaatcattgagaggttcatctttgtcatgcctcctgtggaggcacctcccccttccctgcatgcctgccacccacctccttggctggccccacgtcaggcagccttccaggagcaattggcctctgagctctggccccgggctcgtcctttgcaccgtattgtgtgtaacatgcgcacccagttccctgacttaagactcatccagtatgattgcggaaagttgcagacgttggcagtgctgttgcggcagctcaaggcagagggccaccgagtgctcatcttcacccagatgacccgaatgctggatgtattggagcagtttctcacctaccatggccatctctacctgcgcctggatggatctactagagttgaacagagacaggccttgatggaacggttcaatgcagacaaacgcatattctgcttcatcctttcaactcggagtgggggtgtgggcgtgaacctgacaggagcagacactgttgttttttatgacagcgactggaatcccaccatggatgctcaggcccaggaccgctgtcaccgaattggccagacccgggatgtccacatatataggcttatcagtgaacggacagtggaggagaacatcctaaaaaaggcaaatcagaagagaatgttgggggacatggccattgagggaggcaacttcaccacagcctatttcaaacagcagaccatccgagagctgtttgatatgcccctggaggaaccttctagctcatccgtgccctctgcccctgaagaggaggaagagactgtggccagcaagcagactcatattctggagcaggcattgtgtcgggcagaagatgaagaggatatccgtgcagccacccaggccaaggctgaacaggtggctgagcttgcagaatttaatgagaacgatgggtttcctgctggtgagggagaggaagctggccggcctggggctgaggatgaggagatgtcccgggctgagcaggaaattgctgccctcgtagaacagctgacccccattgagcgctatgccatgaaattcctggaggcctcactggaggaggtgagccgagaggagctcaaacaggcagaagagcaagtggaagctgcccgcaaagacctggaccaagccaaggaggaggtgttccgcctaccccaagaggaggaggaggggccgggggctggggatgagagttcctgtgggactggtggaggcacccaccggcgcagtaaaaaggccaaagcccctgagaggccggggactcgtgtcagtgagcgtcttcgtggagcccgggctgagactcaaggggcaaaccacactcctgtcatatccgcccatcaaactcgcagcaccaccacaccaccccgctgcagtcctgccagggagcgagttcccaggccagcacctaggcctcgacccactccagcttcagctccggctgcaattcctgcccttgttcctgtcccagtttctgccccagtacccatttcagccccaaatccaataaccattctccctgtccatatcttgccttctcctccccctccttcacagattcctccttgttcttctcctgcctgcacccctcctcctgcctgtacccctccaccagctcatacaccgcctccagcccaaacctgtcttgtaactccttcctctcctctcttgcttggtccaccttctgtgcccatctctgcctcagtcactaatctccccttgggcttgaggcctgaggcagagctgtgtgcccaggcattggcatctccagagtccctggagctggcttctgtggccagttcagaaacctcctcactttctcttgtgccccctaaagatctgttgccagttgctgtggagatcctgcctgtgtcagagaagaacctttctctcaccccttctgcacccagcctgaccttggaggctggcagcatccccaatggtcaagagcaggaggcaccagattctgctgaggggaccacccttacagtgctgcctgaaggtgaggagttgcccctgtgtgtgagtgagagcaatggcctggagctcccaccctcagcagcatctgatgagccacttcaggagccactggaggctgacaggacctcggaagagctgacagaggccaagaccccaacctccagcccagagaagccacaggaactcgttacagctgaggttgcagctccatccacctcatcttcagccacttcctcgcctgagggtccttcacctgcccgacctcctcggcgtcgcaccagtgctgatgtggaaattaggggtcaagggactggtcggccaggacaaccaccaggccccaaagtgcttcgaaagctgccaggacggctggtaactgtggtagaggaaaaggaactggtgcggcggcggcggcagcagcggggagctgccagcaccctagtgcctggggtctctgagactagtgccagcccgggaagcccgtctgtccgcagcatgtcagggccagaatcctcccctcccattggtgggccctgtgaagctgctccttcatcctcactgcccactccaccccagcagcccttcattgctcgccgtcacattgagctgggggtgactggtggtggcagccccgagaatggagacggagcactgctcgccatcaccccacctgctgtgaaacgtcggagggggaggccccccaagaagaacaggtctccagcagatgctgggagaggtgtggatgaggcaccctcatccaccttgaagggaaaaaccaatggggctgacccagtccctgggcctgagaccctaattgttgcagatcctgtcctggaaccacagcttattcctgggccccagcctcttggaccccagccagttcacagacccaatcccctcctgtcacctgtggagaaaagaaggcgaggacgaccccctaaagcacgagatttgcccatccctgggaccatttcctctgcaggggatggcaactccgaaagtcggacacagccacccccacacccatcacccctaaccccactcccaccactgctagtttgtcccactgctactgttgccaacactgtcaccactgtcaccatttcaacgtccccacccaaacggaagaggggccgacctcccaagaatcctccatcacctcggcccagccagctccccgtcttggaccgtgacagcacttctgttctcgagagctgtggattggggaggcgacggcaaccccagggccaaggggagagtgagggtagttcctctgatgaggatggaagccgccccctcacccgcctggcccgccttcggcttgaagcagaaggaatgcgaggacggaagagtggagggtccatggtggtggctgtaattcaggatgacctggacttagcagatagcgggccaggcgggttggaattgacaccacctgtggtctcactaaccccaaaactgcgctcgacccggctgcgtccagggtctctagtccccccactagagactgagaagttgcctcgcaaacgagcaggggccccagttggtgggagtcctgggctggcaaagcggggccgcctacagcccccaagtcccctggggcctgagggttcagtagaggagtctgaggctgaagcctcaggtgaggaggaggaaggggatgggaccccacgccgacgtcctggcccccgccggcttgttgggaccaccaaccaaggggaccagcgcatcctgcgcagcagcgcccctccctccctggctggccctgctgttagtcacagaggccgcaaggccaagacgtgagtgggctgcccctccacctaggctttccaccgtggccactccctccatgaccaggcctgactctgttaaccactacttgaagtcttgagggggaaagcctccagggagacataggggccttctcccttcttcccaccaaagtagggggtaggcaactggttgtcatggaaatggggatcatcacagtccccttccccttcaccccacgtggctgggcagtgttaagggtggcaagatagtctctgtccccacccccttgtacttgattccccagctgtctttcacacagccccccacccttaggggaagggggaggggcttctctacaatgaggtttttttcttttttttttttttttaagaagaaaaaataataaacttagtttctgtatgagcatccgcgtaaggaggcttctgattttctggtctggtggagggttgggtgggaacttgggcatcgtttttctcctccctcttgttcttgcaaagatcctagcacctgatctctagcccaggactatatgttccaggcagaaatctacccaagaagagggaagattggtgaatttgatgtggtagggtgcctttccccagtcagtttgaagtcacagatatccttttcctctcatttcttttccctcggttcctagacgttcctcggagctctttgatgcctcagacctttcccttttatccctcttgctcaggtgcttcctttcacaactttttccagagggcaggcgtcctagctccagttgctccatcccttgggccctcccctgctcttcatctagccaaactggtttgagtcagccacaccccttcccagctccctgggctcttcacgtggtggctggccactcaaccccacccctgggcttggcttggagccctgagtcagctccatcaccacccaagccaaaccaaagctgaggcaggagccgaaactcagagtccttcaaggcctatagccaggtgatggaggacgaggagaaggcagtggagatcttgggcaacacggaagctgctcatcctccatcccccatccgctgctgctggctccgcctccgctgcttggcagctactagcattatctgtggctgctcttgcctgggagtcatggctctggtgtttgccatcaaggcggaagagcggcataaagcaggccggtccgaggaggcagtgcgctggggggcccgggcccggaaactcatcctggccagctttgctgtctggcttgctgtcctcattctgggtcccctgctgctgtggttgctctcctacgccatcgctcaggctgagtgaccctggatggcctctgctgagagccagccgagacctcctggatcctgcaatgcggcattgctaaggtcctgtgacagcagtggttggaaggatcctggttggaaggatggggactctctcaaggggctttggaagagctcttctagccctttataaaaggagggcagcagctgagactgatgagaggagggcagcctgctctgttctttcagggccccccacccccatctcccctaccctagcccaccctagggcctctacccagcgggaggggttgaagaccaggcctggttttattagaattcattttgtaataaaagccttttttagtggtgaaaaaaaaaaa

SEQ ID NO: 284532 - DNA, 5756 bp, Homo sapiens
  misc_feature (69)..(69): n is a, c, g, or t
ctttgcaccgtattgtgtgtaacatgcgcgacccagcttccctgacttaagactcatccagtatgattncggactccctggaggaaaagcggaagcggcagcggtctgaacgcctggaacggattttccaacttagtgaggctcatggggccctggcacctgtgtatgggactgaagtcctggatttctgtaccctgccccaacctgttgccagccccatcggccctcgttctcctggccccagccaccccaccttttggacttataccgaggctgcccaccgggctgtactgtttccccagcagcgactagaccagctgtcagaaatcattgagaggttcatctttgtcatgcctcctgtggaggcacctcccccttccctgcatgcctgccacccacctccttggctggccccacgtcaggcagccttccaggagcaattggcctctgagctctggccccgggctcgtcctttgcaccgtattgtgtgtaacatgcgcacccagttccctgacttaagactcatccagtatgattgcggaaagttgcagacgttggcagtgctgttgcggcagctcaaggcagagggccaccgagtgctcatcttcacccagatgacccgaatgctggatgtattggagcagtttctcacctaccatggccatctctacctgcgcctggatggatctactagagttgaacagagacaggccttgatggaacggttcaatgcagacaaacgcatattctgcttcatcctttcaactcggagtgggggtgtgggcgtgaacctgacaggagcagacactgttgttttttatgacagcgactggaatcccaccatggatgctcaggcccaggaccgctgtcaccgaattggccagacccgggatgtccacatatataggcttatcagtgaacggacagtggaggagaacatcctaaaaaaggcaaatcagaagagaatgttgggggacatggccattgagggaggcaacttcaccacagcctatttcaaacagcagaccatccgagagctgtttgatatgcccctggaggaaccttctagctcatccgtgccctctgcccctgaagaggaggaagagactgtggccagcaagcagactcatattctggagcaggcattgtgtcgggcagaagatgaagaggatatccgtgcagccacccaggccaaggctgaacaggtggctgagcttgcagaatttaatgagaacgatgggtttcctgctggtgagggagaggaagctggccggcctggggctgaggatgaggagatgtcccgggctgagcaggaaattgctgccctcgtagaacagctgacccccattgagcgctatgccatgaaattcctggaggcctcactggaggaggtgagccgagaggagctcaaacaggcagaagagcaagtggaagctgcccgcaaagacctggaccaagccaaggaggaggtgttccgcctaccccaagaggaggaggaggggccgggggctggggatgagagttcctgtgggactggtggaggcacccaccggcgcagtaaaaaggccaaagcccctgagaggccggggactcgtgtcagtgagcgtcttcgtggagcccgggctgagactcaaggggcaaaccacactcctgtcatatccgcccatcaaactcgcagcaccaccacaccaccccgctgcagtcctgccagggagcgagttcccaggccagcacctaggcctcgacccactccagcttcagctccggctgcaattcctgcccttgttcctgtcccagtttctgccccagtacccatttcagccccaaatccaataaccattctccctgtccatatcttgccttctcctccccctccttcacagattcctccttgttcttctcctgcctgcacccctcctcctgcctgtacccctccaccagctcatacaccgcctccagcccaaacctgtcttgtaactccttcctctcctctcttgcttggtccaccttctgtgcccatctctgcctcagtcactaatctccccttgggcttgaggcctgaggcagagctgtgtgcccaggcattggcatctccagagtccctggagctggcttctgtggccagttcagaaacctcctcactttctcttgtgccccctaaagatctgttgccagttgctgtggagatcctgcctgtgtcagagaagaacctttctctcaccccttctgcacccagcctgaccttggaggctggcagcatccccaatggtcaagagcaggaggcaccagattctgctgaggggaccacccttacagtgctgcctgaaggtgaggagttgcccctgtgtgtgagtgagagcaatggcctggagctcccaccctcagcagcatctgatgagccacttcaggagccactggaggctgacaggacctcggaagagctgacagaggccaagaccccaacctccagcccagagaagccacaggaactcgttacagctgaggttgcagctccatccacctcatcttcagccacttcctcgcctgagggtccttcacctgcccgacctcctcggcgtcgcaccagtgctgatgtggaaattaggggtcaagggactggtcggccaggacaaccaccaggccccaaagtgcttcgaaagctgccaggacggctggtaactgtggtagaggaaaaggaactggtgcggcggcggcggcagcagcggggagctgccagcaccctagtgcctggggtctctgagactagtgccagcccgggaagcccgtctgtccgcagcatgtcagggccagaatcctcccctcccattggtgggccctgtgaagctgctccttcatcctcactgcccactccaccccagcagcccttcattgctcgccgtcacattgagctgggggtgactggtggtggcagccccgagaatggagacggagcactgctcgccatcaccccacctgctgtgaaacgtcggagggggaggccccccaagaagaacaggtctccagcagatgctgggagaggtgtggatgaggcaccctcatccaccttgaagggaaaaaccaatggggctgacccagtccctgggcctgagaccctaattgttgcagatcctgtcctggaaccacagcttattcctgggccccagcctcttggaccccagccagttcacagacccaatcccctcctgtcacctgtggagaaaagaaggcgaggacgaccccctaaagcacgagatttgcccatccctgggaccatttcctctgcaggggatggcaactccgaaagtcggacacagccacccccacacccatcacccctaaccccactcccaccactgctagtttgtcccactgctactgttgccaacactgtcaccactgtcaccatttcaacgtccccacccaaacggaagaggggccgacctcccaagaatcctccatcacctcggcccagccagctccccgtcttggaccgtgacagcacttctgttctcgagagctgtggattggggaggcgacggcaaccccagggccaaggggagagtgagggtagttcctctgatgaggatggaagccgccccctcacccgcctggcccgccttcggcttgaagcagaaggaatgcgaggacggaagagtggagggtccatggtggtggctgtaattcaggatgacctggacttagcagatagcgggccaggcgggttggaattgacaccacctgtggtctcactaaccccaaaactgcgctcgacccggctgcgtccagggtctctagtccccccactagagactgagaagttgcctcgcaaacgagcaggggccccagttggtgggagtcctgggctggcaaagcggggccgcctacagcccccaagtcccctggggcctgagggttcagtagaggagtctgaggctgaagcctcaggtgaggaggaggaaggggatgggaccccacgccgacgtcctggcccccgccggcttgttgggaccaccaaccaaggggaccagcgcatcctgcgcagcagcgcccctccctccctggctggccctgctgttagtcacagaggccgcaaggccaagacgtgagtgggctgcccctccacctaggctttccaccgtggccactccctccatgaccaggcctgactctgttaaccactacttgaagtcttgagggggaaagcctccagggagacataggggccttctcccttcttcccaccaaagtagggggtaggcaactggttgtcatggaaatggggatcatcacagtccccttccccttcaccccacgtggctgggcagtgttaagggtggcaagatagtctctgtccccacccccttgtacttgattccccagctgtctttcacacagccccccacccttaggggaagggggaggggcttctctacaatgaggtttttttcttttttttttttttttaagaagaaaaaataataaacttagtttctgtatgagcatccgcgtaaggaggcttctgattttctggtctggtggagggttgggtgggaacttgggcatcgtttttctcctccctcttgttcttgcaaagatcctagcacctgatctctagcccaggactatatgttccaggcagaaatctacccaagaagagggaagattggtgaatttgatgtggtagggtgcctttccccagtcagtttgaagtcacagatatccttttcctctcatttcttttccctcggttcctagacgttcctcggagctctttgatgcctcagacctttcccttttatccctcttgctcaggtgcttcctttcacaactttttccagagggcaggcgtcctagctccagttgctccatcccttgggccctcccctgctcttcatctagccaaactggtttgagtcagccacaccccttcccagctccctgggctcttcacgtggtggctggccactcaaccccacccctgggcttggcttggagccctgagtcagctccatcaccacccaagccaaaccaaagctgaggcaggagccgaaactcagagtccttcaaggcctatagccaggtgatggaggacgaggagaaggcagtggagatcttgggcaacacggaagctgctcatcctccatcccccatccgctgctgctggctccgcctccgctgcttggcagctactagcattatctgtggctgctcttgcctgggagtcatggctctggtgtttgccatcaaggcggaagagcggcataaagcaggccggtccgaggaggcagtgcgctggggggcccgggcccggaaactcatcctggccagctttgctgtctggcttgctgtcctcattctgggtcccctgctgctgtggttgctctcctacgccatcgctcaggctgagtgaccctggatggcctctgctgagagccagccgagacctcctggatcctgcaatgcggcattgctaaggtcctgtgacagcagtggttggaaggatcctggttggaaggatggggactctctcaaggggctttggaagagctcttctagccctttataaaaggagggcagcagctgagactgatgagaggagggcagcctgctctgttctttcagggccccccacccccatctcccctaccctagcccaccctagggcctctacccagcgggaggggttgaagaccaggcctggttttattagaattcattttgtaataaaagccttttttagtggtgaaaaaaaaaaa

SEQ ID NO: 284533 - DNA, 5999 bp, Homo sapiens
attgtagatcttaattttgaatattcagtcattctgctttggtagcatacaaggaaagatcagttttctctaggagagaagttacttaacataacttctgagaaagaatagttatttaacataaaaaagaaagttatttaacataacttctgagaaagaatagttctcattgataacttggaaaactacaaaaagcatagtgtatttttggatcccatggtttctatatatttatttccatctgggaagaacagtcaggttttgatgtggactctgagggtgctgattacttcctctttttctctcacccccaggactccctggaggaaaagcggaagcggcagcggtctgaacgcctggaacggattttccaacttagtgaggctcatggggccctggcacctgtgtatgggactgaagtcctggatttctgtaccctgccccaacctgttgccagccccatcggccctcgttctcctggccccagccaccccaccttttggacttataccgaggctgcccaccgggctgtactgtttccccagcagcgactagaccagctgtcagaaatcattgagaggttcatctttgtcatgcctcctgtggaggcacctcccccttccctgcatgcctgccacccacctccttggctggccccacgtcaggcagccttccaggagcaattggcctctgagctctggccccgggctcgtcctttgcaccgtattgtgtgtaacatgcgcacccagttccctgacttaagactcatccagtatgattgcggaaagttgcagacgttggcagtgctgttgcggcagctcaaggcagagggccaccgagtgctcatcttcacccagatgacccgaatgctggatgtattggagcagtttctcacctaccatggccatctctacctgcgcctggatggatctactagagttgaacagagacaggccttgatggaacggttcaatgcagacaaacgcatattctgcttcatcctttcaactcggagtgggggtgtgggcgtgaacctgacaggagcagacactgttgttttttatgacagcgactggaatcccaccatggatgctcaggcccaggaccgctgtcaccgaattggccagacccgggatgtccacatatataggcttatcagtgaacggacagtggaggagaacatcctaaaaaaggcaaatcagaagagaatgttgggggacatggccattgagggaggcaacttcaccacagcctatttcaaacagcagaccatccgagagctgtttgatatgcccctggaggaaccttctagctcatccgtgccctctgcccctgaagaggaggaagagactgtggccagcaagcagactcatattctggagcaggcattgtgtcgggcagaagatgaagaggatatccgtgcagccacccaggccaaggctgaacaggtggctgagcttgcagaatttaatgagaacgatgggtttcctgctggtgagggagaggaagctggccggcctggggctgaggatgaggagatgtcccgggctgagcaggaaattgctgccctcgtagaacagctgacccccattgagcgctatgccatgaaattcctggaggcctcactggaggaggtgagccgagaggagctcaaacaggcagaagagcaagtggaagctgcccgcaaagacctggaccaagccaaggaggaggtgttccgcctaccccaagaggaggaggaggggccgggggctggggatgagagttcctgtgggactggtggaggcacccaccggcgcagtaaaaaggccaaagcccctgagaggccggggactcgtgtcagtgagcgtcttcgtggagcccgggctgagactcaaggggcaaaccacactcctgtcatatccgcccatcaaactcgcagcaccaccacaccaccccgctgcagtcctgccagggagcgagttcccaggccagcacctaggcctcgacccactccagcttcagctccggctgcaattcctgcccttgttcctgtcccagtttctgccccagtacccatttcagccccaaatccaataaccattctccctgtccatatcttgccttctcctccccctccttcacagattcctccttgttcttctcctgcctgcacccctcctcctgcctgtacccctccaccagctcatacaccgcctccagcccaaacctgtcttgtaactccttcctctcctctcttgcttggtccaccttctgtgcccatctctgcctcagtcactaatctccccttgggcttgaggcctgaggcagagctgtgtgcccaggcattggcatctccagagtccctggagctggcttctgtggccagttcagaaacctcctcactttctcttgtgccccctaaagatctgttgccagttgctgtggagatcctgcctgtgtcagagaagaacctttctctcaccccttctgcacccagcctgaccttggaggctggcagcatccccaatggtcaagagcaggaggcaccagattctgctgaggggaccacccttacagtgctgcctgaaggtgaggagttgcccctgtgtgtgagtgagagcaatggcctggagctcccaccctcagcagcatctgatgagccacttcaggagccactggaggctgacaggacctcggaagagctgacagaggccaagaccccaacctccagcccagagaagccacaggaactcgttacagctgaggttgcagctccatccacctcatcttcagccacttcctcgcctgagggtccttcacctgcccgacctcctcggcgtcgcaccagtgctgatgtggaaattaggggtcaagggactggtcggccaggacaaccaccaggccccaaagtgcttcgaaagctgccaggacggctggtaactgtggtagaggaaaaggaactggtgcggcggcggcggcagcagcggggagctgccagcaccctagtgcctggggtctctgagactagtgccagcccgggaagcccgtctgtccgcagcatgtcagggccagaatcctcccctcccattggtgggccctgtgaagctgctccttcatcctcactgcccactccaccccagcagcccttcattgctcgccgtcacattgagctgggggtgactggtggtggcagccccgagaatggagacggagcactgctcgccatcaccccacctgctgtgaaacgtcggagggggaggccccccaagaagaacaggtctccagcagatgctgggagaggtgtggatgaggcaccctcatccaccttgaagggaaaaaccaatggggctgacccagtccctgggcctgagaccctaattgttgcagatcctgtcctggaaccacagcttattcctgggccccagcctcttggaccccagccagttcacagacccaatcccctcctgtcacctgtggagaaaagaaggcgaggacgaccccctaaagcacgagatttgcccatccctgggaccatttcctctgcaggggatggcaactccgaaagtcggacacagccacccccacacccatcacccctaaccccactcccaccactgctagtttgtcccactgctactgttgccaacactgtcaccactgtcaccatttcaacgtccccacccaaacggaagaggggccgacctcccaagaatcctccatcacctcggcccagccagctccccgtcttggaccgtgacagcacttctgttctcgagagctgtggattggggaggcgacggcaaccccagggccaaggggagagtgagggtagttcctctgatgaggatggaagccgccccctcacccgcctggcccgccttcggcttgaagcagaaggaatgcgaggacggaagagtggagggtccatggtggtggctgtaattcaggatgacctggacttagcagatagcgggccaggcgggttggaattgacaccacctgtggtctcactaaccccaaaactgcgctcgacccggctgcgtccagggtctctagtccccccactagagactgagaagttgcctcgcaaacgagcaggggccccagttggtgggagtcctgggctggcaaagcggggccgcctacagcccccaagtcccctggggcctgagggttcagtagaggagtctgaggctgaagcctcaggtgaggaggaggaaggggatgggaccccacgccgacgtcctggcccccgccggcttgttgggaccaccaaccaaggggaccagcgcatcctgcgcagcagcgcccctccctccctggctggccctgctgttagtcacagaggccgcaaggccaagacgtgagtgggctgcccctccacctaggctttccaccgtggccactccctccatgaccaggcctgactctgttaaccactacttgaagtcttgagggggaaagcctccagggagacataggggccttctcccttcttcccaccaaagtagggggtaggcaactggttgtcatggaaatggggatcatcacagtccccttccccttcaccccacgtggctgggcagtgttaagggtggcaagatagtctctgtccccacccccttgtacttgattccccagctgtctttcacacagccccccacccttaggggaagggggaggggcttctctacaatgaggtttttttcttttttttttttttttaagaagaaaaaataataaacttagtttctgtatgagcatccgcgtaaggaggcttctgattttctggtctggtggagggttgggtgggaacttgggcatcgtttttctcctccctcttgttcttgcaaagatcctagcacctgatctctagcccaggactatatgttccaggcagaaatctacccaagaagagggaagattggtgaatttgatgtggtagggtgcctttccccagtcagtttgaagtcacagatatccttttcctctcatttcttttccctcggttcctagacgttcctcggagctctttgatgcctcagacctttcccttttatccctcttgctcaggtgcttcctttcacaactttttccagagggcaggcgtcctagctccagttgctccatcccttgggccctcccctgctcttcatctagccaaactggtttgagtcagccacaccccttcccagctccctgggctcttcacgtggtggctggccactcaaccccacccctgggcttggcttggagccctgagtcagctccatcaccacccaagccaaaccaaagctgaggcaggagccgaaactcagagtccttcaaggcctatagccaggtgatggaggacgaggagaaggcagtggagatcttgggcaacacggaagctgctcatcctccatcccccatccgctgctgctggctccgcctccgctgcttggcagctactagcattatctgtggctgctcttgcctgggagtcatggctctggtgtttgccatcaaggcggaagagcggcataaagcaggccggtccgaggaggcagtgcgctggggggcccgggcccggaaactcatcctggccagctttgctgtctggcttgctgtcctcattctgggtcccctgctgctgtggttgctctcctacgccatcgctcaggctgagtgaccctggatggcctctgctgagagccagccgagacctcctggatcctgcaatgcggcattgctaaggtcctgtgacagcagtggttggaaggatcctggttggaaggatggggactctctcaaggggctttggaagagctcttctagccctttataaaaggagggcagcagctgagactgatgagaggagggcagcctgctctgttctttcagggccccccacccccatctcccctaccctagcccaccctagggcctctacccagcgggaggggttgaagaccaggcctggttttattagaattcattttgtaataaaagccttttttagtggtgaaaaaaaaaaa

SEQ ID NO: 284534 - DNA, 4973 bp, Homo sapiens
cacatcaagcccgaatgatttcctattcgcctacacaattctccgatccgtccctaacaaactaggaggcgtccttgccctattactatccatcctcatcctagcaaagaatttgcatatataggcttatcagtgaacggacagtggaggagaacatcctaaaaaaggcaaatcagaagagaatgttgggggacatggccattgagggaggcaacttcaccacagcctatttcaaacagcagaccatccgagagctgtttgatatgcccctggaggaaccttctagctcatccgtgccctctgcccctgaagaggaggaagagactgtggccagcaagcagactcatattctggagcaggcattgtgtcgggcagaagatgaagaggatatccgtgcagccacccaggccaaggctgaacaggtggctgagcttgcagaatttaatgagaacgatgggtttcctgctggtgagggagaggaagctggccggcctggggctgaggatgaggagatgtcccgggctgagcaggaaattgctgccctcgtagaacagctgacccccattgagcgctatgccatgaaattcctggaggcctcactggaggaggtgagccgagaggagctcaaacaggcagaagagcaagtggaagctgcccgcaaagacctggaccaagccaaggaggaggtgttccgcctaccccaagaggaggaggaggggccgggggctggggatgagagttcctgtgggactggtggaggcacccaccggcgcagtaaaaaggccaaagcccctgagaggccggggactcgtgtcagtgagcgtcttcgtggagcccgggctgagactcaaggggcaaaccacactcctgtcatatccgcccatcaaactcgcagcaccaccacaccaccccgctgcagtcctgccagggagcgagttcccaggccagcacctaggcctcgacccactccagcttcagctccggctgcaattcctgcccttgttcctgtcccagtttctgccccagtacccatttcagccccaaatccaataaccattctccctgtccatatcttgccttctcctccccctccttcacagattcctccttgttcttctcctgcctgcacccctcctcctgcctgtacccctccaccagctcatacaccgcctccagcccaaacctgtcttgtaactccttcctctcctctcttgcttggtccaccttctgtgcccatctctgcctcagtcactaatctccccttgggcttgaggcctgaggcagagctgtgtgcccaggcattggcatctccagagtccctggagctggcttctgtggccagttcagaaacctcctcactttctcttgtgccccctaaagatctgttgccagttgctgtggagatcctgcctgtgtcagagaagaacctttctctcaccccttctgcacccagcctgaccttggaggctggcagcatccccaatggtcaagagcaggaggcaccagattctgctgaggggaccacccttacagtgctgcctgaaggtgaggagttgcccctgtgtgtgagtgagagcaatggcctggagctcccaccctcagcagcatctgatgagccacttcaggagccactggaggctgacaggacctcggaagagctgacagaggccaagaccccaacctccagcccagagaagccacaggaactcgttacagctgaggttgcagctccatccacctcatcttcagccacttcctcgcctgagggtccttcacctgcccgacctcctcggcgtcgcaccagtgctgatgtggaaattaggggtcaagggactggtcggccaggacaaccaccaggccccaaagtgcttcgaaagctgccaggacggctggtaactgtggtagaggaaaaggaactggtgcggcggcggcggcagcagcggggagctgccagcaccctagtgcctggggtctctgagactagtgccagcccgggaagcccgtctgtccgcagcatgtcagggccagaatcctcccctcccattggtgggccctgtgaagctgctccttcatcctcactgcccactccaccccagcagcccttcattgctcgccgtcacattgagctgggggtgactggtggtggcagccccgagaatggagacggagcactgctcgccatcaccccacctgctgtgaaacgtcggagggggaggccccccaagaagaacaggtctccagcagatgctgggagaggtgtggatgaggcaccctcatccaccttgaagggaaaaaccaatggggctgacccagtccctgggcctgagaccctaattgttgcagatcctgtcctggaaccacagcttattcctgggccccagcctcttggaccccagccagttcacagacccaatcccctcctgtcacctgtggagaaaagaaggcgaggacgaccccctaaagcacgagatttgcccatccctgggaccatttcctctgcaggggatggcaactccgaaagtcggacacagccacccccacacccatcacccctaaccccactcccaccactgctagtttgtcccactgctactgttgccaacactgtcaccactgtcaccatttcaacgtccccacccaaacggaagaggggccgacctcccaagaatcctccatcacctcggcccagccagctccccgtcttggaccgtgacagcacttctgttctcgagagctgtggattggggaggcgacggcaaccccagggccaaggggagagtgagggtagttcctctgatgaggatggaagccgccccctcacccgcctggcccgccttcggcttgaagcagaaggaatgcgaggacggaagagtggagggtccatggtggtggctgtaattcaggatgacctggacttagcagatagcgggccaggcgggttggaattgacaccacctgtggtctcactaaccccaaaactgcgctcgacccggctgcgtccagggtctctagtccccccactagagactgagaagttgcctcgcaaacgagcaggggccccagttggtgggagtcctgggctggcaaagcggggccgcctacagcccccaagtcccctggggcctgagggttcagtagaggagtctgaggctgaagcctcaggtgaggaggaggaaggggatgggaccccacgccgacgtcctggcccccgccggcttgttgggaccaccaaccaaggggaccagcgcatcctgcgcagcagcgcccctccctccctggctggccctgctgttagtcacagaggccgcaaggccaagacgtgagtgggctgcccctccacctaggctttccaccgtggccactccctccatgaccaggcctgactctgttaaccactacttgaagtcttgagggggaaagcctccagggagacataggggccttctcccttcttcccaccaaagtagggggtaggcaactggttgtcatggaaatggggatcatcacagtccccttccccttcaccccacgtggctgggcagtgttaagggtggcaagatagtctctgtccccacccccttgtacttgattccccagctgtctttcacacagccccccacccttaggggaagggggaggggcttctctacaatgaggtttttttcttttttttttttttttaagaagaaaaaataataaacttagtttctgtatgagcatccgcgtaaggaggcttctgattttctggtctggtggagggttgggtgggaacttgggcatcgtttttctcctccctcttgttcttgcaaagatcctagcacctgatctctagcccaggactatatgttccaggcagaaatctacccaagaagagggaagattggtgaatttgatgtggtagggtgcctttccccagtcagtttgaagtcacagatatccttttcctctcatttcttttccctcggttcctagacgttcctcggagctctttgatgcctcagacctttcccttttatccctcttgctcaggtgcttcctttcacaactttttccagagggcaggcgtcctagctccagttgctccatcccttgggccctcccctgctcttcatctagccaaactggtttgagtcagccacaccccttcccagctccctgggctcttcacgtggtggctggccactcaaccccacccctgggcttggcttggagccctgagtcagctccatcaccacccaagccaaaccaaagctgaggcaggagccgaaactcagagtccttcaaggcctatagccaggtgatggaggacgaggagaaggcagtggagatcttgggcaacacggaagctgctcatcctccatcccccatccgctgctgctggctccgcctccgctgcttggcagctactagcattatctgtggctgctcttgcctgggagtcatggctctggtgtttgccatcaaggcggaagagcggcataaagcaggccggtccgaggaggcagtgcgctggggggcccgggcccggaaactcatcctggccagctttgctgtctggcttgctgtcctcattctgggtcccctgctgctgtggttgctctcctacgccatcgctcaggctgagtgaccctggatggcctctgctgagagccagccgagacctcctggatcctgcaatgcggcattgctaaggtcctgtgacagcagtggttggaaggatcctggttggaaggatggggactctctcaaggggctttggaagagctcttctagccctttataaaaggagggcagcagctgagactgatgagaggagggcagcctgctctgttctttcagggccccccacccccatctcccctaccctagcccaccctagggcctctacccagcgggaggggttgaagaccaggcctggttttattagaattcattttgtaataaaagccttttttagtggtgaaaaaaaaaaa

SEQ ID NO: 284535 - DNA, 4124 bp, Homo sapiens
gaggtgaggtgactctagcaggatccctccgccatcaaactcgcagcaccaccacaccaccccgctgcagtcctgccagggagcgagttcccaggccagcacctaggcctcgacccactccagcttcagctccggctgcaattcctgcccttgttcctgtcccagtttctgccccagtacccatttcagccccaaatccaataaccattctccctgtccatatcttgccttctcctccccctccttcacagattcctccttgttcttctcctgcctgcacccctcctcctgcctgtacccctccaccagctcatacaccgcctccagcccaaacctgtcttgtaactccttcctctcctctcttgcttggtccaccttctgtgcccatctctgcctcagtcactaatctccccttgggcttgaggcctgaggcagagctgtgtgcccaggcattggcatctccagagtccctggagctggcttctgtggccagttcagaaacctcctcactttctcttgtgccccctaaagatctgttgccagttgctgtggagatcctgcctgtgtcagagaagaacctttctctcaccccttctgcacccagcctgaccttggaggctggcagcatccccaatggtcaagagcaggaggcaccagattctgctgaggggaccacccttacagtgctgcctgaaggtgaggagttgcccctgtgtgtgagtgagagcaatggcctggagctcccaccctcagcagcatctgatgagccacttcaggagccactggaggctgacaggacctcggaagagctgacagaggccaagaccccaacctccagcccagagaagccacaggaactcgttacagctgaggttgcagctccatccacctcatcttcagccacttcctcgcctgagggtccttcacctgcccgacctcctcggcgtcgcaccagtgctgatgtggaaattaggggtcaagggactggtcggccaggacaaccaccaggccccaaagtgcttcgaaagctgccaggacggctggtaactgtggtagaggaaaaggaactggtgcggcggcggcggcagcagcggggagctgccagcaccctagtgcctggggtctctgagactagtgccagcccgggaagcccgtctgtccgcagcatgtcagggccagaatcctcccctcccattggtgggccctgtgaagctgctccttcatcctcactgcccactccaccccagcagcccttcattgctcgccgtcacattgagctgggggtgactggtggtggcagccccgagaatggagacggagcactgctcgccatcaccccacctgctgtgaaacgtcggagggggaggccccccaagaagaacaggtctccagcagatgctgggagaggtgtggatgaggcaccctcatccaccttgaagggaaaaaccaatggggctgacccagtccctgggcctgagaccctaattgttgcagatcctgtcctggaaccacagcttattcctgggccccagcctcttggaccccagccagttcacagacccaatcccctcctgtcacctgtggagaaaagaaggcgaggacgaccccctaaagcacgagatttgcccatccctgggaccatttcctctgcaggggatggcaactccgaaagtcggacacagccacccccacacccatcacccctaaccccactcccaccactgctagtttgtcccactgctactgttgccaacactgtcaccactgtcaccatttcaacgtccccacccaaacggaagaggggccgacctcccaagaatcctccatcacctcggcccagccagctccccgtcttggaccgtgacagcacttctgttctcgagagctgtggattggggaggcgacggcaaccccagggccaaggggagagtgagggtagttcctctgatgaggatggaagccgccccctcacccgcctggcccgccttcggcttgaagcagaaggaatgcgaggacggaagagtggagggtccatggtggtggctgtaattcaggatgacctggacttagcagatagcgggccaggcgggttggaattgacaccacctgtggtctcactaaccccaaaactgcgctcgacccggctgcgtccagggtctctagtccccccactagagactgagaagttgcctcgcaaacgagcaggggccccagttggtgggagtcctgggctggcaaagcggggccgcctacagcccccaagtcccctggggcctgagggttcagtagaggagtctgaggctgaagcctcaggtgaggaggaggaaggggatgggaccccacgccgacgtcctggcccccgccggcttgttgggaccaccaaccaaggggaccagcgcatcctgcgcagcagcgcccctccctccctggctggccctgctgttagtcacagaggccgcaaggccaagacgtgagtgggctgcccctccacctaggctttccaccgtggccactccctccatgaccaggcctgactctgttaaccactacttgaagtcttgagggggaaagcctccagggagacataggggccttctcccttcttcccaccaaagtagggggtaggcaactggttgtcatggaaatggggatcatcacagtccccttccccttcaccccacgtggctgggcagtgttaagggtggcaagatagtctctgtccccacccccttgtacttgattccccagctgtctttcacacagccccccacccttaggggaagggggaggggcttctctacaatgaggtttttttcttttttttttttttttaagaagaaaaaataataaacttagtttctgtatgagcatccgcgtaaggaggcttctgattttctggtctggtggagggttgggtgggaacttgggcatcgtttttctcctccctcttgttcttgcaaagatcctagcacctgatctctagcccaggactatatgttccaggcagaaatctacccaagaagagggaagattggtgaatttgatgtggtagggtgcctttccccagtcagtttgaagtcacagatatccttttcctctcatttcttttccctcggttcctagacgttcctcggagctctttgatgcctcagacctttcccttttatccctcttgctcaggtgcttcctttcacaactttttccagagggcaggcgtcctagctccagttgctccatcccttgggccctcccctgctcttcatctagccaaactggtttgagtcagccacaccccttcccagctccctgggctcttcacgtggtggctggccactcaaccccacccctgggcttggcttggagccctgagtcagctccatcaccacccaagccaaaccaaagctgaggcaggagccgaaactcagagtccttcaaggcctatagccaggtgatggaggacgaggagaaggcagtggagatcttgggcaacacggaagctgctcatcctccatcccccatccgctgctgctggctccgcctccgctgcttggcagctactagcattatctgtggctgctcttgcctgggagtcatggctctggtgtttgccatcaaggcggaagagcggcataaagcaggccggtccgaggaggcagtgcgctggggggcccgggcccggaaactcatcctggccagctttgctgtctggcttgctgtcctcattctgggtcccctgctgctgtggttgctctcctacgccatcgctcaggctgagtgaccctggatggcctctgctgagagccagccgagacctcctggatcctgcaatgcggcattgctaaggtcctgtgacagcagtggttggaaggatcctggttggaaggatggggactctctcaaggggctttggaagagctcttctagccctttataaaaggagggcagcagctgagactgatgagaggagggcagcctgctctgttctttcagggccccccacccccatctcccctaccctagcccaccctagggcctctacccagcgggaggggttgaagaccaggcctggttttattagaattcattttgtaataaaagccttttttagtggtgaaaaaaaaaaa

SEQ ID NO: 284536 - DNA, 7772 bp, Homo sapiens
gcggccgagacggcggcggccattttggtgaggcctcgggagcggcagcggcggttcgctgggagtagcgtctgccctttttcccacccaccgtccgcatctgtgtgctgcgcgaagaggcagtggaggcaaggcggtggcagtagccgcagtctccaggggagtttaaaggccgcgaaggcggtggccaagagggggccctcccccctcctaggcgggagggggggtggtgcgcacgcccccgaggacgcaggtgtgattcccttcagtacggcggcaccgtggaagtgcagactttcacagggggtgtggtctcagctcacacaggtgctccagaggctggtggacctgagcggaggctgggacgccctggtgggccccgggccctggaaggcgggtcccggtggccggtggcccagaatgaggccagctcccagcatgccctgcagccggacgccagcccctcggccagcagtactggtgataacaacccagtcattcttcaggcatccaagggggagcctgggagtgggaccatgcagagcagcccctcccctgctcaccctcagctcccagtcctacagacacagatggtgtcggacggcatgacaggcagcaatcctgtgtcccctgcctcatccagttccccagcctctagtggggcaggcggcatctccccgcagcacatagctcaagattcctcactggatggacctccaggccccccagatggtgccacagtgcccctggaggggttcagcttatcccaggctgctgacctggctaacaagggcccgaagtgggagaagagccatgccgaaattgcagaacaggccaagcatgaggccgagatcgagactcggattgctgagctgcggaaggagggtttctggtcactgaagaggctgcctaaggtgccagagccccctcgccccaaaggtcactgggactatttgtgcgaagagatgcagtggctctctgctgactttgctcaggagcgccgttggaaacggggtgtggcccggaaggtggtgcgcatggtgatccggcaccacgaggagcagcggcagaaagaggaacgggcccggagggaggagcaggccaagctgcgtcgaattgcttccaccatggccaaggatgtcaggcagttctggagcaatgtggagaaggtggtgcaattcaagcaacagtcccggcttgaggaaaagcgcaaaaaagccctggacctgcatttggacttcattgtggggcaaactgaaaagtactcggaccttctgtctcagagcctcaaccagccattaacctccagcaaagcaggctcttccccttgcctcggctcttcctcagctgcctccagtcctccaccccctgcttctcgcctggatgatgaagatggggactttcaaccccaagaggatgaggaagaggatgatgaggaaacgattgaagttgaagaacaacaggaaggcaatgatgcagaggcccagaggcgtgagattgagctgcttcgccgtgagggagaattgccactggaagagctgctccgttcccttccccctcagctgttggaagggccttccagcccctctcaaaccccctcatctcatgatagtgacacccgagatgggcctgaagaaggtgctgaagaagagccccctcaggtgttggagataaagcccccaccctctgctgtcacacagcgcaacaaacagccttggcatccagatgaagatgatgaagagtttactgccaacgaagaggaagcggaggatgaagaggatactatagcagctgaggaacagttggaaggggaggtggatcatgccatggagctgagcgagttggctcgagaaggtgagctttccatggaggagctattgcagcagtatgcaggagcctatgccccaggctctgggagcagtgaagatgaggatgaagatgaggttgatgctaatagctctgactgtgaaccagaggggcccgtggaagcggaagagcctcctcaggaggatagtagcagtcagtcagactctgtggaggaccggagtgaggatgaggaagatgaacattcagaggaggaagaaacaagtggaagttcagcatcagaggaatctgagtctgaagagtctgaggatgcccaatcacagagccaagcagatgaagaggaggaagatgatgattttggggtggagtacttgcttgccagggatgaagagcagagtgaggcagatgcaggcagtgggcctcctactccagggcccactactctaggtccaaagaaagaaattactgacattgctgcagcagctgaaagtctccagcccaagggttacacgctggccacgacccaggtaaagacgcccattcccctgcttctgcggggccagctccgggagtaccagcacattgggctagactggctggttaccatgtatgagaagaagcttaatggcattcttgctgatgagatggggcttgggaagaccatccagaccatctctctgcttgcccacttggcttgtgagaaaggtaactggggtccccatttaatcattgttcccaccagcgtgatgttgaactgggagatggagttgaaacgttggtgccccagctttaaaatcctcacttactatggagcccagaaagagaggaagctcaagcggcagggctggaccaagcccaatgcctttcatgtgtgtatcacatcttacaagctggtgctgcaggaccaccaggccttccgtcgcaagaactggcgctatctcattctggatgaggcgcagaacatcaagaacttcaagtcacagcgctggcagtcactcctcaacttcaacagccagagacgcctgctcctgacaggaactcccttgcagaacagcctcatggagctgtggtccttgatgcactttttgatgccccatgtcttccagtctcatcgcgagttcaaggagtggttctctaatcccctaactggcatgattgagggcagccaagagtataatgaaggtctagtcaaacgcctccacaaggttttgaggccttttttactgcgccgagttaaggtggatgttgagaagcagatgcccaaaaagtacgagcatgttatccgctgcaggctctccaagcgtcaacgctgtctctatgatgacttcatggcacagaccacaactaaggagacactagccacaggccatttcatgagcgtcatcaacattttgatgcagctgagaaaagtttgcaatcatccaaatctgttcgaccctcgaccggttacctcccctttcatcaccccaggcatctgcttcagcaccgcctctctggtgctaagggccacggatgtccatcccctccagcggatagacatgggtcgatttgaccttattggcctggaaggtcgtgtctctcgatatgaggcagacacatttctgccccggcaccgcctctctcgccgggtactgttagaagtggctactgctcctgaccccccaccccggcccaagccagtcaagatgaaggtcaacaggatgctgcagccagtacctaagcaagaaggccggacagtggtggtggtgaacaacccacgggcgcccctgggccctgtcccagttcgacctcctccaggtcctgagctctcagcccagcccacccctggcccagtcccccaagtgctgccagcatcactgatggtttcagcctcacctgccgggcccccgcttattcctgcatctcggcctcctggccctgtcctcttgcctccactgcagcccaacagtggttctctcccccaggtgttgccatcccccctgggggtcctgagtgggacctcacggcctcccacgccaaccttgtccctaaagccaacaccacctgccccagttcgcctgagcccagccccacctccaggctcctctagcctgttgaagcccctgacagtgccaccaggctacaccttccctcctgctgctgccaccaccacttctaccaccacggcaactgctaccaccacagcagtgccagctccgactcctgcaccacagcgcctcattctatctcccgatatgcaggctcgcctgccctcaggcgaagtggtcagcatcgggcagttagcctcactggcacaacgtccagtggctaatgcagggggaagcaaacctctcaccttccaaatccagggcaacaagctgactttgactggtgcccaggtgcgccagcttgctgtggggcagccccgcccgctgcaaatgccaccaaccatggtgaataatacaggcgtggtgaagattgtagtgagacaagcccctcgggatggactgactcctgttcctccattggccccagcaccccggcctccgagctctgggcttccagctgtgttgaatccacgccccacgttaacccctggccggctacccacacctactctgggtactgctcgagcccccatgcccacacccactctggtgaggcctcttctcaagctggtccacagtccttcacctgaagtcagtgcttcagcccccggagctgcccccttgaccatctcttctcctctccacgtgccatcctcactccctgggccagcctcttctccaatgccaattcccaactcctctccccttgctagtcctgtgtcctctacagtctcagttccattgtcatcttcactccccatctctgtccccaccacacttcctgccccagcctcggctccactcaccatccccatctcagcccccttgactgtttctgcttcgggcccagctctgttgaccagtgtgactccaccattggcacctgttgtcccagcggctcctggacctccctccttggcaccatctggtgcttccccgtcagcatcagccttgactctaggtttggccacagctccatccctgtcttcatctcagacacctggtcaccctctgttgttggctcccacctcttcacatgttccagggttgaactcaaccgtggccccagcatgctcacctgtcctggtgccagcttcggctctggccagtccttttccgtcagcaccaaatccagctccagctcaggcttcccttctggctccagcatcttctgcatctcaggctctagccacccctctggctcctatggcggctccacagacagcaattctggctccttctccagctcctcctctggctcctcttccggtcctggcaccatcgccaggtgctgctcctgtcctggcttcatcacagactccggttccagttatggctccatcgtctactccaggaacctctttagcctcagcttcaccggtaccagctccaacccctgtgttggctccatcatcaactcaaactatgctaccagccccggttccgtcacctctcccgagcccggcttctacgcagacactggccctagccccagctttagcacccactcttggaggctcatctccatctcagacactctctttgggaacggggaacccccagggaccctttccaactcagacattgtcattaactccagcatcatccctggtaccaactccagcccagacactgtctttggcaccaggaccaccactgggtccaactcagacgctgtctctggctccagcaccccctctggctccagcttctccagtgggcccagccccagctcacacgctgactttggctccagcatcgtcatctgcttcactcctggccccagcttcagtgcagacactgaccttgagccctgccccagttcctaccctgggcccggccgcagctcagaccttggcgctggccccagcctccacacagtccccagcttcccaggcatcttcccttgtggtttcggcatctggtgccgctcccttgcctgtcaccatggtatcccggctgcctgtttccaaggatgagcctgacacactgacattgcgctctggtccccccagccctccctccactgctacctcgtttggtggcccccggcctcgacgccagccccccccaccacctcgttcccctttttatctggactccctggaggaaaagcggaagcggcagcggtctgaacgcctggaacggattttccaacttagtgaggctcatggggccctggcacctgtgtatgggactgaagtcctggatttctgtaccctgccccaacctgttgccagccccatcggccctcgttctcctggccccagccaccccaccttttggacttataccgaggctgcccaccgggctgtactgtttccccagcagcgactagaccagctgtcagaaatcattgagaggttcatctttgtcatgcctcctgtggaggcacctcccccttccctgcatgcctgccacccacctccttggctggccccacgtcaggcagccttccaggagcaattggcctctgagctctggccccgggctcgtcctttgcaccgtattgtgtgtaacatgcgcacccagttccctgacttaagactcatccagtatgattgcggaaagttgcagacgttggcagtgctgttgcggcagctcaaggcagagggccaccgagtgctcatcttcacccagatgacccgaatgctggatgtattggagcagtttctcacctaccatggccatctctacctgcgcctggatggatctactagagttgaacagagacaggccttgatggaacggttcaatgcagacaaacgcatattctgcttcatcctttcaactcggagtgggggtgtgggcgtgaacctgacaggagcagacactgttgttttttatgacagcgactggaatcccaccatggatgctcaggcccaggaccgctgtcaccgaattggccagacccgggatgtccacatatataggcttatcagtgaacggacagtggaggagaacatcctaaaaaaggcaaatcagaagagaatgttgggggacatggccattgagggaggcaacttcaccacagcctatttcaaacagcagaccatccgagagctgtttgatatgcccctggaggaaccttctagctcatccgtgccctctgcccctgaagaggaggaagagactgtggccagcaagcagactcatattctggagcaggcattgtgtcgggcagaagatgaagaggatatccgtgcagccacccaggccaaggctgaacaggtggctgagcttgcagaatttaatgagaacgatgggtttcctgctggtgagggagaggaagctggccggcctggggctgaggatgaggagatgtcccgggctgagcaggaaattgctgccctcgtagaacagctgacccccattgagcgctatgccatgaaattcctggaggcctcactggaggaggtgagccgagaggagctcaaacaggcagaagagcaagtggaagctgcccgcaaagacctggaccaagccaaggaggaggtgttccgcctaccccaagaggaggaggaggggccgggggctggggatgagagttcctgtgggactggtggaggcacccaccggcgcagtaaaaaggccaaagcccctgagaggccggggactcgtgtcagtgagcgtcttcgtggagcccgggctgagactcaaggggcaaaccacactcctgtcatatccgcccatcaaactcgcagcaccaccacaccaccccgctgcagtcctgccagggagcgagttcccaggccagcacctaggcctcgacccactccagcttcagctccggctgcaattcctgcccttgttcctgtcccagtttctgcccgtttgctcagacctgccagctgctcagca

SEQ ID NO: 284537 - DNA, 5654 bp, Homo sapiens
gcggccgagacggcggcggccattttggtgaggcctcgggagcggcagcggcggttcgctgggagtagcgtctgccctttttcccacccaccgtccgcatctgtgtgctgcgcgaagaggcagtggaggcaaggcggtggcagtagccgcagtctccaggggagtttaaaggccgcgaaggcggtggccaagagggggccctcccccctcctaggcgggagggggggtggtgcgcacgcccccgaggacgcaggtgtgattcccttcagtacggcggcaccgtggaagtgcagactttcacagggggtgtggtctcagctcacacaggtgctccagaggctggtggacctgagcggaggctgggacgccctggtgggccccgggccctggaaggcgggtcccggtggccggtggcccagaatgaggccagctcccagcatgccctgcagccggacgccagcccctcggccagcagtactggtgataacaacccagtcattcttcaggcatccaagggggagcctgggagtgggaccatgcagagcagcccctcccctgctcaccctcagctcccagtcctacagacacagatggtgtcggacggcatgacaggcagcaatcctgtgtcccctgcctcatccagttccccagcctctagtggggcaggcggcatctccccgcagcacatagctcaagattcctcactggatggacctccaggccccccagatggtgccacagtgcccctggaggggttcagcttatcccaggctgctgacctggctaacaagggcccgaagtgggagaagagccatgccgaaattgcagaacaggccaagcatgaggccgagatcgagactcggattgctgagctgcggaaggagggtttctggtcactgaagaggctgcctaaggtgccagagccccctcgccccaaaggtcactgggactatttgtgcgaagagatgcagtggctctctgctgactttgctcaggagcgccgttggaaacggggtgtggcccggaaggtggtgcgcatggtgatccggcaccacgaggagcagcggcagaaagaggaacgggcccggagggaggagcaggccaagctgcgtcgaattgcttccaccatggccaaggatgtcaggcagttctggagcaatgtggagaaggtggtgcaattcaagcaacagtcccggcttgaggaaaagcgcaaaaaagccctggacctgcatttggacttcattgtggggcaaactgaaaagtactcggaccttctgtctcagagcctcaaccagccattaacctccagcaaagcaggctcttccccttgcctcggctcttcctcagctgcctccagtcctccaccccctgcttctcgcctggatgatgaagatggggactttcaaccccaagaggatgaggaagaggatgatgaggaaacgattgaagttgaagaacaacaggaaggcaatgatgcagaggcccagaggcgtgagattgagctgcttcgccgtgagggagaattgccactggaagagctgctccgttcccttccccctcagctgttggaagggccttccagcccctctcaaaccccctcatctcatgatagtgacacccgagatgggcctgaagaaggtgctgaagaagagccccctcaggtgttggagataaagcccccaccctctgctgtcacacagcgcaacaaacagccttggcatccagatgaagatgatgaagagtttactgccaacgaagaggaagcggaggatgaagaggatactatagcagctgaggaacagttggaaggggaggtggatcatgccatggagctgagcgagttggctcgagaaggtgagctttccatggaggagctattgcagcagtatgcaggagcctatgccccaggctctgggagcagtgaagatgaggatgaagatgaggttgatgctaatagctctgactgtgaaccagaggggcccgtggaagcggaagagcctcctcaggaggatagtagcagtcagtcagactctgtggaggaccggagtgaggatgaggaagatgaacattcagaggaggaagaaacaagtggaagttcagcatcagaggaatctgagtctgaagagtctgaggatgcccaatcacagagccaagcagatgaagaggaggaagatgatgattttggggtggagtacttgcttgccagggatgaagagcagagtgaggcagatgcaggcagtgggcctcctactccagggcccactactctaggtccaaagaaagaaattactgacattgctgcagcagctgaaagtctccagcccaagggttacacgctggccacgacccaggtaaagacgcccattcccctgcttctgcggggccagctccgggagtaccagcacattgggctagactggctggttaccatgtatgagaagaagcttaatggcattcttgctgatgagatggggcttgggaagaccatccagaccatctctctgcttgcccacttggcttgtgagaaaggtaactggggtccccatttaatcattgttcccaccagcgtgatgttgaactgggagatggagttgaaacgttggtgccccagctttaaaatcctcacttactatggagcccagaaagagaggaagctcaagcggcagggctggaccaagcccaatgcctttcatgtgtgtatcacatcttacaagctggtgctgcaggaccaccaggccttccgtcgcaagaactggcgctatctcattctggatgaggcgcagaacatcaagaacttcaagtcacagcgctggcagtcactcctcaacttcaacagccagagacgcctgctcctgacaggaactcccttgcagaacagcctcatggagctgtggtccttgatgcactttttgatgccccatgtcttccagtctcatcgcgagttcaaggagtggttctctaatcccctaactggcatgattgagggcagccaagagtataatgaaggtctagtcaaacgcctccacaaggttttgaggccttttttactgcgccgagttaaggtggatgttgagaagcagatgcccaaaaagtacgagcatgttatccgctgcaggctctccaagcgtcaacgctgtctctatgatgacttcatggcacagaccacaactaaggagacactagccacaggccatttcatgagcgtcatcaacattttgatgcagctgagaaaagtttgcaatcatccaaatctgttcgaccctcgaccggttacctcccctttcatcaccccaggcatctgcttcagcaccgcctctctggtgctaagggccacggatgtccatcccctccagcggatagacatgggtcgatttgaccttattggcctggaaggtcgtgtctctcgatatgaggcagacacatttctgccccggcaccgcctctctcgccgggtactgttagaagtggctactgctcctgaccccccaccccggcccaagccagtcaagatgaaggtcaacaggatgctgcagccagtacctaagcaagaaggccggacagtggtggtggtgaacaacccacgggcgcccctgggccctgtcccagttcgacctcctccaggtcctgagctctcagcccagcccacccctggcccagtcccccaagtgctgccagcatcactgatggtttcagcctcacctgccgggcccccgcttattcctgcatctcggcctcctggccctgtcctcttgcctccactgcagcccaacagtggttctctcccccaggtgttgccatcccccctgggggtcctgagtgggacctcacggcctcccacgccaaccttgtccctaaagccaacaccacctgccccagttcgcctgagcccagccccacctccaggctcctctagcctgttgaagcccctgacagtgccaccaggctacaccttccctcctgctgctgccaccaccacttctaccaccacggcaactgctaccaccacagcagtgccagctccgactcctgcaccacagcgcctcattctatctcccgatatgcaggctcgcctgccctcaggcgaagtggtcagcatcgggcagttagcctcactggcacaacgtccagtggctaatgcagggggaagcaaacctctcaccttccaaatccagggcaacaagctgactttgactggtgcccaggtgcgccagcttgctgtggggcagccccgcccgctgcaaatgccaccaaccatggtgaataatacaggcgtggtgaagattgtagtgagacaagcccctcgggatggactgactcctgttcctccattggccccagcaccccggcctccgagctctgggcttccagctgtgttgaatccacgccccacgttaacccctggccggctacccacacctactctgggtactgctcgagcccccatgcccacacccactctggtgaggcctcttctcaagctggtccacagtccttcacctgaagtcagtgcttcagcccccggagctgcccccttgaccatctcttctcctctccacgtgccatcctcactccctgggccagcctcttctccaatgccaattcccaactcctctccccttgctagtcctgtgtcctctacagtctcagttccattgtcatcttcactccccatctctgtccccaccacacttcctgccccagcctcggctccactcaccatccccatctcagcccccttgactgtttctgcttcgggcccagctctgttgaccagtgtgactccaccattggcacctgttgtcccagcggctcctggacctccctccttggcaccatctggtgcttccccgtcagcatcagccttgactctaggtttggccacagctccatccctgtcttcatctcagacacctggtcaccctctgttgttggctcccacctcttcacatgttccagggttgaactcaaccgtggccccagcatgctcacctgtcctggtgccagcttcggctctggccagtccttttccgtcagcaccaaatccagctccagctcaggcttcccttctggctccagcatcttctgcatctcaggctctagccacccctctggctcctatggcggctccacagacagcaattctggctccttctccagctcctcctctggctcctcttccggtcctggcaccatcgccaggtgctgctcctgtcctggcttcatcacagactccggttccagttatggctccatcgtctactccaggaacctctttagcctcagcttcaccggtaccagctccaacccctgtgttggctccatcatcaactcaaactatgctaccagccccggttccgtcacctctcccgagcccggcttctacgcagacactggccctagccccagctttagcacccactcttggaggctcatctccatctcagacactctctttgggaacggggaacccccagggaccctttccaactcagacattgtcattaactccagcatcatccctggtaccaactccagcccagacactgtctttggcaccaggaccacgtgccatcctcactcactgggccagcctcttctccaatgccgattcccgactcctctcccctgctagtgcctgtgtcctctacagtcta

SEQ ID NO: 284538 - DNA, 1528 bp, Homo sapiens
acttgggttcagggagccaaggtggtttcattttgtctgggttgtaggggaatggttggagataagggtagaaaggtggtttgatgccagggcctagaggacctgagaagtagggagacaagaaatgattaagtagggcatcattttgcaggtttctgtgtggtaatgaggtcatttagactcagtgtactagtctgattgtgttatgtggcctgggttaaattggagagaggaggtggcagggaggcagcatagcagaggaagccctgacttagggaagtaaagtctttctgatgtttggttttagtggtaataaagggcttacttgggtacattttccttacctttctccattcccataactgttttcatgtaaaatggctgctttgcttgaaacgggttgcagtacctagggtcctgctctctgacatctataatactcagggggcagcctcttgggaatttgggggaattgtagagtcctttgaaatacagattaaaataacagattcatagcagctttcaagagtttgtatttttcctccttctcggtgtgcacctgtcatttggcttcttcccacttgttgaaacactaaataatacagataatgccttgtctacactggcttgctttcaaagactcagaacctcaagcttaggtaaaaggattccagccacacatttcctctcctgctcggtgactcactaggaggaattcccccgtaaggcaacagtccttgagtgccaggctatgcccatgagcaccagtatggtctgagaaggttggagtctggcaaacaaggccaagggctctgttgttgggctcacaagtaccttgactatcgcccacaggtgatggaggacgaggagaaggcagtggagatcttgggcaacacggaagctgctcatcctccatcccccatccgctgctgctggctccgcctccgctgcttggcagctactagcattatctgtggctgctcttgcctgggagtcatggctctggtgtttgccatcaaggcggaagagcggcataaagcaggccggtccgaggaggcagtgcgctggggggcccgggcccggaaactcatcctggccagctttgctgtctggcttgctgtcctcattctgggtcccctgctgctgtggttgctctcctacgccatcgctcaggctgagtgaccctggatggcctctgctgagagccagccgagacctcctggatcctgcaatgcggcattgctaaggtcctgtgacagcagtggttggaaggatcctggttggaaggatggggactctctcaaggggctttggaagagctcttctagccctttataaaaggagggcagcagctgagactgatgagaggagggcagcctgctctgttctttcagggccccccacccccatctcccctaccctagcccaccctagggcctctacccagcgggaggggttgaagaccaggcctggttttattagaattcattttgtaataaaagccttttttagtggtgaaaaaaaaaaa

SEQ ID NO: 284539 - DNA, 4724 bp, Homo sapiens
gcggccgagacggcggcggccattttggtgaggcctcgggagcggcagcggcggttcgctgggagtagcgtctgccctttttcccacccaccgtccgcatctgtgtgctgcgcgaagaggcagtggaggcaaggcggtggcagtagccgcagtctccaggggagtttaaaggccgcgaaggcggtggccaagagggggccctcccccctcctaggcgggagggggggtggtgcgcacgcccccgaggacgcaggtgtgattcccttcagtacggcggcaccgtggaagtgcagactttcacagggggtgtggtctcagctcacacaggtgctccagaggctggtggacctgagcggaggctgggacgccctggtgggccccgggccctggaaggcgggtcccggtggccggtggcccagaatgaggccagctcccagcatgccctgcagccggacgccagcccctcggccagcagtactggtgataacaacccagtcattcttcaggcatccaagggggagcctgggagtgggaccatgcagagcagcccctcccctgctcaccctcagctcccagtcctacagacacagatggtgtcggacggcatgacaggcagcaatcctgtgtcccctgcctcatccagttccccagcctctagtggggcaggcggcatctccccgcagcacatagctcaagattcctcactggatggacctccaggccccccagatggtgccacagtgcccctggaggggttcagcttatcccaggctgctgacctggctaacaagggcccgaagtgggagaagagccatgccgaaattgcagaacaggccaagcatgaggccgagatcgagactcggattgctgagctgcggaaggagggtttctggtcactgaagaggctgcctaaggtgccagagccccctcgccccaaaggtcactgggactatttgtgcgaagagatgcagtggctctctgctgactttgctcaggagcgccgttggaaacggggtgtggcccggaaggtggtgcgcatggtgatccggcaccacgaggagcagcggcagaaagaggaacgggcccggagggaggagcaggccaagctgcgtcgaattgcttccaccatggccaaggatgtcaggcagttctggagcaatgtggagaaggtggtgcaattcaagcaacagtcccggcttgaggaaaagcgcaaaaaagccctggacctgcatttggacttcattgtggggcaaactgaaaagtactcggaccttctgtctcagagcctcaaccagccattaacctccagcaaagcaggctcttccccttgcctcggctcttcctcagctgcctccagtcctccaccccctgcttctcgcctggatgatgaagatggggactttcaaccccaagaggatgaggaagaggatgatgaggaaacgattgaagttgaagaacaacaggaaggcaatgatgcagaggcccagaggcgtgagattgagctgcttcgccgtgagggagaattgccactggaagagctgctccgttcccttccccctcagctgttggaagggccttccagcccctctcaaaccccctcatctcatgatagtgacacccgagatgggcctgaagaaggtgctgaagaagagccccctcaggtgttggagataaagcccccaccctctgctgtcacacagcgcaacaaacagccttggcatccagatgaagatgatgaagagtttactgccaacgaagaggaagcggaggatgaagaggatactatagcagctgaggaacagttggaaggggaggtggatcatgccatggagctgagcgagttggctcgagaaggtgagctttccatggaggagctattgcagcagtatgcaggagcctatgccccaggctctgggagcagtgaagatgaggatgaagatgaggttgatgctaatagctctgactgtgaaccagaggggcccgtggaagcggaagagcctcctcaggaggatagtagcagtcagtcagactctgtggaggaccggagtgaggatgaggaagatgaacattcagaggaggaagaaacaagtggaagttcagcatcagaggaatctgagtctgaagagtctgaggatgcccaatcacagagccaagcagatgaagaggaggaagatgatgattttggggtggagtacttgcttgccagggatgaagagcagagtgaggcagatgcaggcagtgggcctcctactccagggcccactactctaggtccaaagaaagaaattactgacattgctgcagcagctgaaagtctccagcccaagggttacacgctggccacgacccaggtaaagacgcccattcccctgcttctgcggggccagctccgggagtaccagcacattgggctagactggctggttaccatgtatgagaagaagcttaatggcattcttgctgatgagatggggcttgggaagaccatccagaccatctctctgcttgcccacttggcttgtgagaaaggtaactggggtccccatttaatcattgttcccaccagcgtgatgttgaactgggagatggagttgaaacgttggtgccccagctttaaaatcctcacttactatggagcccagaaagagaggaagctcaagcggcagggctggaccaagcccaatgcctttcatgtgtgtatcacatcttacaagctggtgctgcaggaccaccaggccttccgtcgcaagaactggcgctatctcattctggatgaggcgcagaacatcaagaacttcaagtcacagcgctggcagtcactcctcaacttcaacagccagagacgcctgctcctgacaggaactcccttgcagaacagcctcatggagctgtggtccttgatgcactttttgatgccccatgtcttccagtctcatcgcgagttcaaggagtggttctctaatcccctaactggcatgattgagggcagccaagagtataatgaaggtctagtcaaacgcctccacaaggttttgaggccttttttactgcgccgagttaaggtggatgttgagaagcagatgcccaaaaagtacgagcatgttatccgctgcaggctctccaagcgtcaacgctgtctctatgatgacttcatggcacagaccacaactaaggagacactagccacaggccatttcatgagcgtcatcaacattttgatgcagctgagaaaagtttgcaatcatccaaatctgttcgaccctcgaccggttacctcccctttcatcaccccaggcatctgcttcagcaccgcctctctggtgctaagggccacggatgtccatcccctccagcggatagacatgggtcgatttgaccttattggcctggaaggtcgtgtctctcgatatgaggcagacacatttctgccccggcaccgcctctctcgccgggtactgttagaagtggctactgctcctgaccccccaccccggcccaagccagtcaagatgaaggtcaacaggatgctgcagccagtacctaagcaagaaggccggacagtggtggtggtgaacaacccacgggcgcccctgggccctgtcccagttcgacctcctccaggtcctgagctctcagcccagcccacccctggcccagtcccccaagtgctgccagcatcactgatggtttcagcctcacctgccgggcccccgcttattcctgcatctcggcctcctggccctgtcctcttgcctccactgcagcccaacagtggttctctcccccaggtgttgccatcccccctgggggtcctgagtgggacctcacggcctcccacgccaaccttgtccctaaagccaacaccacctgccccagttcgcctgagcccagccccacctccaggctcctctagcctgttgaagcccctgacagtgccaccaggctacaccttccctcctgctgctgccaccaccacttctaccaccacggcaactgctaccaccacagcagtgccagctccgactcctgcaccacagcgcctcattctatctcccgatatgcaggctcgcctgccctcaggcgaagtggtcagcatcgggcagttagcctcactggcacaacgtccagtggctaatgcagggggaagcaaacctctcaccttccaaatccagggcaacaagctgactttgactggtgcccaggtgcgccagcttgctgtggggcagccccgcccgctgcaaatgccaccaaccatggtgaataatacaggcgtggtgaagattgtagtgagacaagcccctcgggatggactgactcctgttcctccattggccccagcaccccggcctccgagctctgggcttccagctgtgttgaatccacgccccacgttaacccctggccggctacccacacctactctgggtactgctcgagcccccatgcccacacccactctggtgaggcctcttctcaagctggtccacagtccttcacctgaagtcagtgcttcagcccccggagctgcccccttgaccatctcttctcctctcaagtcgacctcaccaggcccagctcatgcttctttgcagcctctccaggcccagctcctgcatcttggtggcccctccaggcccagcctctgcctcccgtcagcctctacagtcccaacgtctgcctcacagcagattctcacgcccagcatctacctcactgtgacccgc

SEQ ID NO: 284540 - DNA, 1218 bp, Homo sapiens
gcggccgagacggcggcggccattttggtgaggcctcgggagcggcagcggcggttcgctgggagtagcgtctgccctttttcccacccaccgtccgcatctgtgtgctgcgcgaagaggcagtggaggcaaggcggtggcagtagccgcagtctccaggggagtttaaaggccgcgaaggcggtggccaagagggggccctcccccctcctaggcgggagggggggtggtgcgcacgcccccgaggacgcaggtgtgattcccttcagtacggcggcaccgtggaagtgcagactttcacagggggtgtggtctcagctcacacaggtgctccagaggctggtggacctgagcggaggctgggacgccctggtgggccccgggccctggaaggcgggtcccggtggccggtggcccagaatgaggccagctcccagcatgccctgcagccggacgccagcccctcggccagcagtactggtgataacaacccagtcattcttcaggcatccaagggggagcctgggagtgggaccatgcagagcagcccctcccctgctcaccctcagctcccagtcctacagacacagatggtgtcggacggcatgacaggcagcaatcctgtgtcccctgcctcatccagttccccagcctctagtggggcaggcggcatctccccgcagcacatagctcaagattcctcactggatggacctccaggccccccagatggtgccacagtgcccctggaggggttcagcttatcccaggctgctgacctggctaacaagggcccgaagtgggagaagagccatgccgaaattgcagaacaggccaagcatgaggccgagatcgagactcggattgctgagctgcggaaggagggtttctggtcactgaagaggctgcctaaggtgccagagccccctcgccccaaaggtcactgggactatttgtgcgaagagatgcagtggctctctgctgactttgctcaggagcgccgttggaaacggggtgtggcccggaaggtggtgcgcatggtgatccggcaccacgaggagcagcggcagaaagaggaacgggcccggagggaggagcaggccaagctgcgtcgaattgcttccaccatggccaaggatgtcaggcagttctggagcaatgtggagaaggtgggctattcaagcaacagtcccgactggtggggccagtgaaggcgca

SEQ ID NO: 284541 - DNA, 454 bp, Homo sapiens
gtgagctttccatggaggagctattgcagcagtatgcaggagcctatgccccaggctctgggagcagtgaagatgaggatgaagatgaggttgatgctaatagctctgactgtgaaccagaggggcccgtggaagcggaagagcctcctcaggaggatagtagcagtcagtcaggtgaatatgtggtcatgaagcaggagctggggagggtggccattggaagagcaggtatgatgagcagtaagccttggtcttaccctttagactctgtggaggaccggagtgaggatgaggaagatgaacattcagaggaggaagaaacaagtggaagttcagcatcagaggaatctgagtctgaagagtctgaggatgcccaatcacagagccaagcagatgaagaggaggaagatgatgattttggggtggagtacttgcttgccagggatgaagagca

SEQ ID NO: 284542 - DNA, 857 bp, Homo sapiens
tcctgacctcgtgatccacccgcctcggcctccagaagtgctgggattacaggcgtgagccaccgcacccggcctttttttttttaattttgaggcagggtcttgttctgtggcccaggctggggtgcattggcatgatcatagctgactgcagcctcagctccctgggctcaagcagtcctcccgcctgagcctcctgagtagctgggactacaggtacatgctaacatgcctggctaatttttgtattttctgtagagacggggtcttactatgttgcctagggtgatctcaaattcctggggtcacacagttccccaatcttggcctcccagagagctgggattacaggtttgagccaccgtgcctagccttttattttggagtaagggtgtacatgtgcaggtttcttaaatggggtatattgcatgatgctgaggtttggcgtacgattgatcctgttactcaggttgtgagcatggtactcaactggtagtttttcagccccttgcccgccacagtcgtttctggcgtatattgttctcatcttcatgtccatgcgtacccaatgtttagctcccacttgtgagtgagtacatgtggtatttggttttctgtttctgtgttaattcacttaaggataatggcctccagctacatctgcgttgcaaaggatgtgattttgttcttctttatgactgtgctttctttcttgtggcagcggatagacatgggtcgatttgaccttattggcctggaaggtcgtgtctctcgatatgaggcagacacatttctgccccggcaccgcctctctcgccgggtactgttagaagtggctactgctcctgaccccccac

SEQ ID NO: 284543 - DNA, 360 bp, Homo sapiens
ctgcctgagccctgacctaatttcaagatctatttgctggaatcttggaggggaagaaaatctaaagttgtcagattacttggatgtttgacttcatgttgtgggagtgaatgccttctgggaaatgggaagcttgggggtatgggaaagatgggacagggagtagaaaggctcaggaaaagaattctggggctaactcatcctctctctccacagcttcagcccccggagctgcccccttgaccatctcttctcctctccacgtgccatcctcactccctgggccagcctcttctccaatgccaattcccaactcctctccccttgctagtcctgtgtcctctacagtctcagttccat

SEQ ID NO: 284544 - DNA, 6676 bp, Homo sapiens
gcggccgagacggcggcggccattttggtgaggcctcgggagcggcagcggcggttcgctgggagtagcgtctgccctttttcccacccaccgtccgcatctgtgtgctgcgcgaagaggcagtggaggcaaggcggtggcagtagccgcagtctccaggggagtttaaaggccgcgaaggcggtggccaagagggggccctcccccctcctaggcgggagggggggtggtgcgcacgcccccgaggacgcaggtgtgattcccttcagtacggcggcaccgtggaagtgcagactttcacagggggtgtggtctcagctcacacaggtgctccagaggctggtggacctgagcggaggctgggacgccctggtgggccccgggccctggaaggcgggtcccggtggccggtggcccagaatgaggccagctcccagcatgccctgcagccggacgccagcccctcggccagcagtactggtgataacaacccagtcattcttcaggcatccaagggggagcctgggagtgggaccatgcagagcagcccctcccctgctcaccctcagctcccagtcctacagacacagatggtgtcggacggcatgacaggcagcaatcctgtgtcccctgcctcatccagttccccagcctctagtggggcaggcggcatctccccgcagcacatagctcaagattcctcactggatggacctccaggccccccagatggtgccacagtgcccctggaggggttcagcttatcccaggctgctgacctggctaacaagggcccgaagtgggagaagagccatgccgaaattgcagaacaggccaagcatgaggccgagatcgagactcggattgctgagctgcggaaggagggtttctggtcactgaagaggctgcctaaggtgccagagccccctcgccccaaaggtcactgggactatttgtgcgaagagatgcagtggctctctgctgactttgctcaggagcgccgttggaaacggggtgtggcccggaaggtggtgcgcatggtgatccggcaccacgaggagcagcggcagaaagaggaacgggcccggagggaggagcaggccaagctgcgtcgaattgcttccaccatggccaaggatgtcaggcagttctggagcaatgtggagaaggtggtgcaattcaagcaacagtcccggcttgaggaaaagcgcaaaaaagccctggacctgcatttggacttcattgtggggcaaactgaaaagtactcggaccttctgtctcagagcctcaaccagccattaacctccagcaaagcaggctcttccccttgcctcggctcttcctcagctgcctccagtcctccaccccctgcttctcgcctggatgatgaagatggggactttcaaccccaagaggatgaggaagaggatgatgaggaaacgattgaagttgaagaacaacaggaaggcaatgatgcagaggcccagaggcgtgagattgagctgcttcgccgtgagggagaattgccactggaagagctgctccgttcccttccccctcagctgttggaagggccttccagcccctctcaaaccccctcatctcatgatagtgacacccgagatgggcctgaagaaggtgctgaagaagagccccctcaggtgttggagataaagcccccaccctctgctgtcacacagcgcaacaaacagccttggcatccagatgaagatgatgaagagtttactgccaacgaagaggaagcggaggatgaagaggatactatagcagctgaggaacagttggaaggggaggtggatcatgccatggagctgagcgagttggctcgagaaggtgagctttccatggaggagctattgcagcagtatgcaggagcctatgccccaggctctgggagcagtgaagatgaggatgaagatgaggttgatgctaatagctctgactgtgaaccagaggggcccgtggaagcggaagagcctcctcaggaggatagtagcagtcagtcagactctgtggaggaccggagtgaggatgaggaagatgaacattcagaggaggaagaaacaagtggaagttcagcatcagaggaatctgagtctgaagagtctgaggatgcccaatcacagagccaagcagatgaagaggaggaagatgatgattttggggtggagtacttgcttgccagggatgaagagcagagtgaggcagatgcaggcagtgggcctcctactccagggcccactactctaggtccaaagaaagaaattactgacattgctgcagcagctgaaagtctccagcccaagggttacacgctggccacgacccaggtaaagacgcccattcccctgcttctgcggggccagctccgggagtaccagcacattgggctagactggctggttaccatgtatgagaagaagcttaatggcattcttgctgatgagatggggcttgggaagaccatccagaccatctctctgcttgcccacttggcttgtgagaaaggtaactggggtccccatttaatcattgttcccaccagcgtgatgttgaactgggagatggagttgaaacgttggtgccccagctttaaaatcctcacttactatggagcccagaaagagaggaagctcaagcggcagggctggaccaagcccaatgcctttcatgtgtgtatcacatcttacaagctggtgctgcaggaccaccaggccttccgtcgcaagaactggcgctatctcattctggatgaggcgcagaacatcaagaacttcaagtcacagcgctggcagtcactcctcaacttcaacagccagagacgcctgctcctgacaggaactcccttgcagaacagcctcatggagctgtggtccttgatgcactttttgatgccccatgtcttccagtctcatcgcgagttcaaggagtggttctctaatcccctaactggcatgattgagggcagccaagagtataatgaaggtctagtcaaacgcctccacaaggttttgaggccttttttactgcgccgagttaaggtggatgttgagaagcagatgcccaaaaagtacgagcatgttatccgctgcaggctctccaagcgtcaacgctgtctctatgatgacttcatggcacagaccacaactaaggagacactagccacaggccatttcatgagcgtcatcaacattttgatgcagctgagaaaagtttgcaatcatccaaatctgttcgaccctcgaccggttacctcccctttcatcaccccaggcatctgcttcagcaccgcctctctggtgctaagggccacggatgtccatcccctccagcggatagacatgggtcgatttgaccttattggcctggaaggtcgtgtctctcgatatgaggcagacacatttctgccccggcaccgcctctctcgccgggtactgttagaagtggctactgctcctgaccccccaccccggcccaagccagtcaagatgaaggtcaacaggatgctgcagccagtacctaagcaagaaggccggacagtggtggtggtgaacaacccacgggcgcccctgggccctgtcccagttcgacctcctccaggtcctgagctctcagcccagcccacccctggcccagtcccccaagtgctgccagcatcactgatggtttcagcctcacctgccgggcccccgcttattcctgcatctcggcctcctggccctgtcctcttgcctccactgcagcccaacagtggttctctcccccaggtgttgccatcccccctgggggtcctgagtgggacctcacggcctcccacgccaaccttgtccctaaagccaacaccacctgccccagttcgcctgagcccagccccacctccaggctcctctagcctgttgaagcccctgacagtgccaccaggctacaccttccctcctgctgctgccaccaccacttctaccaccacggcaactgctaccaccacagcagtgccagctccgactcctgcaccacagcgcctcattctatctcccgatatgcaggctcgcctgccctcaggcgaagtggtcagcatcgggcagttagcctcactggcacaacgtccagtggctaatgcagggggaagcaaacctctcaccttccaaatccagggcaacaagctgactttgactggtgcccaggtgcgccagcttgctgtggggcagccccgcccgctgcaaaggaatgtggtgcacctcgtgtcagcaggggggcagcaccatctcatcagccagcctgcccatgtggccctcatccaggccgtggccccgacccctggccctacccctgtctctgtgctgccttcttcgacccccagcaccacccctgcccctactggcctcagccttccgcttgctgctaaccaggtgccaccaaccatggtgaataatacaggcgtggtgaagattgtagtgagacaagcccctcgggatggactgactcctgttcctccattggccccagcaccccggcctccgagctctgggcttccagctgtgttgaatccacgccccacgttaacccctggccggctacccacacctactctgggtactgctcgagcccccatgcccacacccactctggtgaggcctcttctcaagctggtccacagtccttcacctgaagtcagtgcttcagcccccggagctgcccccttgaccatctcttctcctctccacgtgccatcctcactccctgggccagcctcttctccaatgccaattcccaactcctctccccttgctagtcctgtgtcctctacagtctcagttccattgtcatcttcactccccatctctgtccccaccacacttcctgccccagcctcggctccactcaccatccccatctcagcccccttgactgtttctgcttcgggcccagctctgttgaccagtgtgactccaccattggcacctgttgtcccagcggctcctggacctccctccttggcaccatctggtgcttccccgtcagcatcagccttgactctaggtttggccacagctccatccctgtcttcatctcagacacctggtcaccctctgttgttggctcccacctcttcacatgttccagggttgaactcaaccgtggccccagcatgctcacctgtcctggtgccagcttcggctctggccagtccttttccgtcagcaccaaatccagctccagctcaggcttcccttctggctccagcatcttctgcatctcaggctctagccacccctctggctcctatggcggctccacagacagcaattctggctccttctccagctcctcctctggctcctcttccggtcctggcaccatcgccaggtgctgctcctgtcctggcttcatcacagactccggttccagttatggctccatcgtctactccaggaacctctttagcctcagcttcaccggtaccagctccaacccctgtgttggctccatcatcaactcaaactatgctaccagccccggttccgtcacctctcccgagcccggcttctacgcagacactggccctagccccagctttagcacccactcttggaggctcatctccatctcagacactctctttgggaacggggaacccccagggaccctttccaactcagacattgtcattaactccagcatcatccctggtaccaactccagcccagacactgtctttggcaccaggaccaccactgggtccaactcagacgctgtctctggctccagcaccccctctggctccagcttctccagtgggcccagccccagctcacacgctgactttggctccagcatcgtcatctgcttcactcctggccccagcttcagtgcagacactgaccttgagccctgccccagttcctaccctgggcccggccgcagctcagaccttggcgctggccccagcctccacacagtccccagcttcccaggcatcttcccttgtggtttcggcatctggtgccgctcccttgcctgtcaccatggtatcccggctgcctgtttccaaggatgagcctgacacactgacattgcgctctggtccccccagccctccctccactgctacctcgtttggtggcccccggcctcgacgccagccccccccaccacctcgttcccctttttatctggtaagttttacttcctcaagagggaacaggaagttgagtttctttggagtgttggtagggtggatggaacagtgatgtcacatttaacctggtgaattacaaagcttaatgttatggaccaagtacttgagtgacatttggacaagtcccttctcttccctgggcgtgtacctcatgatccgcctgcctcagcctcctgaagtgttaggattacaggggtgagccaccacgcccggcctcttttcccgttttttaacccgcacggtaataaatgggcagtaaaaggaactcttctctgtcccttttatgatttccggtagctgtttctttcctgtactatgtatataggcccatgtctgtgtagtacttgagttaaactcacagttcagcttaagtaaaccagaactaaggagaaggaaggtccagtgggtccctccacgccctctggcttttccccactgtaatcagagctgctgcttagt

SEQ ID NO: 284545 - DNA, 9302 bp, Homo sapiens
gcggccgagacggcggcggccattttggtgaggcctcgggagcggcagcggcggttcgctgggagtagcgtctgccctttttcccacccaccgtccgcatctgtgtgctgcgcgaagaggcagtggaggcaaggcggtggcagtagccgcagtctccaggggagtttaaaggccgcgaaggcggtggccaagagggggccctcccccctcctaggcgggagggggggtggtgcgcacgcccccgaggacgcaggtgtgattcccttcagtacggcggcaccgtggaagtgcagactttcacagggggtgtggtctcagctcacacaggtgctccagaggctggtggacctgagcggaggctgggacgccctggtgggccccgggccctggaaggcgggtcccggtggccggtggcccagaatgaggccagctcccagcatgccctgcagccggacgccagcccctcggccagcagtactggtgataacaacccagtcattcttcaggcatccaagggggagcctgggagtgggaccatgcagagcagcccctcccctgctcaccctcagctcccagtcctacagacacagatggtgtcggacggcatgacaggcagcaatcctgtgtcccctgcctcatccagttccccagcctctagtggggcaggcggcatctccccgcagcacatagctcaagattcctcactggatggacctccaggccccccagatggtgccacagtgcccctggaggggttcagcttatcccaggctgctgacctggctaacaagggcccgaagtgggagaagagccatgccgaaattgcagaacaggccaagcatgaggccgagatcgagactcggattgctgagctgcggaaggagggtttctggtcactgaagaggctgcctaaggtgccagagccccctcgccccaaaggtcactgggactatttgtgcgaagagatgcagtggctctctgctgactttgctcaggagcgccgttggaaacggggtgtggcccggaaggtggtgcgcatggtgatccggcaccacgaggagcagcggcagaaagaggaacgggcccggagggaggagcaggccaagctgcgtcgaattgcttccaccatggccaaggatgtcaggcagttctggagcaatgtggagaaggtggtgcaattcaagcaacagtcccggcttgaggaaaagcgcaaaaaagccctggacctgcatttggacttcattgtggggcaaactgaaaagtactcggaccttctgtctcagagcctcaaccagccattaacctccagcaaagcaggctcttccccttgcctcggctcttcctcagctgcctccagtcctccaccccctgcttctcgcctggatgatgaagatggggactttcaaccccaagaggatgaggaagaggatgatgaggaaacgattgaagttgaagaacaacaggaaggcaatgatgcagaggcccagaggcgtgagattgagctgcttcgccgtgagggagaattgccactggaagagctgctccgttcccttccccctcagctgttggaagggccttccagcccctctcaaaccccctcatctcatgatagtgacacccgagatgggcctgaagaaggtgctgaagaagagccccctcaggtgttggagataaagcccccaccctctgctgtcacacagcgcaacaaacagccttggcatccagatgaagatgatgaagagtttactgccaacgaagaggaagcggaggatgaagaggatactatagcagctgaggaacagttggaaggggaggtggatcatgccatggagctgagcgagttggctcgagaaggtgagctttccatggaggagctattgcagcagtatgcaggagcctatgccccaggctctgggagcagtgaagatgaggatgaagatgaggttgatgctaatagctctgactgtgaaccagaggggcccgtggaagcggaagagcctcctcaggaggatagtagcagtcagtcagactctgtggaggaccggagtgaggatgaggaagatgaacattcagaggaggaagaaacaagtggaagttcagcatcagaggaatctgagtctgaagagtctgaggatgcccaatcacagagccaagcagatgaagaggaggaagatgatgattttggggtggagtacttgcttgccagggatgaagagcagagtgaggcagatgcaggcagtgggcctcctactccagggcccactactctaggtccaaagaaagaaattactgacattgctgcagcagctgaaagtctccagcccaagggttacacgctggccacgacccaggtaaagacgcccattcccctgcttctgcggggccagctccgggagtaccagcacattgggctagactggctggttaccatgtatgagaagaagcttaatggcattcttgctgatgagatggggcttgggaagaccatccagaccatctctctgcttgcccacttggcttgtgagaaaggtaactggggtccccatttaatcattgttcccaccagcgtgatgttgaactgggagatggagttgaaacgttggtgccccagctttaaaatcctcacttactatggagcccagaaagagaggaagctcaagcggcagggctggaccaagcccaatgcctttcatgtgtgtatcacatcttacaagctggtgctgcaggaccaccaggccttccgtcgcaagaactggcgctatctcattctggatgaggcgcagaacatcaagaacttcaagtcacagcgctggcagtcactcctcaacttcaacagccagagacgcctgctcctgacaggaactcccttgcagaacagcctcatggagctgtggtccttgatgcactttttgatgccccatgtcttccagtctcatcgcgagttcaaggagtggttctctaatcccctaactggcatgattgagggcagccaagagtataatgaaggtctagtcaaacgcctccacaaggttttgaggccttttttactgcgccgagttaaggtggatgttgagaagcagatgcccaaaaagtacgagcatgttatccgctgcaggctctccaagcgtcaacgctgtctctatgatgacttcatggcacagaccacaactaaggagacactagccacaggccatttcatgagcgtcatcaacattttgatgcagctgagaaaagtttgcaatcatccaaatctgttcgaccctcgaccggttacctcccctttcatcaccccaggcatctgcttcagcaccgcctctctggtgctaagggccacggatgtccatcccctccagcggatagacatgggtcgatttgaccttattggcctggaaggtcgtgtctctcgatatgaggcagacacatttctgccccggcaccgcctctctcgccgggtactgttagaagtggctactgctcctgaccccccaccccggcccaagccagtcaagatgaaggtcaacaggatgctgcagccagtacctaagcaagaaggccggacagtggtggtggtgaacaacccacgggcgcccctgggccctgtcccagttcgacctcctccaggtcctgagctctcagcccagcccacccctggcccagtcccccaagtgctgccagcatcactgatggtttcagcctcacctgccgggcccccgcttattcctgcatctcggcctcctggccctgtcctcttgcctccactgcagcccaacagtggttctctcccccaggtgttgccatcccccctgggggtcctgagtgggacctcacggcctcccacgccaaccttgtccctaaagccaacaccacctgccccagttcgcctgagcccagccccacctccaggctcctctagcctgttgaagcccctgacagtgccaccaggctacaccttccctcctgctgctgccaccaccacttctaccaccacggcaactgctaccaccacagcagtgccagctccgactcctgcaccacagcgcctcattctatctcccgatatgcaggctcgcctgccctcaggcgaagtggtcagcatcgggcagttagcctcactggcacaacgtccagtggctaatgcagggggaagcaaacctctcaccttccaaatccagggcaacaagctgactttgactggtgcccaggtgcgccagcttgctgtggggcagccccgcccgctgcaaatgccaccaaccatggtgaataatacaggcgtggtgaagattgtagtgagacaagcccctcgggatggactgactcctgttcctccattggccccagcaccccggcctccgagctctgggcttccagctgtgttgaatccacgccccacgttaacccctggccggctacccacacctactctgggtactgctcgagcccccatgcccacacccactctggtgaggcctcttctcaagctggtccacagtccttcacctgaagtcagtgcttcagcccccggagctgcccccttgaccatctcttctcctctccacgtgccatcctcactccctgggccagcctcttctccaatgccaattcccaactcctctccccttgctagtcctgtgtcctctacagtctcagttccattgtcatcttcactccccatctctgtccccaccacacttcctgccccagcctcggctccactcaccatccccatctcagcccccttgactgtttctgcttcgggcccagctctgttgaccagtgtgactccaccattggcacctgttgtcccagcggctcctggacctccctccttggcaccatctggtgcttccccgtcagcatcagccttgactctaggtttggccacagctccatccctgtcttcatctcagacacctggtcaccctctgttgttggctcccacctcttcacatgttccagggttgaactcaaccgtggccccagcatgctcacctgtcctggtgccagcttcggctctggccagtccttttccgtcagcaccaaatccagctccagctcaggcttcccttctggctccagcatcttctgcatctcaggctctagccacccctctggctcctatggcggctccacagacagcaattctggctccttctccagctcctcctctggctcctcttccggtcctggcaccatcgccaggtgctgctcctgtcctggcttcatcacagactccggttccagttatggctccatcgtctactccaggaacctctttagcctcagcttcaccggtaccagctccaacccctgtgttggctccatcatcaactcaaactatgctaccagccccggttccgtcacctctcccgagcccggcttctacgcagacactggccctagccccagctttagcacccactcttggaggctcatctccatctcagacactctctttgggaacggggaacccccagggaccctttccaactcagacattgtcattaactccagcatcatccctggtaccaactccagcccagacactgtctttggcaccaggaccaccactgggtccaactcagacgctgtctctggctccagcaccccctctggctccagcttctccagtgggcccagccccagctcacacgctgactttggctccagcatcgtcatctgcttcactcctggccccagcttcagtgcagacactgaccttgagccctgccccagttcctaccctgggcccggccgcagctcagaccttggcgctggccccagcctccacacagtccccagcttcccaggcatcttcccttgtggtttcggcatctggtgccgctcccttgcctgtcaccatggtatcccggctgcctgtttccaaggatgagcctgacacactgacattgcgctctggtccccccagccctccctccactgctacctcgtttggtggcccccggcctcgacgccagccccccccaccacctcgttcccctttttatctggactccctggaggaaaagcggaagcggcagcggtctgaacgcctggaacggattttccaacttagtgaggctcatggggccctggcacctgtgtatgggactgaagtcctggatttctgtaccctgccccaacctgttgccagccccatcggccctcgttctcctggccccagccaccccaccttttggacttataccgaggctgcccaccgggctgtactgtttccccagcagcgactagaccagctgtcagaaatcattgagaggttcatctttgtcatgcctcctgtggaggcacctcccccttccctgcatgcctgccacccacctccttggctggccccacgtcaggcagccttccaggagcaattggcctctgagctctggccccgggctcgtcctttgcaccgtattgtgtgtaacatgcgcacccagttccctgacttaagactcatccagtatgattgcggaaagttgcagacgttggcagtgctgttgcggcagctcaaggcagagggccaccgagtgctcatcttcacccagatgacccgaatgctggatgtattggagcagtttctcacctaccatggccatctctacctgcgcctggatggatctactagagttgaacagagacaggccttgatggaacggttcaatgcagacaaacgcatattctgcttcatcctttcaactcggagtgggggtgtgggcgtgaacctgacaggagcagacactgttgttttttatgacagcgactggaatcccaccatggatgctcaggcccaggaccgctgtcaccgaattggccagacccgggatgtccacatatataggcttatcagtgaacggacagtggaggagaacatcctaaaaaaggcaaatcagaagagaatgttgggggacatggccattgagggaggcaacttcaccacagcctatttcaaacagcagaccatccgagagctgtttgatatgcccctggaggaaccttctagctcatccgtgccctctgcccctgaagaggaggaagagactgtggccagcaagcagactcatattctggagcaggcattgtgtcgggcagaagatgaagaggatatccgtgcagccacccaggccaaggctgaacaggtggctgagcttgcagaatttaatgagaacgatgggtttcctgctggtgagggagaggaagctggccggcctggggctgaggatgaggagatgtcccgggctgagcaggaaattgctgccctcgtagaacagctgacccccattgagcgctatgccatgaaattcctggaggcctcactggaggaggtgagccgagaggagctcaaacaggcagaagagcaagtggaagctgcccgcaaagacctggaccaagccaaggaggaggtgttccgcctaccccaagaggaggaggaggggccgggggctggggatgagagttcctgtgggactggtggaggcacccaccggcgcagtaaaaaggccaaagcccctgagaggccggggactcgtgtcagtgagcgtcttcgtggagcccgggctgagactcaaggggcaaaccacactcctgtcatatccgcccatcaaactcgcagcaccaccacaccaccccgctgcagtcctgccagggagcgagttcccaggccagcacctaggcctcgacccactccagcttcagctccggctgcaattcctgcccttgttcctgtcccagtttctgccccagtacccatttcagccccaaatccaataaccattctccctgtccatatcttgccttctcctccccctccttcacagattcctccttgttcttctcctgcctgcacccctcctcctgcctgtacccctccaccagctcatacaccgcctccagcccaaacctgtcttgtaactccttcctctcctctcttgcttggtccaccttctgtgcccatctctgcctcagtcactaatctccccttgggcttgaggcctgaggcagagctgtgtgcccaggcattggcatctccagagtccctggagctggcttctgtggccagttcagaaacctcctcactttctcttgtgccccctaaagatctgttgccagttgctgtggagaaggggtgagagacaggtacattctctgacctaccactgggtcctggacgcagctcggacctttggcgctggccccagtcctccactgcgtgtccgccgagacttccgcagcgcgtcttccgcttgtggtttcggcctctggtgccggtcccttgcgctgtcgaccatgggataatcccgggcttgcctgtgtttcccaaggactgaggcgctgacacaccctgacactctgcgcctcgtggctccaccaacatgcaagagacgccacacaagacacggaatgaccagcaaacacatcgcgaacacgcagccctcgcacaagcagggaccacacgaaacccacagaaccgaccacacgccccacagcacgcaaagcccacccagcggaacactccgcaacaccaaagacctcgacacagaacgacacggcataaccaaacccaaagcacctcacatctgtacagagcgaacactcacatccgaacacacgcaccgcaacaccctacccaccccctgccacacacgaaaaccactccactcaggacagcatcgccacacccaaggacgcaaacaaacagacagcgacaccaccaagaaaccgagggccaacaaagagggaacccgcgactacaagacccaaggagaaaacacaaaccaaaaaagaaaacccacccccaacaaaggccccacagaaccacccccagaccaccgcagcaaaggagaccacaacacacaacatgcacgacaaaccacgcggaaaaaaaaacgaaaccaagcaaacacagaaccaacacaaacagcgccagaaaaacgccgacaaaaacagaccacagccgaacaacaaacaaaaacggcacgccgggaaagacacaacacgacaaccacccaacgaacgaacacaaacgcacccggacaccaacacacacgactcccaacacaccacaacacacatcaccactatcctacactttgctcactataaaatacatcttctactatcaatacaattatcacagccataaccccagcagcaaaaaccaagaactcacatctataaaacaactaaacctgcactcaaaaacacactcacaaacaaccacagccaaatacaacaaacaaataaccacaaccaatcacttcaaccccagccaccacactccaaccccccacactaccccc

SEQ ID NO: 284546 - DNA, 5736 bp, Homo sapiens
gcggccgagacggcggcggccattttggtgaggcctcgggagcggcagcggcggttcgctgggagtagcgtctgccctttttcccacccaccgtccgcatctgtgtgctgcgcgaagaggcagtggaggcaaggcggtggcagtagccgcagtctccaggggagtttaaaggccgcgaaggcggtggccaagagggggccctcccccctcctaggcgggagggggggtggtgcgcacgcccccgaggacgcaggtgtgattcccttcagtacggcggcaccgtggaagtgcagactttcacagggggtgtggtctcagctcacacaggtgctccagaggctggtggacctgagcggaggctgggacgccctggtgggccccgggccctggaaggcgggtcccggtggccggtggcccagaatgaggccagctcccagcatgccctgcagccggacgccagcccctcggccagcagtactggtgataacaacccagtcattcttcaggcatccaagggggagcctgggagtgggaccatgcagagcagcccctcccctgctcaccctcagctcccagtcctacagacacagatggtgtcggacggcatgacaggcagcaatcctgtgtcccctgcctcatccagttccccagcctctagtggggcaggcggcatctccccgcagcacatagctcaagattcctcactggatggacctccaggccccccagatggtgccacagtgcccctggaggggttcagcttatcccaggctgctgacctggctaacaagggcccgaagtgggagaagagccatgccgaaattgcagaacaggccaagcatgaggccgagatcgagactcggattgctgagctgcggaaggagggtttctggtcactgaagaggctgcctaaggtgccagagccccctcgccccaaaggtcactgggactatttgtgcgaagagatgcagtggctctctgctgactttgctcaggagcgccgttggaaacggggtgtggcccggaaggtggtgcgcatggtgatccggcaccacgaggagcagcggcagaaagaggaacgggcccggagggaggagcaggccaagctgcgtcgaattgcttccaccatggccaaggatgtcaggcagttctggagcaatgtggagaaggtggtgcaattcaagcaacagtcccggcttgaggaaaagcgcaaaaaagccctggacctgcatttggacttcattgtggggcaaactgaaaagtactcggaccttctgtctcagagcctcaaccagccattaacctccagcaaagcaggctcttccccttgcctcggctcttcctcagctgcctccagtcctccaccccctgcttctcgcctggatgatgaagatggggactttcaaccccaagaggatgaggaagaggatgatgaggaaacgattgaagttgaagaacaacaggaaggcaatgatgcagaggcccagaggcgtgagattgagctgcttcgccgtgagggagaattgccactggaagagctgctccgttcccttccccctcagctgttggaagggccttccagcccctctcaaaccccctcatctcatgatagtgacacccgagatgggcctgaagaaggtgctgaagaagagccccctcaggtgttggagataaagcccccaccctctgctgtcacacagcgcaacaaacagccttggcatccagatgaagatgatgaagagtttactgccaacgaagaggaagcggaggatgaagaggatactatagcagctgaggaacagttggaaggggaggtggatcatgccatggagctgagcgagttggctcgagaaggtgagctttccatggaggagctattgcagcagtatgcaggagcctatgccccaggctctgggagcagtgaagatgaggatgaagatgaggttgatgctaatagctctgactgtgaaccagaggggcccgtggaagcggaagagcctcctcaggaggatagtagcagtcagtcagactctgtggaggaccggagtgaggatgaggaagatgaacattcagaggaggaagaaacaagtggaagttcagcatcagaggaatctgagtctgaagagtctgaggatgcccaatcacagagccaagcagatgaagaggaggaagatgatgattttggggtggagtacttgcttgccagggatgaagagcagagtgaggcagatgcaggcagtgggcctcctactccagggcccactactctaggtccaaagaaagaaattactgacattgctgcagcagctgaaagtctccagcccaagggttacacgctggccacgacccaggtaaagacgcccattcccctgcttctgcggggccagctccgggagtaccagcacattgggctagactggctggttaccatgtatgagaagaagcttaatggcattcttgctgatgagatggggcttgggaagaccatccagaccatctctctgcttgcccacttggcttgtgagaaaggtaactggggtccccatttaatcattgttcccaccagcgtgatgttgaactgggagatggagttgaaacgttggtgccccagctttaaaatcctcacttactatggagcccagaaagagaggaagctcaagcggcagggctggaccaagcccaatgcctttcatgtgtgtatcacatcttacaagctggtgctgcaggaccaccaggccttccgtcgcaagaactggcgctatctcattctggatgaggcgcagaacatcaagaacttcaagtcacagcgctggcagtcactcctcaacttcaacagccagagacgcctgctcctgacaggaactcccttgcagaacagcctcatggagctgtggtccttgatgcactttttgatgccccatgtcttccagtctcatcgcgagttcaaggagtggttctctaatcccctaactggcatgattgagggcagccaagagtataatgaaggtctagtcaaacgcctccacaaggttttgaggccttttttactgcgccgagttaaggtggatgttgagaagcagatgcccaaaaagtacgagcatgttatccgctgcaggctctccaagcgtcaacgctgtctctatgatgacttcatggcacagaccacaactaaggagacactagccacaggccatttcatgagcgtcatcaacattttgatgcagctgagaaaagtttgcaatcatccaaatctgttcgaccctcgaccggttacctcccctttcatcaccccaggcatctgcttcagcaccgcctctctggtgctaagggccacggatgtccatcccctccagcggatagacatgggtcgatttgaccttattggcctggaaggtcgtgtctctcgatatgaggcagacacatttctgccccggcaccgcctctctcgccgggtactgttagaagtggctactgctcctgaccccccaccccggcccaagccagtcaagatgaaggtcaacaggatgctgcagccagtacctaagcaagaaggccggacagtggtggtggtgaacaacccacgggcgcccctgggccctgtcccagttcgacctcctccaggtcctgagctctcagcccagcccacccctggcccagtcccccaagtgctgccagcatcactgatggtttcagcctcacctgccgggcccccgcttattcctgcatctcggcctcctggccctgtcctcttgcctccactgcagcccaacagtggttctctcccccaggtgttgccatcccccctgggggtcctgagtgggacctcacggcctcccacgccaaccttgtccctaaagccaacaccacctgccccagttcgcctgagcccagccccacctccaggctcctctagcctgttgaagcccctgacagtgccaccaggctacaccttccctcctgctgctgccaccaccacttctaccaccacggcaactgctaccaccacagcagtgccagctccgactcctgcaccacagcgcctcattctatctcccgatatgcaggctcgcctgccctcaggcgaagtggtcagcatcgggcagttagcctcactggcacaacgtccagtggctaatgcagggggaagcaaacctctcaccttccaaatccagggcaacaagctgactttgactggtgcccaggtgcgccagcttgctgtggggcagccccgcccgctgcaaatgccaccaaccatggtgaataatacaggcgtggtgaagattgtagtgagacaagcccctcgggatggactgactcctgttcctccattggccccagcaccccggcctccgagctctgggcttccagctgtgttgaatccacgccccacgttaacccctggccggctacccacacctactctgggtactgctcgagcccccatgcccacacccactctggtgaggcctcttctcaagctggtccacagtccttcacctgaagtcagtgcttcagcccccggagctgcccccttgaccatctcttctcctctccacgtgccatcctcactccctgggccagcctcttctccaatgccaattcccaactcctctccccttgctagtcctgtgtcctctacagtctcagttccattgtcatcttcactccccatctctgtccccaccacacttcctgccccagcctcggctccactcaccatccccatctcagcccccttgactgtttctgcttcgggcccagctctgttgaccagtgtgactccaccattggcacctgttgtcccagcggctcctggacctccctccttggcaccatctggtgcttccccgtcagcatcagccttgactctaggtttggccacagctccatccctgtcttcatctcagacacctggtcaccctctgttgttggctcccacctcttcacatgttccagggttgaactcaaccgtggccccagcatgctcacctgtcctggtgccagcttcggctctggccagtccttttccgtcagcaccaaatccagctccagctcaggcttcccttctggctccagcatcttctgcatctcaggctctagccacccctctggctcctatggcggctccacagacagcaattctggctccttctccagctcctcctctggctcctcttccggtcctggcaccatcgccaggtgctgctcctgtcctggcttcatcacagactccggttccagttatggctccatcgtctactccaggaacctctttagcctcagcttcaccggtaccagctccaacccctgtgttggctccatcatcaactcaaactatgctaccagccccggttccgtcacctctcccgagcccggcttctacgcagacactggccctagccccagctttagcacccactcttggaggctcatctccatctcagacactctctttgggaacggggaacccccagggaccctttccaactcagacatttggttgtcatggaaatggggatcatcacagtccccttccccttcaccccacgtggctgggcagtgttaagggtggcaagatagtctctgtccccacccccttgtacttgattccccagctgtctttcacacagccccccacccttaggggaagggggaggggcttctctacaatgaggtttttttcttttttttttttttttaagaagaaaaaataataaacttagtttctgtatgagc

SEQ ID NO: 284547 - DNA, 4395 bp, Homo sapiens
gcggccgagacggcggcggccattttggtgaggcctcgggagcggcagcggcggttcgctgggagtagcgtctgccctttttcccacccaccgtccgcatctgtgtgctgcgcgaagaggcagtggaggcaaggcggtggcagtagccgcagtctccaggggagtttaaaggccgcgaaggcggtggccaagagggggccctcccccctcctaggcgggagggggggtggtgcgcacgcccccgaggacgcaggtgtgattcccttcagtacggcggcaccgtggaagtgcagactttcacagggggtgtggtctcagctcacacaggtgctccagaggctggtggacctgagcggaggctgggacgccctggtgggccccgggccctggaaggcgggtcccggtggccggtggcccagaatgaggccagctcccagcatgccctgcagccggacgccagcccctcggccagcagtactggtgataacaacccagtcattcttcaggcatccaagggggagcctgggagtgggaccatgcagagcagcccctcccctgctcaccctcagctcccagtcctacagacacagatggtgtcggacggcatgacaggcagcaatcctgtgtcccctgcctcatccagttccccagcctctagtggggcaggcggcatctccccgcagcacatagctcaagattcctcactggatggacctccaggccccccagatggtgccacagtgcccctggaggggttcagcttatcccaggctgctgacctggctaacaagggcccgaagtgggagaagagccatgccgaaattgcagaacaggccaagcatgaggccgagatcgagactcggattgctgagctgcggaaggagggtttctggtcactgaagaggctgcctaaggtgccagagccccctcgccccaaaggtcactgggactatttgtgcgaagagatgcagtggctctctgctgactttgctcaggagcgccgttggaaacggggtgtggcccggaaggtggtgcgcatggtgatccggcaccacgaggagcagcggcagaaagaggaacgggcccggagggaggagcaggccaagctgcgtcgaattgcttccaccatggccaaggatgtcaggcagttctggagcaatgtggagaaggtggtgcaattcaagcaacagtcccggcttgaggaaaagcgcaaaaaagccctggacctgcatttggacttcattgtggggcaaactgaaaagtactcggaccttctgtctcagagcctcaaccagccattaacctccagcaaagcaggctcttccccttgcctcggctcttcctcagctgcctccagtcctccaccccctgcttctcgcctggatgatgaagatggggactttcaaccccaagaggatgaggaagaggatgatgaggaaacgattgaagttgaagaacaacaggaaggcaatgatgcagaggcccagaggcgtgagattgagctgcttcgccgtgagggagaattgccactggaagagctgctccgttcccttccccctcagctgttggaagggccttccagcccctctcaaaccccctcatctcatgatagtgacacccgagatgggcctgaagaaggtgctgaagaagagccccctcaggtgttggagataaagcccccaccctctgctgtcacacagcgcaacaaacagccttggcatccagatgaagatgatgaagagtttactgccaacgaagaggaagcggaggatgaagaggatactatagcagctgaggaacagttggaaggggaggtggatcatgccatggagctgagcgagttggctcgagaaggtgagctttccatggaggagctattgcagcagtatgcaggagcctatgccccaggctctgggagcagtgaagatgaggatgaagatgaggttgatgctaatagctctgactgtgaaccagaggggcccgtggaagcggaagagcctcctcaggaggatagtagcagtcagtcagactctgtggaggaccggagtgaggatgaggaagatgaacattcagaggaggaagaaacaagtggaagttcagcatcagaggaatctgagtctgaagagtctgaggatgcccaatcacagagccaagcagatgaagaggaggaagatgatgattttggggtggagtacttgcttgccagggatgaagagcagagtgaggcagatgcaggcagtgggcctcctactccagggcccactactctaggtccaaagaaagaaattactgacattgctgcagcagctgaaagtctccagcccaagggttacacgctggccacgacccaggtaaagacgcccattcccctgcttctgcggggccagctccgggagtaccagcacattgggctagactggctggttaccatgtatgagaagaagcttaatggcattcttgctgatgagatggggcttgggaagaccatccagaccatctctctgcttgcccacttggcttgtgagaaaggtaactggggtccccatttaatcattgttcccaccagcgtgatgttgaactgggagatggagttgaaacgttggtgccccagctttaaaatcctcacttactatggagcccagaaagagaggaagctcaagcggcagggctggaccaagcccaatgcctttcatgtgtgtatcacatcttacaagctggtgctgcaggaccaccaggccttccgtcgcaagaactggcgctatctcattctggatgaggcgcagaacatcaagaacttcaagtcacagcgctggcagtcactcctcaacttcaacagccagagacgcctgctcctgacaggaactcccttgcagaacagcctcatggagctgtggtccttgatgcactttttgatgccccatgtcttccagtctcatcgcgagttcaaggagtggttctctaatcccctaactggcatgattgagggcagccaagagtataatgaaggtctagtcaaacgcctccacaaggttttgaggccttttttactgcgccgagttaaggtggatgttgagaagcagatgcccaaaaagtacgagcatgttatccgctgcaggctctccaagcgtcaacgctgtctctatgatgacttcatggcacagaccacaactaaggagacactagccacaggccatttcatgagcgtcatcaacattttgatgcagctgagaaaagtttgcaatcatccaaatctgttcgaccctcgaccggttacctcccctttcatcaccccaggcatctgcttcagcaccgcctctctggtgctaagggccacggatgtccatcccctccagcggatagacatgggtcgatttgaccttattggcctggaaggtcgtgtctctcgatatgaggcagacacatttctgccccggcaccgcctctctcgccgggtactgttagaagtggctactgctcctgaccccccaccccggcccaagccagtcaagatgaaggtcaacaggatgctgcagccagtacctaagcaagaaggccggacagtggtggtggtgaacaacccacgggcgcccctgggccctgtcccagttcgacctcctccaggtcctgagctctcagcccagcccacccctggcccagtcccccaagtgctgccagcatcactgatggtttcagcctcacctgccgggcccccgcttattcctgcatctcggcctcctggccctgtcctcttgcctccactgcagcccaacagtggttctctcccccaggtgttgccatcccccctgggggtcctgagtgggacctcacggcctcccacgccaaccttgtccctaaagccaacaccacctgccccagttcgcctgagcccagccccacctccaggctcctctagcctgttgaagcccctgacagtgccaccaggctacaccttccctcctgctgctgccaccaccacttctaccaccacggcaactgctaccaccacagcagtgccagctccgactcctgcaccacagcgcctcattctatctcccgatatgcaggctcgcctgccctgtaagttcccagggctctgtggtgagggacttgagatgggaggaaagctcaggaccatgagagcatcaaattttaggcagctgggtcaggcatgatggctcatgcctataatcccggtgctttgggaggccaaggtgggaggtttgcttcagccaggagtttggagctgcagtgagccatggttacgccactgcaatcatgagcaagaccctgtgtcaaaaaaaattgaggcagctaacatatgttaggcattatgccagacattgtcagatcataattaagagcccttaagaaattgacatagggagatgacacata

SEQ ID NO: 284548 - DNA, 3477 bp, Homo sapiens
gcggccgagacggcggcggccattttggtgaggcctcgggagcggcagcggcggttcgctgggagtagcgtctgccctttttcccacccaccgtccgcatctgtgtgctgcgcgaagaggcagtggaggcaaggcggtggcagtagccgcagtctccaggggagtttaaaggccgcgaaggcggtggccaagagggggccctcccccctcctaggcgggagggggggtggtgcgcacgcccccgaggacgcaggtgtgattcccttcagtacggcggcaccgtggaagtgcagactttcacagggggtgtggtctcagctcacacaggtgctccagaggctggtggacctgagcggaggctgggacgccctggtgggccccgggccctggaaggcgggtcccggtggccggtggcccagaatgaggccagctcccagcatgccctgcagccggacgccagcccctcggccagcagtactggtgataacaacccagtcattcttcaggcatccaagggggagcctgggagtgggaccatgcagagcagcccctcccctgctcaccctcagctcccagtcctacagacacagatggtgtcggacggcatgacaggcagcaatcctgtgtcccctgcctcatccagttccccagcctctagtggggcaggcggcatctccccgcagcacatagctcaagattcctcactggatggacctccaggccccccagatggtgccacagtgcccctggaggggttcagcttatcccaggctgctgacctggctaacaagggcccgaagtgggagaagagccatgccgaaattgcagaacaggccaagcatgaggccgagatcgagactcggattgctgagctgcggaaggagggtttctggtcactgaagaggctgcctaaggtgccagagccccctcgccccaaaggtcactgggactatttgtgcgaagagatgcagtggctctctgctgactttgctcaggagcgccgttggaaacggggtgtggcccggaaggtggtgcgcatggtgatccggcaccacgaggagcagcggcagaaagaggaacgggcccggagggaggagcaggccaagctgcgtcgaattgcttccaccatggccaaggatgtcaggcagttctggagcaatgtggagaaggtggtgcaattcaagcaacagtcccggcttgaggaaaagcgcaaaaaagccctggacctgcatttggacttcattgtggggcaaactgaaaagtactcggaccttctgtctcagagcctcaaccagccattaacctccagcaaagcaggctcttccccttgcctcggctcttcctcagctgcctccagtcctccaccccctgcttctcgcctggatgatgaagatggggactttcaaccccaagaggatgaggaagaggatgatgaggaaacgattgaagttgaagaacaacaggaaggcaatgatgcagaggcccagaggcgtgagattgagctgcttcgccgtgagggagaattgccactggaagagctgctccgttcccttccccctcagctgttggaagggccttccagcccctctcaaaccccctcatctcatgatagtgacacccgagatgggcctgaagaaggtgctgaagaagagccccctcaggtgttggagataaagcccccaccctctgctgtcacacagcgcaacaaacagccttggcatccagatgaagatgatgaagagtttactgccaacgaagaggaagcggaggatgaagaggatactatagcagctgaggaacagttggaaggggaggtggatcatgccatggagctgagcgagttggctcgagaaggtgagctttccatggaggagctattgcagcagtatgcaggagcctatgccccaggctctgggagcagtgaagatgaggatgaagatgaggttgatgctaatagctctgactgtgaaccagaggggcccgtggaagcggaagagcctcctcaggaggatagtagcagtcagtcagactctgtggaggaccggagtgaggatgaggaagatgaacattcagaggaggaagaaacaagtggaagttcagcatcagaggaatctgagtctgaagagtctgaggatgcccaatcacagagccaagcagatgaagaggaggaagatgatgattttggggtggagtacttgcttgccagggatgaagagcagagtgaggcagatgcaggcagtgggcctcctactccagggcccactactctaggtccaaagaaagaaattactgacattgctgcagcagctgaaagtctccagcccaagggttacacgctggccacgacccaggtaaagacgcccattcccctgcttctgcggggccagctccgggagtaccagcacattgggctagactggctggttaccatgtatgagaagaagcttaatggcattcttgctgatgagatggggcttgggaagaccatccagaccatctctctgcttgcccacttggcttgtgagaaaggtaactggggtccccatttaatcattgttcccaccagcgtgatgttgaactgggagatggagttgaaacgttggtgccccagctttaaaatcctcacttactatggagcccagaaagagaggaagctcaagcggcagggctggaccaagcccaatgcctttcatgtgtgtatcacatcttacaagctggtgctgcaggaccaccaggccttccgtcgcaagaactggcgctatctcattctggatgaggcgcagaacatcaagaacttcaagtcacagcgctggcagtcactcctcaacttcaacagccagagacgcctgctcctgacaggaactcccttgcagaacagcctcatggagctgtggtccttgatgcactttttgatgccccatgtcttccagtctcatcgcgagttcaaggagtggttctctaatcccctaactggcatgattgagggcagccaagagtataatgaaggtctagtcaaacgcctccacaaggttttgaggccttttttactgcgccgagttaaggtggatgttgagaagcagatgcccaaaaagtacgagcatgttatccgctgcaggctctccaagcgtcaacgctgtctctatgatgacttcatggcacagaccacaactaaggagacactagccacaggccatttcatgagcgtcatcaacattttgatgcagctgagaaaagtttgcaatcatccaaatctgttcgaccctcgaccggttacctcccctttcatcaccccaggcatctgcttcagcaccgcctctctggtgctaagggccacggatgtccatcccctccaggtaagtatgattccattaatatgaaatgtaaaggttatcggcattactccaaccatgtacctcttttcgttagactggggtctgacttttgcatcctcatgactcccctatcattcactatgca

SEQ ID NO: 284549 - DNA, 468 bp, Homo sapiens
accttagacccttcccttttttatcttttgccatacagataaagcccccaccctctgctgtcacacagcgcaacaaacagccttggcatccagatgaagatgatgaagagtttactgccaacgaagaggaaggtcagggctgttcggtttgtcctattgccccttaccccttgaatgaattgtctggacctaacctttcaggctttctcatctgtttcatttggactgtgtcctgtgcctctagcctctatccctattaatcttgcttctgtctctttcctagcggaggatgaagaggatactatagcagctgaggaacagttggaaggggaggtggatcatgccatggagctgagcgagttggctcgagaaggtgacatttaccagacattttactaagcatccacttggtgtctgcggtgtgcagtaccaaggataaagagatgaataaggcactttgtatccacc

SEQ ID NO: 284550 - DNA, 368 bp, Homo sapiens
caggcaaggaaatttgaggttgttgcatctggaagtaaacatgtagctacttcttctaataaaacagaggctgctttaaataatttctattaatagccttttctgaacaatcacagagaaagtcttctgaataatcatactgagaacttaaacttccacaggagcactgagatctgctataatcaacactcttattggaagcattactgttccgtgaaaaatcgcctgtgcctgggcttctcttgcatgctgcagacctcctattgttttctaatgccacgccgaagaaatgctcatctatatttgtttttgttagatcagccaaagacatagcaaacaacctaataaaagaaaagtaaaacctaata

SEQ ID NO: 284551 - DNA, 640 bp, Homo sapiens
acttgtgcatgcctctgcccccccgggccgcggaactctcctggggcgaccccgagtcccaccccgctgctccgtgccgtcctcgcagctcgagccctcctccagcccagcagtgctcccgcagcgtctggccgctggtcgtcggcagacgaaagggcttgaaccgcggctgaccttagcctttgtccctcggcctagttccgcagctgccgtcagaggccgccagcccctcccccagcatgtttgggctaagccgcctcctttccgcctgcgttggagagagaggtaccagaaggaatgaaaggactggggcttgtctccatggcaactgaaagaaagagagaaaaattggtcacctccaggactgagaccctgacccttccaagcatccccactaccaaaggctgcccaagcccggaaggatcccatcccgttctgtactctgaggtcacttcctcactccgtcaaatttcactggactgtgggctaattaaaagtgcctccgtattagcggggcgtggtggcccatgcctataatcccagctacttgggaagctgaggcaggaaaattgcttgaacccgggtggcggaggctgcagtgacccaacattgtgcaacaagagcgaaactccgtctcaaa

SEQ ID NO: 284552 - DNA, 829 bp, Homo sapiens
acttgtgcatgcctctgcccccccgggccgcggaactctcctggggcgaccccgagtcccaccccgctgctccgtgccgtcctcgcagctcgagccctcctccagcccagcagtgctcccgcagcgtctggccgctggtcgtcggcagacgaaagggcttgaaccgcggctgaccttagcctttgtccctcggcctagttccgcagctgccgtcagaggccgccagcccctcccccagcatgtttgggctaagccgcctcctttccgcctgcgttggagagagaggtaccagaaggaatgaaaggactggggcttgtctccatggcaactgaaagaaagaggtgggttataaatccttcgccaccctcctgtggcgaaggaggggaagtgggagccgggaagtagagttggccttttgcaggagagtctggagcccctttctgggtgatgcattgggggccatagaaggatttggctgccgctttggagcatggattttttttttaatcatcttcctttctcttttggagagaaaaattggtcacctccaggactgagaccctgacccttccaagcatccccactaccaaaggctgcccaagcccggaaggatcccatcccgttctgtactctgaggtcacttcctcactccgtcaaatttcactggactgtgggctaattaaaagtgcctccgtattagcggggcgtggtggcccatgcctataatcccagctacttgggaagctgaggcaggaaaattgcttgaacccgggtggcggaggctgcagtgacccaacattgtgcaacaagagcgaaactccgtctcaaa

SEQ ID NO: 284553 - DNA, 682 bp, Homo sapiens
cctgtagaatgtggtttgtagagcacggggttgtgaataagaactgactgtgaggcctagccatacaatttgtagtttgcatgccccccaccccaggaaggttaccctccagacctcagaggcctcacctcttcagcagatactacagtccctgagaagacgatcaatgcgagaccatgctgtaagctgaaagggttgtatagatgttaaaaatacatacataatttttgttttttaataatagaattttgatctctggtggtagaattactcaggttcagaatccttggctccagaagtctcccttggcaatctctaaaaatataccccaaacaaacaacccatagagaatcagaagggaaacaggaagcctcctcctctggaaggagaaagaatccgcagcttaatcgctattgcagagcgggaaacagggcagggagcaggagacttgagtttagctttgggaagatgaatgaatgaataaatgaaccattatcagctgccaaccgtgtgccaggcactgttagaagcagaatagtaatttgtttagtcctcaccaaaaccctatgaagtaaggtggtatttttaccatttgacaagtaaggaaataggactaattagttggaggagttagaattcaaattcagaccatctggcctgaaagccttgctcttaatcacta

SEQ ID NO: 284554 - DNA, 1226 bp, Homo sapiens
caattttggcctgcaaagacttccttctctcgcctctactacccaactcctgtgagggactcaggcatagttcgggcggaggcagaaagagcgagcgcgcgaagaacttcggtattgaggttgctaaggcttctcctcatgtgcttcaagagaaagtagcctttaactgtggaaaggacaccaggggaccggggaaggggagagcagtggtaaaaatgagccagaagcagataaggcgactgcccgccccgcggagagctgccttctgggacttgtagtgcgcggggcccccggagccggctggctgcgcaggctcggcgttgcgctggccccaccccggcgggcggagtaacggtttggaatcccccggggtcagcgagcgcttgtttcctccgcctggtgtagcaaaagtgtaaacacgcgcgctccggaaggcgccctccagtgggaggttgctcaggggatggcggagctgtgaaactcggagctagaaggaaagtctcaacgcttgtctaaattttgctttgtcgtgacgagctacctagacccacgcagagctaacttgggagagcgcttgtgacgctacgaacctctcgaacacctgacgactgggcgccagggccggatggagggtggagagccagtgcggcgcagctgcctcctcttaaccgggacaccttgcaggaatgtgcggagtggagctaacgggagcggatagaaaccgagggaggggaagagagcgcgaaggcttggccggaaggagaggttaaaaaggaaaggcctaaaatgaggaagagagttaccacaacaagcagtacctagttccagttcttggtcccaggagtttgtggttgttgctgctttcatcttcctcagccaacacaaaaggaaagtgccaaggggcgattcctaggaccttcagtgcagtctccaccttgcggacttggctcatttgtgtccactcctttctccagccttttacacttgatgctcttggatgaatagaaaggagcacaattaatggaaaacacaagcttgggagtcaagggatttgggttctattcttgtcctcccttggtgacgacatcattaccttgggttattcaagctttcagtgccagagttcctatatcaataaaagattattacattgacctcttagagaaatgttttcatggtactgaattgcaaataaagtatgtgtagcgatgtgttaaaaaaaaata

SEQ ID NO: 284555 - DNA, 1307 bp, Homo sapiens
caattttggcctgcaaagacttccttctctcgcctctactacccaactcctgtgagggactcaggcatagttcgggcggaggcagaaagagcgagcgcgcgaagaacttcggtattgaggttgctaaggcttctcctcatgtgcttcaagagaaagtagcctttaactgtggaaaggacaccaggggaccggggaaggggagagcagtggtaaaaatgagccagaagcagataaggcgactgcccgccccgcggagagctgccttctgggacttgtagtgcgcggggcccccggagccggctggctgcgcaggctcggcgttgcgctggccccaccccggcgggcggagtaacggtttggaatcccccggggtcagcgagcgcttgtttcctccgcctggtgtagcaaaagtgtaaacacgcgcgctccggaaggcgccctccagtgggaggttgctcaggggatggcggagctgtgaaactcggagctagaaggaaagtctcaacgcttgtctaaattttgctttgtcgtgacgagctacctagacccacgcagagctaacttggtatatgccccggttcccatctcttaagtctctttacagttgaaacacgtttataatgcttgactgccactcactttctagggagagcgcttgtgacgctacgaacctctcgaacacctgacgactgggcgccagggccggatggagggtggagagccagtgcggcgcagctgcctcctcttaaccgggacaccttgcaggaatgtgcggagtggagctaacgggagcggatagaaaccgagggaggggaagagagcgcgaaggcttggccggaaggagaggttaaaaaggaaaggcctaaaatgaggaagagagttaccacaacaagcagtacctagttccagttcttggtcccaggagtttgtggttgttgctgctttcatcttcctcagccaacacaaaaggaaagtgccaaggggcgattcctaggaccttcagtgcagtctccaccttgcggacttggctcatttgtgtccactcctttctccagccttttacacttgatgctcttggatgaatagaaaggagcacaattaatggaaaacacaagcttgggagtcaagggatttgggttctattcttgtcctcccttggtgacgacatcattaccttgggttattcaagctttcagtgccagagttcctatatcaataaaagattattacattgacctcttagagaaatgttttcatggtactgaattgcaaataaagtatgtgtagcgatgtgttaaaaaaaaata

SEQ ID NO: 284556 - DNA, 735 bp, Homo sapiens
agtcaaccgcgccggagtcgcagcgagcgcgtgcgcactgccttccggaggccgggaggcggaagtccaagcagggagagcgcttgtgacgctacgaacctctcgaacacctgacgactgggcgccagggccggatggagggtggagagccagtgcggcgcagctgcctcctcttaaccgggacaccttgcaggaatgtgcggagtggagctaacgggagcggatagaaaccgagggaggggaagagagcgcgaaggcttggccggaaggagaggttaaaaaggaaaggcctaaaatgaggaagagagttaccacaacaagcagtacctagttccagttcttggtcccaggagtttgtggttgttgctgctttcatcttcctcagccaacacaaaaggaaagtgccaaggggcgattcctaggaccttcagtgcagtctccaccttgcggacttggctcatttgtgtccactcctttctccagccttttacacttgatgctcttggatgaatagaaaggagcacaattaatggaaaacacaagcttgggagtcaagggatttgggttctattcttgtcctcccttggtgacgacatcattaccttgggttattcaagctttcagtgccagagttcctatatcaataaaagattattacattgacctcttagagaaatgttttcatggtactgaattgcaaataaagtatgtgtagcgatgtgttaaaaaaaaata

SEQ ID NO: 284557 - DNA, 977 bp, Homo sapiens
tcgggaggggcggggcctgcaagaagagtggagggcggagggcagaagggactggggaaggggcgaggcctggaagaatagaggcagaggcgggagcggccgatcttggcggatcccgcctcctcgcgactcggcccccaggtcacatccctccgtcggtgcccgccacccactcaccgtggggctcccgtgcggcaggtacaccgggtagtcgcgagcggtctgcggcggcagggaccccaccagccaggggagcagcacggcctcgggcgtccccagccgccaccaaccctctgttgctgccaccacccggccggacaccaccagactgacgaaggtcgtgcccgcggcctcagcgaacccggagagggcttcctgggtacgggaggcaggaggactgggagtcagcagacaagcgtagggggtggcagcgacttcccagatgggcagggaatggggagaaacccacagccagccccgagctcgcgcagtggccatgctcctacgtctcaccctctctgagcctgagttccttcactttcatacgaagtcacatccccaactcacactgtgaagtctgtgaaatctgattaaacatctagcctgggcgggcaaactgaagctaataatgtaaccgcagcagctaccgttcatccaggcctgttacatgccgagtaggcaccattagcaacgtagagaagccaagtcacctgctgagagtcacatgcctgggaggccgccacaccaggcaagtccacaagagcagtatttaagtagaggtagctagagatctgagaggcaggaggaagaacatgcactgaggttggaaacttgttgggatctcaggactgtgaggtagctgggtggaagtagactgtggatttagcaacaggttagggggtgccaggtgccacaggccttcaaacaccaggctgaggagctgggaccttgtcctgggggaggtggaggctgccgga

SEQ ID NO: 284558 - DNA, 1037 bp, Homo sapiens
aggggaggagcctgctgttgccccagcaacaaccacggaaaccaagacgagcgcggtcgcggaagtatcgcggcttacatatctcgcagccaggcgggtcctgggagaggcgcgagccaggcctggtcggcgcccgcggagaaaagaagcagtcaagcccatgaactacaaccccggttgccgctttctcctctcctaaccgttaagtgcgctaagggccatggctgaggtgcacgtgatcgggcagatcatgggggccagcggtttctcggaaagtagcctcttctgcaagtggggcattcacacaggggcggcatggaagctcctgtcaggcgtgcgggagggccaaacgcaagtggacaccccgcagataggggacatggcttactggtcccaccccatcgacctgcacttcgccaccaaaggtcttcaaggctggccccggctccatttccaggtgtggtcccaggacagctttggccgctgccagcttgcaggctatggattttgccatgtgcccagtagcccgggcacccaccagctggcctgccccacgtggcggcccctgggcagttggcgagaacagttggcacgggctttcgtgggtggtgggccgcagctgctgcatggggacaccatctacagtggggccgaccgctatcgcctgcacacagctgctggtggcaccgtgcacctggagatcggcctgctgctccgcaacttcgaccgctacggcgtggagtgctgagggactctgcctccaacgtcaccaccatccacaccccggacacccagtgatgggggaggatggcacagtggtcaagagcacagactctagagactgtcagagctgaccccagctaaggcatggcaccgcttctgtcctttctaggacctcggggtccctctgggcccagtttccctatctgtaaattggggacagtaaatgtatggggtcgcagggtgttgagtgacaggaggctgcttagccacatgggaggtgctcagtaaaggagagcaattcttaaaaaaaaaag

SEQ ID NO: 284559 - DNA, 1027 bp, Homo sapiens
  misc_feature (93)..(93): n is a, c, g, or t
  misc_feature (106)..(106): n is a, c, g, or t
  misc_feature (152)..(152): n is a, c, g, or t
  misc_feature (155)..(155): n is a, c, g, or t
  misc_feature (160)..(160): n is a, c, g, or t
  misc_feature (167)..(167): n is a, c, g, or t
  misc_feature (186)..(186): n is a, c, g, or t
  misc_feature (210)..(210): n is a, c, g, or t
  misc_feature (213)..(213): n is a, c, g, or t
  misc_feature (221)..(221): n is a, c, g, or t
  misc_feature (225)..(226): n is a, c, g, or t
  misc_feature (234)..(234): n is a, c, g, or t
  misc_feature (237)..(237): n is a, c, g, or t
ggtggtgacggggacgtccttggtcttgcacgccactacctggggagtctaatcactgggatggtctgtggggtgggagggcctacggatggntccgtaaaggtcncatgtccctcattcctccttggccctctccctagcttctccatgtnagntcctnctggtcntgaccccatctccttgctnttgggcccctattgtctctggctnacntccttgtnccanncagctcanagntgtgcatcccacgcctgctacaagaaaagtagcctcttctgcaagtggggcattcacacaagggcggcatggaagctcctgtcaggcgtgcgggagggccaaacgcaagtggacaccccgcagataggggacatggcttactggtcccaccccatcgacctgcacttcgccaccaaaggtcttcaaggctggccccggctccatttccaggtgtggtcccaggacagctttggccgctgccagcttgcaggctatggattttgccatgtgcccagtagcccgggcacccaccagctggcctgccccacgtggcggcccctgggcagttggcgagaacagttggcacgggctttcgtgggtggtgggccgcagctgctgcatggggacaccatctacagtggggccgaccgctatcgcctgcacacagctgctggtggcaccgtgcacctggagatcggcctgctgctccgcaacttcgaccgctacggcgtggagtgctgagggactctgcctccaacgtcaccaccatccacaccccggacacccagtgatgggggaggatggcacagtggtcaagagcacagactctagagactgtcagagctgaccccagctaaggcatggcaccgcttctgtcctttctaggacctcggggtccctctgggcccagtttccctatctgtaaattggggacagtaaatgtatggggtcgcagggtgttgagtgacaggaggctgcttagccacatgggaggtgctcagtaaaggagagcaattcttaaaaaaaaaag

SEQ ID NO: 284560 - DNA, 347 bp, Homo sapiens
cttggtttccaggttggaccactcaccttctctgtgaccctgggcagaggctgtcccctcttggagcctcagtttcctcatttgttcttcatagggctgttgggaaatcttgcttttaaggagcctgacgcagggcctggtgcttccctcaactcagcccagaagggagtaatgactaacctgatttttattatttcagggagttgctggggatgttgatccagccaagaatactgaggcagttggatgaaaggcttgggctctgcagttagagctgagtctgaatccagtcccatgatgggaccttggtctgctatagtcactgctatgtcaccagcatggaaaac

SEQ ID NO: 284561 - DNA, 502 bp, Homo sapiens
aggggaggagcctgctgttgccccagcaacaaccacggaaaccaagacgagcgcggtcgcggaagtatcgcggcttacatatctcgcagccaggcgggtcctgggagaggcgcgagccaggcctggtcggcgcccgcggagaaaagaagcagtcaagcccatgaactacaaccccggttgccgctttctcctctcctaaccgttaagtgcgctaagggccatggctgaggtgcacgtgatcgggcagatcatgggggccagcggtttctcggaaagtagcctcttctgcaagtggggcattcacacagggagttgctggggatgttgatccagccaagaatactgaggcagttggatgaaaggcttgggctctgcagttagagctgagtctgaatccagtcccatgatgggaccttggtctgctatagtcactgctatgtcaccagcatggaaaacagtgcttggcacatagcaggtgctgaataaatgttcatgaactcac

SEQ ID NO: 284562 - DNA, 913 bp, Homo sapiens
aggtaaggggcctggctgggcaccatggcggcaggtgggaaggtcgggctcgaggtgtgcggagaggaggccgcggaggggcagcagggctgtgcgttctgatgcgctcccctgcggggaccagagccggtgttcgagctgctgctgtctggcggctccggcagcttcttccgcttgtgcttccctttcctgcagccggccgaccgcgtctgcttggaagtagaatctcctggaaggataaaggacacagcgtttgtccccttcaaggaagtgatgttctctgagaagcacagacctggccctcgctagacactgaacctgccggtgccctgatcttggacttcctcgcctccaaaactgcaaatcaagaaatatgaaaagcagcaacacagggtcatgactttatgctcacgaatcacatacatgacgtctatgcagagagtgacagcccatggaaggagatccttggggctgccggctgactcaccaccaccattcgctgactcaccaccaccattcggttctgtgcgtgtccccgtcactggcttgaatgatgatttggtcattgactcaatgtagagctgctgacccagatttttaattttgttcacactggcatagacctgctgcaaggtcatcttagggaaaggaatgataaaatatgtttcaaaaattataaaaatgtccactaaaagatacataaacaaaatacacttagcttctgtttctttgaagatataatgactgaagcacagtaatcactttaatccagtttcctgcaccatgccacagtatactggtaccaacaaattctaaataaatctgttcacaatatgctaatttttagaacgcatacaattaattcaaatatcactttccaaaggtgatattttctttttacagactttttttt

SEQ ID NO: 284563 - DNA, 372 bp, Homo sapiens
acctgtggctcaccatcgtctcgtgtttttgccctgcgtaccccatcaacatcgtggctttggtcttttccatcatgtctctgaacagctacaacgacggagactacgaaggagccaggcggcttgggcggaatgctaagtgggtagccatcgcctccatcatcattggccttctcatcatcggcatttcttgtgcagttcacttcacaaggaatgcctgaggaaccagcggtcagtgggctgtgagcgtggaggatggacctcatccacacacaccccaaaggagtctctaaggaatggatccttgacttcagactgtgagatcttttcctccaggactctccagaggcaggtccctggcaaatgaacaag

SEQ ID NO: 284564 - DNA, 1377 bp, Homo sapiens
cgcgcagcccctccggccgcgggcgcagcgggggcgctggtggagctgcgaagggccaggtccggcgggcggggcggcggctggcactggctccggactctgcccggccagggcggcggctccagccgggagggcgacgtggagcggccacgtggagcggcccgggggaggctggcggcgggaggcgaggcgcgggcggcgcacagccaggagcgcccacggagctggacccccagagccgcgcggccgccgcagcagttccaggaaggatgttacctttgacgatgacagtgttaatcctgctgctgctccccacgggtcaggctgccccaaaggatggagtcacaaggccagactctgaagtgcagcatcagctcctgcccaaccccttccagccaggccaggagcagctcggacttctgcagagctacctaaagggactaggaaggacagaagtgcaactggagcatctgagccgggagcaggttctcctctacctctttgccctccatgactatgaccagagtggacagctggatggcctggagctgctgtccatgttgacagctgctctggcccctggagctgccaactctcctaccaccaacccggtgatattgatagtggacaaagtgctcgagacgcaggacctgaatggggatgggctcatgacccctgctgagctcatcaacttcccgggagtagccctcaggcacgtggagcccggagagccccttgctccatctcctcaggagccacaagctgttggaaggcagtccctattagctaaaagcccattaagacaagaaacacaggaagcccctggtcccagagaagaagcaaagggccaggtagaggccagaagggagtctttggatcctgtccaggagcctgggggccaggcagaggctgatggagatgttccagggcccagaggggaagctgagggccaggcagaggctaaaggagatgcccctgggcccagaggggaagctgggggccaggcagaggctgaaggagatgcccccgggcccagaggggaagctgggggccaggcagaggccagggagaatggagaggaggccaaggaacttccaggggaaacactggagtctaagaacacccaaaatgactttgaggtgcacattgttcaagtggagaatgatgagatctagatcttgaagatacaggtaccccacgaagtctcagtgccagaacataagccctgaagtgggcaggggaaatgtacgctgggacaaggaccatctctgtgccccctgtctggtcccagtaggtatcaggtctttctgtgcagctcagggagaccctaagttaaggggcagattaccaataaagaactgaatgaattcaaacccc

SEQ ID NO: 284565 - DNA, 1673 bp, Homo sapiens
cgcgcagcccctccggccgcgggcgcagcgggggcgctggtggagctgcgaagggccaggtccggcgggcggggcggcggctggcactggctccggactctgcccggccagggcggcggctccagccgggagggcgacgtggagcggccacgtggagcggcccgggggaggctggcggcgggaggcgaggcgcgggcggcgcacagccaggagcgcccacggagctggacccccagagccgcgcggccgccgcagcagctttactcctgaagccagcgagatcacgaacccactgggagaaacgaacaactccagacgcactgccttaagagctgtaacactcactgcgaaggtccgcagctgcattcctgagccagcgagaccacaaacccaccagaaggaagaaacttcgaacgcatccgaacatcagaaggaacaaactccagacacgccgcctttaggaactgtaacactcaaccgcgagggtccgcggcttcattcttgaagtcagtgagaccaagaacccaccaattccggacacactgggattacagttccaggaaggatgttacctttgacgatgacagtgttaatcctgctgctgctccccacgggtcaggctgccccaaaggatggagtcacaaggccagactctgaagtgcagcatcagctcctgcccaaccccttccagccaggccaggagcagctcggacttctgcagagctacctaaagggactaggaaggacagaagtgcaactggagcatctgagccgggagcaggttctcctctacctctttgccctccatgactatgaccagagtggacagctggatggcctggagctgctgtccatgttgacagctgctctggcccctggagctgccaactctcctaccaccaacccggtgatattgatagtggacaaagtgctcgagacgcaggacctgaatggggatgggctcatgacccctgctgagctcatcaacttcccgggagtagccctcaggcacgtggagcccggagagccccttgctccatctcctcaggagccacaagctgttggaaggcagtccctattagctaaaagcccattaagacaagaaacacaggaagcccctggtcccagagaagaagcaaagggccaggtagaggccagaagggagtctttggatcctgtccaggagcctgggggccaggcagaggctgatggagatgttccagggcccagaggggaagctgagggccaggcagaggctaaaggagatgcccctgggcccagaggggaagctgggggccaggcagaggctgaaggagatgcccccgggcccagaggggaagctgggggccaggcagaggccagggagaatggagaggaggccaaggaacttccaggggaaacactggagtctaagaacacccaaaatgactttgaggtgcacattgttcaagtggagaatgatgagatctagatcttgaagatacaggtaccccacgaagtctcagtgccagaacataagccctgaagtgggcaggggaaatgtacgctgggacaaggaccatctctgtgccccctgtctggtcccagtaggtatcaggtctttctgtgcagctcagggagaccctaagttaaggggcagattaccaataaagaactgaatgaattcaaacccc

SEQ ID NO: 284566 - DNA, 424 bp, Homo sapiens
gccagactctgaagtgcagcatcagctcctgcccaaccccttccagccaggccaggagcagctcgggtgagtagggtgggccgggggtgctttcagggagaagaccaggcccagggctgcagactcacctctcccgggctgattctccacttttctgacagacttctgcagagctacctaaagggactaggaaggacagaagtgcaactggagcatctgagccgggagcagggtgaggggctgggctgatggggccagggacgggaggctctgggcagccagatctgggactgacctcggctgccccattgactcctgccttctccacctcccccggcacctcttctaatccagcttctcttctctttagttctcctctacctctttgccctccatgactatgaccagagtggacagctggatg

SEQ ID NO: 284567 - DNA, 901 bp, Homo sapiens
cgcgcagcccctccggccgcgggcgcagcgggggcgctggtggagctgcgaagggccaggtccggcgggcggggcggcggctggcactggctccggactctgcccggccagggcggcggctccagccgggagggcgacgtggagcggccacgtggagcggcccgggggaggctggcggcgggaggcgaggcgcgggcggcgcacagccaggagcgcccacggagctggacccccagagccgcgcggccgccgcagcagttccaggaaggatgttacctttgacgatgacagtgttaatcctgctgctgctccccacgggtcaggctgccccaaaggatggagtcacaaggccagactctgaagtgcagcatcagctcctgcccaaccccttccagccaggccaggagcagctcggttctcctctacctctttgccctccatgactatgaccagagtggacagctggatggcctggagctgctgtccatgttgacagctgctctggcccctggagctgccaactctcctaccaccaacccggtaagctctgctggatggagatccccgcataaaggagacccagcactttggggctttggtctttctcatcataactcttttggccttacccaccctatattggagttggccccaattccaatatgtgttccagatcggacctccctgaggacagcaacactctgtatcctgggtcacatttgtggctgaggcacgcccttaattccaagggcaacctggacgccaggctggatggaggggagaaggcgatgcagccgcaatggtagtctccatggtgtgtgaggagccggcacctgctctcacacgatgccatcaaagccctgcaggccacacttcttgccggccacctggcacccgaatc

SEQ ID NO: 284568 - DNA, 1724 bp, Homo sapiens
cgcgcagcccctccggccgcgggcgcagcgggggcgctggtggagctgcgaagggccaggtccggcgggcggggcggcggctggcactggctccggactctgcccggccagggcggcggctccagccgggagggcgacgtggagcggccacgtggagcggcccgggggaggctggcggcgggaggcgaggcgcgggcggcgcacagccaggagcgcccacggagctggacccccagagccgcgcggccgccgcagcagctttactcctgaagccagcgagatcacgaacccactgggagaaacgaacaactccagacgcactgccttaagagctgtaacactcactgcgaaggtccgcagctgcattcctgagccagcgagaccacaaacccaccagaaggaagaaacttcgaacgcatccgaacatcagaaggaacaaactccagacacgccgcctttaggaactgtaacactcaaccgcgagggtccgcggcttcattcttgaagtcagtgagaccaagaacccaccaattccggacacactgggattacaggtgtgaaccacaacacctggctctctttgttcctaattgaaattgccaaagttccaggaaggatgttacctttgacgatgacagtgttaatcctgctgctgctccccacgggtcaggctgccccaaaggatggagtcacaaggccagactctgaagtgcagcatcagctcctgcccaaccccttccagccaggccaggagcagctcggacttctgcagagctacctaaagggactaggaaggacagaagtgcaactggagcatctgagccgggagcaggttctcctctacctctttgccctccatgactatgaccagagtggacagctggatggcctggagctgctgtccatgttgacagctgctctggcccctggagctgccaactctcctaccaccaacccggtgatattgatagtggacaaagtgctcgagacgcaggacctgaatggggatgggctcatgacccctgctgagctcatcaacttcccgggagtagccctcaggcacgtggagcccggagagccccttgctccatctcctcaggagccacaagctgttggaaggcagtccctattagctaaaagcccattaagacaagaaacacaggaagcccctggtcccagagaagaagcaaagggccaggtagaggccagaagggagtctttggatcctgtccaggagcctgggggccaggcagaggctgatggagatgttccagggcccagaggggaagctgagggccaggcagaggctaaaggagatgcccctgggcccagaggggaagctgggggccaggcagaggctgaaggagatgcccccgggcccagaggggaagctgggggccaggcagaggccagggagaatggagaggaggccaaggaacttccaggggaaacactggagtctaagaacacccaaaatgactttgaggtgcacattgttcaagtggagaatgatgagatctagatcttgaagatacaggtaccccacgaagtctcagtgccagaacataagccctgaagtgggcaggggaaatgtacgctgggacaaggaccatctctgtgccccctgtctggtcccagtaggtatcaggtctttctgtgcagctcagggagaccctaagttaaggggcagattaccaataaagaactgaatgaattcaaacccc

SEQ ID NO: 284569 - DNA, 2003 bp, Homo sapiens
gccccacgccacgcgtcgctggtcccaggcagcgagtcgctcgcgcgccccgccgcccgcctggcgacagctccgccgcgcacgcacatggaggggagcgcgagccccccggaaaagccccgcgcccgccctgcggctgccgtgctgtgccggggcccggtagagccgctggtcttcctggccaactttgccttggtcctgcagggcccgctcaccacgcagtatctgtggcaccgcttcagcgccgacctcggctacaatggcacccgccaaagggggggctgcagcaaccgcagcgcggaccccaccatgcaggaagtggagacccttacctcccactggaccctctacatgaacgtgggcggcttcctggtggggctcttctcgtccaccctgctgggagcttggagcgacagtgtgggccgccgcccgctgctagtgctggcctcgctgggcctgctgctccaggccctagtgtccgtttttgtggtgcagctgcagctccacgtcggctacttcgtgctgggtcgcatcctttgtgccctcctcggcgacttcggtggccttctggctgctagctttgcgtccgtggcagatgtcagctccagtcgcagccgcaccttccggatggccctgctggaagccagcatcggggtggctgggatgctggcaagcctcctcgggggccactggctccgggcccagggttatgccaaccccttctggctggccttggccttgctgatagccatgactctctatgcagctttctgctttggtgagaccttaaaggagccaaagtccacccggctcttcacgttccgtcaccaccgatccattgtccagctctatgtggctcccgccccagagaagtccaggaaacatttagccctctactcactggccatcttcgtggtgatcactgtgcactttggggcccaggacatcttaaccctttatgaactaagcacacccctctgctgggactccaaactaatcggctatggttctgcagctcagcatctcccctacctcaccagcctgctggccctgaagctcctgcagtactgcctggccgatgcctgggtagctgagatcggcctggccttcaacatcctggggatggtggtctttgcctttgccactatcacgcctctcatgttcacaggtgctctcttttctgctgtggcctgtgtgaatagcctggccatgctgacggcctccggcatcttcaactcactctacccagccactctgaactttatgaaggggttccccttcctcctgggagctggcctcctgctcatcccggctgttctgattgggatgctggaaaaggctgatcctcacctcgagttccagcagtttccccagagcccctgatctgcctggaccagaagacagagggcaagaggagcaaagtgaacaccaagcaactggaggtctgcagctggaagcccagcccacagcaggacaagcaactcttgtctaagggcagtgctctctttggacgaggtagtcaagagagaccaaggcaccaccccatccacagctgacccagcctctgtctaggatctagaatcataacccacacaggcccactgcaggacaggtggcagaggagctatttgggacaggagtcagttctccctttctgctatccatcacttataaccccacaggccagaggagaggtcctgagagaggtgacacttcagggaccagaggcagcacgagggctggcatctctccttccagcccaaactgcacagccccaaccaggttcccaacacgtgtagcagtcatcagccattccttaacaatgaatgtggtacctggttagtgccagccttgggaaggagggagggaggtaagaggggcttggtgatctctggaggaagagtgttgcctttgctgtggttggggaatcgatccttggctatggcctacccactcccctggctgaagagtgccaatcattacaaatcagcttcagcaaactg

SEQ ID NO: 284570 - DNA, 1938 bp, Homo sapiens
  misc_feature (1307)..(1307): n is a, c, g, or t
aactttttaaaatttttatttgattgatgtatttagagacagggtctcgctttgttacccaggctagagtgcagtggcacgatcatggctcactgcagcctcatcccccgggcccagatgatcctcccaccttggcctctctagtagctgggaccactggtgcacattaccacaccttgctaatttttgtattttttatagagatggggtcctcaccattttgcccagtccaggtctctaactcctgagctcaaggatccgcctgcctcagcctcccaaagtgttgggattacaggcatgagccaccgtgcccggctttagttaactttttttaaagggacagatttattttgatagagccctaaaatgtgctgtgtatagtcaacaatacaataatcacagatttcttaactcaactgcttgtctgacaattaagcagaagggaacctttccctcctgctgatggccctgggggatgcagagatgataaagatgctgtcattgctctgggtcggggggaggtctcaacagagtgggatttgaggggcctgacactgctagggtccctggatgcctcatcgtataccttctttggaggatccactgtcctgtaggagtttgcagttttgctgaggagtcagcagtcgcacagggagagaaatggttatgaagaaaacaggaagcctgtaagtaactgaatgcaaagggaaaaggaactcccatttgctgtgtccctatgccatgctcttcatagatgttacctttttacctcatgtattggttccctgagattgctgtaatgacataccacaaacttgggggcttaacacaacagaaacatattctctcacagttctggaggccagaagtccaaagtcagtaccaccgggctgaatggaagcagtcagcaggcagtgctcccttgcaagcctccaggagagaacgtgtttctcatttcttccagcttctggggctgctggcattccttggcttggggcggccatcaccagtctctgcctctgtgctcacattgactctcctcctctttgtgccttctcaattctgtcggtgccaaatctccgtctgctttcctcttataaagatatgtgtgacggcatttagggcccaacctaatccaggataactctgctctctcaggaggcttaactgcacacctgcatagactcattttccaaataaggtagtatttacaggttccagggctatgaatctgatgccattgggcaccattattcagcctcctatgcctcagaaccatcctgtgatgaaggccttattatcttccncatacagggagtcaggatcagagagggtaagtaccccaggccacacagataatatgtaatggcatcaggttttgaactcagggctgactccaaagcccatgcttgttttctgtgccctgccatatccctactaagtgccaagtgggtgggtgatgcctgctgtgaccacaagaggttcagacaagaaagcaatcaatgggaattagcattcattcatgagagctagcaggtggccaagcccagacaagggcagtctccattcctccttgactactgtcttcccaccctcaccatcaaggaagttcttcctgggtctaacctaagccccacatggggtatggataggagctctgctgcctttcccttggacgcccctctccccagccccattttcctgatgagtgtttgtttctccacaggatatgggttgcttttcctgtcattagtcatcacacctgtcatccgggctaaactctccaagctggtgagagagacagagcagggtgagtgtcagaacccacctgtgtctggttcctcatgtccagtgctgcccgaaacgggctgatgggcagccatggctgggggaacagcttgccttcccccctctcaccctggagaagtaagtggccaa

SEQ ID NO: 284571 - DNA, 1343 bp, Homo sapiens
gccccacgccacgcgtcgctggtcccaggcagcgagtcgctcgcgcgccccgccgcccgcctggcgacagctccgccgcgcacgcacatggaggggagcgcgagccccccggaaaagccccgcgcccgccctgcggctgccgtgctgtgccggggcccggtagagccgctggtcttcctggccaactttgccttggtcctgcagggcccgctcaccacgcagtatctgtggcaccgcttcagcgccgacctcggctacaatggcacccgccaaagggggggctgcagcaaccgcagcgcggaccccaccatgcaggaagtggagacccttacctcccactggaccctctacatgaacgtgggcggcttcctggtggggctcttctcgtccaccctgctgggagcttggagcgacagtgtgggccgccgcccgctgctagtgctggcctcgctgggcctgctgctccaggccctagtgtccgtttttgtggtgcagctgcagctccacgtcggctacttcgtgctgggtcgcatcctttgtgccctcctcggcgacttcggtggccttctggctgctagctttgcgtccgtggcagatgtcagctccagtcgcagccgcaccttccggatggccctgctggaagccagcatcggggtggctgggatgctggcaagcctcctcgggggccactggctccgggcccagggttatgccaaccccttctggctggccttggccttgctgatagccatgactctctatgcagctttctgctttggtgagaccttaaaggagccaaagtccacccggctcttcacgttccgtcaccaccgatccattgtccagctctatgtggctcccgccccagagaagtccaggaaacatttagccctctactcactggccatcttcgtggtgatcactgtgcactttggggcccaggacatcttaaccctttatgaactaagcacacccctctgctgggactccaaactaatcggctatggttctgcagctcagcatctcccctacctcaccagcctgctggccctgaagctcctgcagtactgcctggccgatgcctgggtagctgagatcggcctggccttcaacatcctggggatggtggtctttgcctttgccactatcacgcctctcatgttcacaggtaaagtgtgtgggctcagggacagcttgtcccagaggcactgggtaagaactgggggccggccactcactgcccccagatgtggttcattcctgtgtctttggaaacatagttatgcccccagcctgcactggagaacagacaactaagaaatccctcaaaaatgccatctttg

SEQ ID NO: 284572 - DNA, 2442 bp, Homo sapiens
tgtgacccggtgtgtatgattatttcctttggtgggttgtttctcttggtgggtttttgtctcctttgttgtgtcgcgcccgcgataggtgtggttgtgttccatatgttcttccgaccgggtcgcgtttctttcttgcctgcctcctcttctgttttgttggccccgctctcgttctccgtttttttcgccgcgccccgtgtggcggcccctgttctgacatcatctgggccgtggactgattgttgcgtcccctgtggggtgtgtatggggtcgcgcccctccgttgtcttgtttttgtttcttgtcttgtttgttgttttgtgttctgtgtttttttttttttttttttttttttttgttttttgtttttttttttgtttgtttttttttccacaactttttgagacatgttttgttagcaactccattttacagatgaaaaaacagaggctcagggtggtaagtggcatgccgaaggtagtggcagagcctaggtgttccagcccaggcagctgggctcagcccactccgatcctctccagctgcctctctgttacagcgcagaacatcagcagcatcaggagtcatgtgctcttccagctctgccttgagtacccgatgacctcgtttcctcagcggtagatagcgatggttaatattggctagcgaagtggagacccttacctcccactggaccctctacatgaacgtgggcggcttcctggtggggctcttctcgtccaccctgctgggagcttggagcgacagtgtgggccgccgcccgctgctagtgctggcctcgctgggcctgctgctccaggccctagtgtccgtttttgtggtgcagctgcagctccacgtcggctacttcgtgctgggtcgcatcctttgtgccctcctcggcgacttcggtggccttctggctgctagctttgcgtccgtggcagatgtcagctccagtcgcagccgcaccttccggatggccctgctggaagccagcatcggggtggctgggatgctggcaagcctcctcgggggccactggctccgggcccagggttatgccaaccccttctggctggccttggccttgctgatagccatgactctctatgcagctttctgctttggtgagaccttaaaggagccaaagtccacccggctcttcacgttccgtcaccaccgatccattgtccagctctatgtggctcccgccccagagaagtccaggaaacatttagccctctactcactggccatcttcgtggtgatcactgtgcactttggggcccaggacatcttaaccctttatgaactaagcacacccctctgctgggactccaaactaatcggctatggttctgcagctcagcatctcccctacctcaccagcctgctggccctgaagctcctgcagtactgcctggccgatgcctgggtagctgagatcggcctggccttcaacatcctggggatggtggtctttgcctttgccactatcacgcctctcatgttcacaggatatgggttgcttttcctgtcattagtcatcacacctgtcatccgggctaaactctccaagctggtgagagagacagagcagggtgctctcttttctgctgtggcctgtgtgaatagcctggccatgctgacggcctccggcatcttcaactcactctacccagccactctgaactttatgaaggggttccccttcctcctgggagctggcctcctgctcatcccggctgttctgattgggatgctggaaaaggctgatcctcacctcgagttccagcagtttccccagagcccctgatctgcctggaccagaagacagagggcaagaggagcaaagtgaacaccaagcaactggaggtctgcagctggaagcccagcccacagcaggacaagcaactcttgtctaagggcagtgctctctttggacgaggtagtcaagagagaccaaggcaccaccccatccacagctgacccagcctctgtctaggatctagaatcataacccacacaggcccactgcaggacaggtggcagaggagctatttgggacaggagtcagttctccctttctgctatccatcacttataaccccacaggccagaggagaggtcctgagagaggtgacacttcagggaccagaggcagcacgagggctggcatctctccttccagcccaaactgcacagccccaaccaggttcccaacacgtgtagcagtcatcagccattccttaacaatgaatgtggtacctggttagtgccagccttgggaaggagggagggaggtaagaggggcttggtgatctctggaggaagagtgttgcctttgctgtggttggggaatcgatccttggctatggcctacccactcccctggctgaagagtgccaatcattacaaatcagcttcagcaaactg

SEQ ID NO: 284573 - DNA, 2087 bp, Homo sapiens
gccccacgccacgcgtcgctggtcccaggcagcgagtcgctcgcgcgccccgccgcccgcctggcgacagctccgccgcgcacgcacatggaggggagcgcgagccccccggaaaagccccgcgcccgccctgcggctgccgtgctgtgccggggcccggtagagccgctggtcttcctggccaactttgccttggtcctgcagggcccgctcaccacgcagtatctgtggcaccgcttcagcgccgacctcggctacaatggcacccgccaaagggggggctgcagcaaccgcagcgcggaccccaccatgcaggaagtggagacccttacctcccactggaccctctacatgaacgtgggcggcttcctggtggggctcttctcgtccaccctgctgggagcttggagcgacagtgtgggccgccgcccgctgctagtgctggcctcgctgggcctgctgctccaggccctagtgtccgtttttgtggtgcagctgcagctccacgtcggctacttcgtgctgggtcgcatcctttgtgccctcctcggcgacttcggtggccttctggctgctagctttgcgtccgtggcagatgtcagctccagtcgcagccgcaccttccggatggccctgctggaagccagcatcggggtggctgggatgctggcaagcctcctcgggggccactggctccgggcccagggttatgccaaccccttctggctggccttggccttgctgatagccatgactctctatgcagctttctgctttggtgagaccttaaaggagccaaagtccacccggctcttcacgttccgtcaccaccgatccattgtccagctctatgtggctcccgccccagagaagtccaggaaacatttagccctctactcactggccatcttcgtggtgatcactgtgcactttggggcccaggacatcttaaccctttatgaactaagcacacccctctgctgggactccaaactaatcggctatggttctgcagctcagcatctcccctacctcaccagcctgctggccctgaagctcctgcagtactgcctggccgatgcctgggtagctgagatcggcctggccttcaacatcctggggatggtggtctttgcctttgccactatcacgcctctcatgttcacaggatatgggttgcttttcctgtcattagtcatcacacctgtcatccgggctaaactctccaagctggtgagagagacagagcagggtgctctcttttctgctgtggcctgtgtgaatagcctggccatgctgacggcctccggcatcttcaactcactctacccagccactctgaactttatgaaggggttccccttcctcctgggagctggcctcctgctcatcccggctgttctgattgggatgctggaaaaggctgatcctcacctcgagttccagcagtttccccagagcccctgatctgcctggaccagaagacagagggcaagaggagcaaagtgaacaccaagcaactggaggtctgcagctggaagcccagcccacagcaggacaagcaactcttgtctaagggcagtgctctctttggacgaggtagtcaagagagaccaaggcaccaccccatccacagctgacccagcctctgtctaggatctagaatcataacccacacaggcccactgcaggacaggtggcagaggagctatttgggacaggagtcagttctccctttctgctatccatcacttataaccccacaggccagaggagaggtcctgagagaggtgacacttcagggaccagaggcagcacgagggctggcatctctccttccagcccaaactgcacagccccaaccaggttcccaacacgtgtagcagtcatcagccattccttaacaatgaatgtggtacctggttagtgccagccttgggaaggagggagggaggtaagaggggcttggtgatctctggaggaagagtgttgcctttgctgtggttggggaatcgatccttggctatggcctacccactcccctggctgaagagtgccaatcattacaaatcagcttcagcaaactg

SEQ ID NO: 284574 - DNA, 2388 bp, Homo sapiens
tgtgacccggtgtgtatgattatttcctttggtgggttgtttctcttggtgggtttttgtctcctttgttgtgtcgcgcccgcgataggtgtggttgtgttccatatgttcttccgaccgggtcgcgtttctttcttgcctgcctcctcttctgttttgttggccccgctctcgttctccgtttttttcgccgcgccccgtgtggcggcccctgttctgacatcatctgggccgtggactgattgttgcgtcccctgtggggtgtgtatggggtcgcgcccctccgttgtcttgtttttgtttcttgtcttgtttgttgttttgtgttctgtgtttttttttttttttttttttttttttgttttttgtttttttttttgtttgtttttttttccacaactttttgagacatgttttgttagcaactccattttacagatgaaaaaacagaggctcagggtggtaagtggcatgccgaaggtagtggcagagcctaggtgttccagcccaggcagctgggctcagcccactccgatcctctccagctgcctctctgttacagcgcagaacatcagcagcatcaggagtcatgtgctcttccagctctgccttgagtacccgatgacctcgtttcctcagcggtagatagcgatggttaatattggctagcgaagtggagacccttacctcccactggaccctctacatgaacgtgggcggcttcctggtggggctcttctcgtccaccctgctgggagcttggagcgacagtgtgggccgccgccctgtggtgcagctgcagctccacgtcggctacttcgtgctgggtcgcatcctttgtgccctcctcggcgacttcggtggccttctggctgctagctttgcgtccgtggcagatgtcagctccagtcgcagccgcaccttccggatggccctgctggaagccagcatcggggtggctgggatgctggcaagcctcctcgggggccactggctccgggcccagggttatgccaaccccttctggctggccttggccttgctgatagccatgactctctatgcagctttctgctttggtgagaccttaaaggagccaaagtccacccggctcttcacgttccgtcaccaccgatccattgtccagctctatgtggctcccgccccagagaagtccaggaaacatttagccctctactcactggccatcttcgtggtgatcactgtgcactttggggcccaggacatcttaaccctttatgaactaagcacacccctctgctgggactccaaactaatcggctatggttctgcagctcagcatctcccctacctcaccagcctgctggccctgaagctcctgcagtactgcctggccgatgcctgggtagctgagatcggcctggccttcaacatcctggggatggtggtctttgcctttgccactatcacgcctctcatgttcacaggatatgggttgcttttcctgtcattagtcatcacacctgtcatccgggctaaactctccaagctggtgagagagacagagcagggtgctctcttttctgctgtggcctgtgtgaatagcctggccatgctgacggcctccggcatcttcaactcactctacccagccactctgaactttatgaaggggttccccttcctcctgggagctggcctcctgctcatcccggctgttctgattgggatgctggaaaaggctgatcctcacctcgagttccagcagtttccccagagcccctgatctgcctggaccagaagacagagggcaagaggagcaaagtgaacaccaagcaactggaggtctgcagctggaagcccagcccacagcaggacaagcaactcttgtctaagggcagtgctctctttggacgaggtagtcaagagagaccaaggcaccaccccatccacagctgacccagcctctgtctaggatctagaatcataacccacacaggcccactgcaggacaggtggcagaggagctatttgggacaggagtcagttctccctttctgctatccatcacttataaccccacaggccagaggagaggtcctgagagaggtgacacttcagggaccagaggcagcacgagggctggcatctctccttccagcccaaactgcacagccccaaccaggttcccaacacgtgtagcagtcatcagccattccttaacaatgaatgtggtacctggttagtgccagccttgggaaggagggagggaggtaagaggggcttggtgatctctggaggaagagtgttgcctttgctgtggttggggaatcgatccttggctatggcctacccactcccctggctgaagagtgccaatcattacaaatcagcttcagcaaactg

SEQ ID NO: 284575 - DNA, 1138 bp, Homo sapiens
  misc_feature (1101)..(1101): n is a, c, g, or t
atttgaaacaacaactttattagcacctggcactaggcggagagaggcggtaagccgcgaggaggaaagggactcacgtcccgctgtggaccgatcctgctaagcagagaatcgctgtggccggacgacggggcgtcgagacaagaagaaagacgttggcaatcccacaaggcctagggccacgtcccgccgtcctcggctgctgagcctgatgggacaagtagttttgcgaacggcttaacctacagattgaagaggtcggaagctctgaggcccggggcttccggaggtcgcggagatggaattggagcagagagaagggaccatggcagccgtgggctttgaggagttctcagcgccgccaggctcagagttggcgttgcctcccctatttggtggccacatcctggagagcgagctggagacggaagtggagtttgtgtcaggtggtctgggcggctcagggctccgggagcgagatgaagaggaagaggcagcccggggtcggcggcggcgccagcgggaattaaatcgcagaaagtaccaggcactaggtcggcgctgccgggagatcgagcaggtgaacgagcgggtcctgaacaggctccatcaggtgcagaggataactcggaggctgcagcaggaacggaggttcctcatgagagtgctggactcctacggggatgactaccgggccagccagttcaccattgtgctggaggatgagggcagccagggcacggatgcccccaccccaggcaatgcggagaatgagcctccagagaaagagacactgtccccgcccagaaggactcctgcacccccagaacccggcagcccagcccccggtgaggggcccagtgggcggaagaggcggcgagtgccacgggatggacgccgagcaggaaatgcgctgactccagagctggccccggtgcagattaaggttgaggaagactttggctttgaagcagatgaggccctggattccagttgggtttctcggggtccagacaaactgctgccctacccgaccctggccagcccagcctctgactgacgcatgcccaataaactgaccccacactcaaaaaaaaaaanaaaataaaaaaaaacaggggggcgcacaaaaattacc

SEQ ID NO: 284576 - DNA, 982 bp, Homo sapiens
  misc_feature (861)..(861): n is a, c, g, or t
  misc_feature (871)..(871): n is a, c, g, or t
  misc_feature (885)..(885): n is a, c, g, or t
  misc_feature (891)..(891): n is a, c, g, or t
  misc_feature (893)..(893): n is a, c, g, or t
  misc_feature (901)..(902): n is a, c, g, or t
  misc_feature (905)..(905): n is a, c, g, or t
atttgaaacaacaactttattagcacctggcactaggcggagagaggcggtaagccgcgaggaggaaagggactcacgtcccgctgtggaccgatcctgctaagcagagaatcgctgtggccggacgacggggcgtcgagacaagaagaaagacgttggcaactcagaggactggttgcggcgttagacaagaaagcaaggcctttaagcagggattcggggtggacgtgggggtgggccgaagcgaagccggaaacaggaaactacaactcccacaaggcctagggccacgtcccgccgtcctcggctgctgagcctgatgggacaagtagttttgcgaacggcttaacctacagattgaagaggtcggaagctctgaggcccggggcttccggaggtcgcggagatggaattggagcagagagaagggaccatggcagccgtgggctttgaggagttctcagcgccgccaggctcagagttggcgttgcctcccctatttggtggccacatcctggagagcgagctggagacggaagtggagtttgtgtcaggtggtctgggcggctcagggctccgggagcgagatgaagaggaagaggcagcccggggtcggcggcggcgccagcgggaattaaatcgcagaaagtaccaggcactaggtcggcgctgccgggagatcgagcaggtgaacgagcgggtcctgaacaggctccatcaggtgcagaggataactcggaggctgcagcaggaacggaggttcctcatgagagtgctggactcctacggggatgactaccgggccagccagttcaccattgtgctggagatagggcgccgggacggatgtcccacccaggnaggggaaatngctccagaaaagangtgccncnaagattgnnccnaaacgggacacccgtgaggccaaggcgaagcacgaccggggagcccgaaagaggacacaaacgcggatagagagcga

SEQ ID NO: 284577 - DNA, 1127 bp, Homo sapiens
atttgaaacaacaactttattagcacctggcactaggcggagagaggcggtaagccgcgaggaggaaagggactcacgtcccgctgtggaccgatcctgctaagcagagaatcgctgtggccggacgacggggcgtcgagacaagaagaaagacgttggcaactcagaggactggttgcggcgttagacaagaaagcaaggcctttaagcagggattcggggtggacgtgggggtgggccgaagcgaagccggaaacaggaaactacaactcccacaaggcctagggccacgtcccgccgtcctcggctgctgagcctgatgggacaagtagttttgcgaacggcttaacctacagattgaagaggtcggaagctctgaggcccggggcttccggaggtcgcggagatggaattggagcagagagaagggaccatggcagccgtgggctttgaggagttctcagcgccgccaggctcagagttggcgttgcctcccctatttggtggccacatcctggagagcgagctggagacggaagtggagtttgtgtcaggtggtctgggcggctcagggctccgggagcgagatgaagaggaagaggcagcccggggtcggcggcggcgccagcgggaattaaatcgcagaaagtaccaggcactaggtcggcgctgccgggagatcgagcaggttcctcatgagagtgctggactcctacggggatgactaccgggccagccagttcaccattgtgctggaggatgagggcagccagggcacggatgcccccaccccaggcaatgcggagaatgagcctccagagaaagagacactgtccccgcccagaaggactcctgcacccccagaacccggcagcccagcccccggtgaggggcccagtgggcggaagaggcggcgagtgccacgggatggacgccgagcaggaaatgcgctgactccagagctggccccggtgcagattaaggttgaggaagactttggctttgaagcagatgaggccctggattccagttgggtttctcggggtccagacaaactgctgccctacccgaccctggccagcccagcctctgactgacgcatgcccaataaactgaccccacactca

SEQ ID NO: 284578 - DNA, 1014 bp, Homo sapiens
atttgaaacaacaactttattagcacctggcactaggcggagagaggcggtaagccgcgaggaggaaagggactcacgtcccgctgtggaccgatcctgctaagcagagaatcgctgtggccggacgacggggcgtcgagacaagaagaaagacgttggcaactcagaggactggttgcggcgttagacaagaaagcaaggcctttaagcagggattcggggtggacgtgggggtgggccgaagcgaagccggaaacaggaaactacaactcccacaaggcctagggccacgtcccgccgtcctcggctgctgagcctgatgggacaagtagttttgcgaacggcttaacctacagattgaagaggtcggaagctctgaggcccggggcttccggaggtcgcggagatggaattggagcagagagaagggaccatggcagccgtgggctttgaggagttctcagcgccgccaggctcagagttggcgttgcctcccctatttggtggccacatcctggagagcgagctggagacggaagtggagtttgtgtcaggtggtctgggcggctcagggctccgggagcgagatgaagaggaagaggcagcccggggtcggcggcggcgccagcgggaattaaatcgcagaaagtaccaggcactaggtcggcgctgccgggagatcgagcaggtgaacgagcgggtcctgaacaggctccatcaggtgcagaggataactcggaggctgcagcaggaacggaggttcctcatgagagtgctggactcctacggggatgactaccgggccagccagttcaccattgtgctggaggatgagggcagccagggcacggatgcccccaccccaggcaatgcggagaatgagcctccagagaaagagacactgtccccgcccagaaggactcctgcacccccagaacccggcagcccagtcccgtgctggggactgaataggcacggaaagaggctcgtgtcctaggatgccagccgatcagg

SEQ ID NO: 284579 - DNA, 990 bp, Homo sapiens
atttgaaacaacaactttattagcacctggcactaggcggagagaggcggtaagccgcgaggaggaaagggactcacgtcccgctgtggaccgatcctgctaagcagagaatcgctgtggccggacgacggggcgtcgagacaagaagaaagacgttggcaactcagaggactggttgcggcgttagacaagaaagcaaggcctttaagcagggattcggggtggacgtgggggtgggccgaagcgaagccggaaacaggaaactacaactcccacaaggcctagggccacgtcccgccgtcctcggctgctgagcctgatgggacaagtagttttgcgaacggcttaacctacagattgaagaggtcggaagctctgaggcccggggcttccggaggtcgcggagatggaattggagcagagagaagggaccatggcagccgtgggctttgaggagttctcagcgccgccaggctcagagttggcgttgcctcccctatttggtggccacatcctggagagcgagctggagacggaagtggagtttgtgtcaggtggtctgggcggctcagggctccgggagcgagatgaagaggaagaggcagcccggggtcggcggcggcgccagcgggaattaaatcgcagaaagtaccaggcactaggtcggcgctgccgggagatcgagcaggtgaacgagcgggtcctgaacaggctccatcaggtgcagaggataactcggaggctgcagcaggaacggagtcaccgagacttggagccagaatctgagcctcagctggagtcagagacagcaggaaaatgggtcctgtgtaattatgacttccaggcccgcaacagcagtgagctgtcggtcaagcagcgggacgtactggaggtcctggatgacagtcgtaagtggtggaaggttcgggacccagcggggcaggagggatagtgccctacaacatcctacacccaaccccgacaagatgg

SEQ ID NO: 284580 - DNA, 903 bp, Homo sapiens
atttgaaacaacaactttattagcacctggcactaggcggagagaggcggtaagccgcgaggaggaaagggactcacgtcccgctgtggaccgatcctgctaagcagagaatcgctgtggccggacgacggggcgtcgagacaagaagaaagacgttggcaactcagaggactggttgcggcgttagacaagaaagcaaggcctttaagcagggattcggggtggacgtgggggtgggccgaagcgaagccggaaacaggaaactacaactcccacaaggcctagggccacgtcccgccgtcctcggctgctgagcctgatgggacaagtagttttgcgaacggcttaacctacagattgaagaggtcggaagctctgaggcccggggcttccggaggtcgcggagatggaattggagcagagagaagggaccatggcagccgtgggctttgaggagttctcagcgccgccaggctcagagttggcgttgcctcccctatttggtggccacatcctggagagcgagctggagacggaagtggagtttgtgtcaggtggtctgggcggctcagggctccgggagcgagatgaagaggaagaggcagcccggggtcggcggcggcgccagcgggaattaaatcgcagaaagtaccagcccccggtgaggggcccagtgggcggaagaggcggcgagtgccacgggatggacgccgagcaggaaatgcgctgactccagagctggccccggtgcagattaaggttgaggaagactttggctttgaagcagatgaggccctggattccagttgggtttctcggggtccagacaaactgctgccctacccgaccctggccagcccagcctctgactgacgcatgcccaataaactgaccccacactca

SEQ ID NO: 284581 - DNA, 163 bp, Homo sapiens
gggctgggggcctggattctaggatctcagggaggaggggttggggtctgggctcctggttcagtgggagaaggggctgggggtccaggatccagggcccctgagcctttccctgcctctcaggaccatggcagccgtgggctttgaggagttctcagcgccg

SEQ ID NO: 284582 - DNA, 804 bp, Homo sapiens
aggggtttggactgctggatctgacagactatgaggaccatggcagccgtgggctttgaggagttctcagcgccgccaggctcagagttggcgttgcctcccctatttggtggccacatcctggagagcgagctggagacggaagtggagtttgtgtcaggtggtctgggcggctcagggctccgggagcgagatgaagaggaagaggcagcccggggtcggcggcggcgccagcgggaattaaatcgcagaaagtaccaggcactaggtcggcgctgccgggagatcgagcaggtgaacgagcgggtcctgaacaggctccatcaggtgcagaggataactcggaggctgcagcaggaacggaggttcctcatgagagtgctggactcctacggggatgactaccgggccagccagttcaccattgtgctggaggatgagggcagccagggcacggatgcccccaccccaggcaatgcggagaatgagcctccagagaaagagacactgtccccgcccagaaggactcctgcacccccagaacccggcagcccagcccccggtgaggggcccagtgggcggaagaggcggcgagtgccacgggatggacgccgagcaggaaatgcgctgactccagagctggccccggtgcagattaaggttgaggaagactttggctttgaagcagatgaggccctggattccagttgggtttctcggggtccagacaaactgctgccctacccgaccctggccagcccagcctctgactgacgcatgcccaataaactgaccccacactca

SEQ ID NO: 284583 - DNA, 1198 bp, Homo sapiens
atttgaaacaacaactttattagcacctggcactaggcggagagaggcggtaagccgcgaggaggaaagggactcacgtcccgctgtggaccgatcctgctaagcagagaatcgctgtggccggacgacggggcgtcgagacaagaagaaagacgttggcaactcagaggactggttgcggcgttagacaagaaagcaaggcctttaagcagggattcggggtggacgtgggggtgggccgaagcgaagccggaaacaggaaactacaactcccacaaggcctagggccacgtcccgccgtcctcggctgctgagcctgatgggacaagtagttttgcgaacggcttaacctacagattgaagaggtcggaagctctgaggcccggggcttccggaggtcgcggagatggaattggagcagagagaagggaccatggcagccgtgggctttgaggagttctcagcgccgccaggctcagagttggcgttgcctcccctatttggtggccacatcctggagagcgagctggagacggaagtggagtttgtgtcaggtggtctgggcggctcagggctccgggagcgagatgaagaggaagaggcagcccggggtcggcggcggcgccagcgggaattaaatcgcagaaagtaccaggcactaggtcggcgctgccgggagatcgagcaggtgaacgagcgggtcctgaacaggctccatcaggtgcagaggataactcggaggctgcagcaggaacggaggttcctcatgagagtgctggactcctacggggatgactaccgggccagccagttcaccattgtgctggaggatgagggcagccagggcacggatgcccccaccccaggcaatgcggagaatgagcctccagagaaagagacactgtccccgcccagaaggactcctgcacccccagaacccggcagcccagcccccggtgaggggcccagtgggcggaagaggcggcgagtgccacgggatggacgccgagcaggaaatgcgctgactccagagctggccccggtgcagattaaggttgaggaagactttggctttgaagcagatgaggccctggattccagttgggtttctcggggtccagacaaactgctgccctacccgaccctggccagcccagcctctgactgacgcatgcccaataaactgaccccacactca

SEQ ID NO: 284584 - DNA, 942 bp, Homo sapiens
  misc_feature (17)..(17): n is a, c, g, or t
  misc_feature (22)..(22): n is a, c, g, or t
  misc_feature (25)..(25): n is a, c, g, or t
  misc_feature (33)..(33): n is a, c, g, or t
  misc_feature (36)..(36): n is a, c, g, or t
  misc_feature (44)..(44): n is a, c, g, or t
  misc_feature (52)..(52): n is a, c, g, or t
  misc_feature (58)..(59): n is a, c, g, or t
  misc_feature (905)..(905): n is a, c, g, or t
gactaagggaacctacnaaagnttntggtcaanaanaacgcagngcgttgtntaatannacgacggcatactatacggtctaggtacgagctggtgggcggaatggaattggagcagagagaagggaccatggcagccgtgggctttgaggagttctcagcgccgccaggctcagagttggcgttgcctcccctatttggtggccacatcctggagagcgagctggagacggaagtggagtttgtgtcaggtggtctgggcggctcagggctccgggagcgagatgaagaggaagaggcagcccggggtcggcggcggcgccagcgggaattaaatcgcagaaagtaccaggcactaggtcggcgctgccgggagatcgagcaggtgaacgagcgggtcctgaacaggctccatcaggtgcagaggataactcggaggctgcagcaggaacggaggttcctcatgagagtgctggactcctacggggatgactaccgggccagccagttcaccattgtgctggaggatgagggcagccagggcacggatgcccccaccccaggcaatgcggagaatgagcctccagagaaagagacactgtccccgcccagaaggactcctgcacccccagaacccggcagcccagcccccggtgaggggcccagtgggcggaagaggcggcgagtgccacgggatggacgccgagcaggaaatgcgctgactccagagctggccccggtgcagattaaggttgaggaagactttggctttgaagcagatgaggccctggattccagttgggtttctcggggtccagacaaactgctgccctacccgaccctggccagcccagcctctgactgacgcatgcccaataaactgaccccacactcaaaaaaaaaaanaaaataaaaaaaaacaggggggcgcacaaaaattacc

SEQ ID NO: 284585 - DNA, 483 bp, Homo sapiens
accaaataactaacattaaatgaaccacagcataaaatgagaaagcgccccactacaaacctctattcatttggaaaaagtaataaaatgtgtcttctgaataaccaatgaattaagtattgtataagtctacactcccttactgcaattccaaaatgcaaatgctcgactctgaccacactggtcatgttttctaatttcttataccttgttcatactctccattcttttaatttatgtaaagattttaaacatcttattctatattctgtattttataatattcaggatccacaatccttgagagctcaattcttccatcttttgtttctgatggctctcattatgtggcagcttatttccatgtggtctttgtaattttggattctgacttcatttttagcccaactccatctgtcagaagtcaggagcctgagatgaaaataagatcctttagagcaggggttgcaaaactttttatga

SEQ ID NO: 284586 - DNA, 807 bp, Homo sapiens
gcggaagggactagaccttccgcaactgagttcctgccagaccttggaccttaacttgcttctgacacagactttgctagaagcttccagagcagggctgagcacctacagatgactggagaacaccaaaggcaggccaggtgggaatggatggcgggaaaagccctgtgaatctcaaggcaccacacagggcacagagggagaccccaggtaacatgcacatggtcaaaaaatggaacaatatgaacaagatagtaagcaaagtcttactgcaatgcccttccagtttgccccagtaccagccctgcctcctccagatttcacatttcaagaaaatcctagcactcaccggtcggtagtaaaaatgtaccccacgtgatccttacagcttaacagcaggacactgaaggctacagcaaagagcactgaaggtaaaaacggcagaagaaacaacacagtgaacaagaagatccacaggaagtggaggagcctgggttttgcatgcagagactgcaccaagagcctcgggtaaaggggtctcagcacctgtaatcagcagggaaacggtagaggacttccgtgcctgctccatgtctccagcacccagagcgtttcctacccggacactggcagccacactgaagcctgcagggacctaaaataaaaaggaaacctgcaacaatgagtgagaaactgcagagcgagaacacgtgcagagaagcagcctcatgcctcacacctggtgggaaaacttggtcctaaaagttttgaaaagactgatttgcaacatcccctttgtctagccgg

SEQ ID NO: 284587 - DNA, 972 bp, Homo sapiens
gtgattggggtttacagtgttttctctcgctctctctgtttctagggaattcgggctgtgtttagctgctggaatatcgtagaattggttttcagagaagttcctcgactcctgaggcgaaacataaagggatgggagtggtgtgggaagtgatcgtgtggggaaaaaaaagtttcgagcccgtttcgcatttgtggagacagagtttttggtgtgaccactcttttgtgggaaacccaaaccaaggagaactcaggagaattggcgctcttcggtcctggaggttccgcagctaacatcccggcttgaccaactatcgaggccgcaaattaatagggcacctcctgggaggaaaacgcccatcctgacttctcaactgtgacagtttgctctgtcgcccaggatggagtgcagtgcagtggcgcgatcctgcaacctccgcctctcgagttcaagcgattctcctgcctcagcctcccgagtagctgggattacagacgcgcgccaccccacccagatgatctttttaaatgcaaaatgccatcgacgcagaaaatcaaaggtatccattgtatctgtgcgtttgagttctaggatatgacaaagaaaaacaatttaaatattacgtaaattcagtaggaaaaagaaagatgatgactgataagtacattgtgtacctccttaagctgtgctgtccagtaggctgtcctctagccatatgtggctactcagcacttgaaatgtggttgagacggaaaaactgaatcgttaattgaatttgaattaaacaaaaaccaaaaacctgatgctcgattcaattgttggaatacttttaagtgtgtttgcaacaactcagatatatgaatctgtttttccaacttaaattttatgaactctaactttagcatatgaattgagatgtgctgtaagtatatatcagctggactttttttttatttctggacttactac

SEQ ID NO: 284588 - DNA, 1195 bp, Homo sapiens
gtgattggggtttacagtgttttctctcgctctctctgtttctagggaattcgggctgtgtttagctgctggaatatcgtagaattggttttcagagaagttcctcgactcctgaggcgaaacataaagggatgggagtggtgtgggaagtgatcgtgtggggaaaaaaaagtttcgagcccgtttcgcatttgtggagacagagtttttggtgtgaccactcttttgtgggaaacccaaaccaaggagaactcaggagaattggcgctcttcggtcctggaggttccgcagctaacatcccggcttgaccaactatcgaggccgcaaattaatagggcacctcctgggaggaaaacgcccatcctgacttctcaactgtgacagtttgctctgtcgcccaggatggagtgcagtgcagtggcgcgatcctgcaacctccgcctctcgagttcaagcgattctcctgcctcagcctcccgagtagctgggattacagacgcgcgccaccccacccagatgatctttttaaatgcaaaatgccatcgacgcagaaaatcaaagaatcagcttaagttccagaaaaaagaaaaaccaaccaaatgaacaataagacaacaacaacaacaacaaaaaaggccttttgggattttggatgatattgcatcaaatccatacattaacctgagagacgagcgacttcttcaacattgagccttccaatcatgattttcaattcatttaggtcttctgtaatgtttcttaatataattgtatttgttgctatgcagaagtttcactgatcttttattatatctctatatatatttgatatttctgacactattgtaaatagtatctttttaatatttcattttccttttttgttgcttaaatatatataaaataagctaattttccaaactaatttttatatccagcaaccctgctaaaatttcttatccaataaaaatataaatgtaaaaaaacaaaggaaaagctcgaggtcagcatgtggcgcctcgcgtggaaggggttgcacttcctggggccggccgggggcggggtgttgggcctgttcttgtaagggtggggatggtgacccactcttccttttgttgtagtgcctatgagctcgtgaaataaggcggaggctttggggggtgggcgaggcgataggagaacacagaaagagga

SEQ ID NO: 284589 - DNA, 1016 bp, Homo sapiens
ggagagagggatgggcgtggctaatatgaaagctgcatctttactagttagctaccatgcgtcattatttatcaaaagatatatgctgcttaaacacaaatacgttttaaaatatattttaggcagtagggttttgggttttttttttgcaagttcttttggtgagtaaatttagtgataaatgatttttttttcttttgagacagtttgctctgtcgcccaggatggagtgcagtgcagtggcgcgatcctgcaacctccgcctctcgagttcaagcgattctcctgcctcagcctcccgagtagctgggattacagacgcgcgccaccccacccagatgatctttttaaatgcaaaatgccatcgacgcagaaaatcaaagaatcagcttaagttccagaaaaaagaaaaaccaaccaaatgaacaataagacaacaacaacaacaacaaaaaaggccttttgggattttggatgatattgcatcaaatccatacattaacctgagagacgagcgacttcttcaacattgagccttccaatcatgattttcaattcatttaggtcttctgtaatgtttcttaatataattgtatttgttgctatgcagaagtttcactgatcttttattatatctctatatatatttgatatttctgacactattgtaaatagtatctttttaatatttcattttccttttttgttgcttaaatatatataaaataagctaattttccaaactaatttttatatccagcaaccctgctaaaatttcttatccaataaaaatataaatgtaaaaaaacaaaggaaaagctcgaggtcagcatgtggcgcctcgcgtggaaggggttgcacttcctggggccggccgggggcggggtgttgggcctgttcttgtaagggtggggatggtgacccactcttccttttgttgtagtgcctatgagctcgtgaaataaggcggaggctttggggggtgggcgaggcgataggagaacacagaaagagga

SEQ ID NO: 284590 - DNA, 854 bp, Homo sapiens
ctctagcaggtcagaacatgggtgggtgggagaatagtaattcgtttgctctgtcgcccaggatggagtgcagtgcagtggcgcgatcctgcaacctccgcctctcgagttcaagcgattctcctgcctcagcctcccgagtagctgggattacagacgcgcgccaccccacccagatgatctttttaaatgcaaaatgccatcgacgcagaaaatcaaagaatcagcttaagttccagaaaaaagaaaaaccaaccaaatgaacaataagacaacaacaacaacaacaaaaaaggccttttgggattttggatgatattgcatcaaatccatacattaacctgagagacgagcgacttcttcaacattgagccttccaatcatgattttcaattcatttaggtcttctgtaatgtttcttaatataattgtatttgttgctatgcagaagtttcactgatcttttattatatctctatatatatttgatatttctgacactattgtaaatagtatctttttaatatttcattttccttttttgttgcttaaatatatataaaataagctaattttccaaactaatttttatatccagcaaccctgctaaaatttcttatccaataaaaatataaatgtaaaaaaacaaaggaaaagctcgaggtcagcatgtggcgcctcgcgtggaaggggttgcacttcctggggccggccgggggcggggtgttgggcctgttcttgtaagggtggggatggtgacccactcttccttttgttgtagtgcctatgagctcgtgaaataaggcggaggctttggggggtgggcgaggcgataggagaacacagaaagagga

SEQ ID NO: 284591 - DNA, 208 bp, Homo sapiens
gagacactggtctggatcgggtcggtggagtgggggacttacatccgtgatggccttcttggccttctcctcagcattcctgcactcctgcactgcctcctccacttcagtctggagctgggacaggaatgagcaggggagctgctcacctgggaatgcagcagctgcacccgctcactagtctcaatcagctcctgctccgccagct

SEQ ID NO: 284592 - DNA, 978 bp, Homo sapiens
  misc_feature (973)..(977): n is a, c, g, or t
aggcctaaagaggtagtgggtgtgagccagcctcgggcgcgttaaaaagggggcgccggagggaggcaaggagaggaagttgggtgtaggaagaagcgagaggaaactgttgcctggacagagcgtgccgtgccaaagcgcggaaacgggatcaaggagggggcatcaggaatcgcctggggaccccccggagagtggcggaagcggtgcccttgggcgcagcaaagagagaagggagcacaggctgagatagagacagtcctgggcgctggagagcaggagcccccggagcggcagggaaaggaacgtagagcctgcatgctcggggtatgagcttactgcgctcgctagggtggcgcgcactggggctctagaaaagagggttgagaagccccgggcaagtgcctaggaaggtcagaggagtcagcaaagtccacggaagaacttccccgggttggagaggaaacgcaccctgggagctggaaagaagaggaaagctagcctgggggaagcttgatcagggctctgagtaccacgaggagtgcagaggaggtgctgatgattgcggggagagctctgagagcccgagaaagatggggaaactgaagccctagaggaaaagaagactaaatgtattaccatctgacccacttcctggccagcctgttcacctgtctgctgttcttcattgtggcaggtgtatgtgtgagtttgcagctcaatcctggccaaggggatccaaggactgctgaagaggcatgtctgcacatgtcacctagaacatctccagccatcatgtgatctctgggggaggcattcccaactctctgagagaagcagaccagaaagatggaaagaaagcacctggctccaggatgatgacattgagccgatgaattaaccacctttgtgctgctctaaccttcagagttcaccttaacatgagaaaataaaacccttattgcttaaacannnnna

SEQ ID NO: 284593 - DNA, 1039 bp, Homo sapiens
  misc_feature (1034)..(1038): n is a, c, g, or t
aggcctaaagaggtagtgggtgtgagccagcctcgggcgcgttaaaaagggggcgccggagggaggcaaggagaggaagttgggtgtaggaagaagcgagaggaaactgttgcctggacagagcgtgccgtgccaaagcgcggaaacgggatcaaggagggggcatcaggaatcgcctggggaccccccggagagtggcggaagcggtgcccttgggcgcagcaaagagagaagggagcacaggctgagatagagacagtcctgggcgctggagagcaggagcccccggagcggcagggaaaggaacgtagagcctgcatgctcggggtatgagcttactgcgctcgctagggtggcgcgcactggggctctagaaaagagggttgagaagccccgggcaagtgcctaggaaggtcagaggagtcagcaaagtccacggaagaacttccccgggttggagaggaaacgcaccctgggagctggaaagaagaggaaagctagcctgggggaagcttgatcagggctctgagtaccacgaggagtgcagaggaggtgctgatgattgcggggagagctctgagagcccgagaaagatggggaaactgaagccctagaggaaaagaagactaaatgtattaccatctgacccacttcctggccagcctgttcacctgtctgctgttcttcattgaacaagagaaggaatcacaattggtccatgacagtcacggtcatctcattcctcttgccagtggcaggtgtatgtgtgagtttgcagctcaatcctggccaaggggatccaaggactgctgaagaggcatgtctgcacatgtcacctagaacatctccagccatcatgtgatctctgggggaggcattcccaactctctgagagaagcagaccagaaagatggaaagaaagcacctggctccaggatgatgacattgagccgatgaattaaccacctttgtgctgctctaaccttcagagttcaccttaacatgagaaaataaaacccttattgcttaaacannnnna

SEQ ID NO: 284594 - DNA, 909 bp, Homo sapiens
aggcctaaagaggtagtgggtgtgagccagcctcgggcgcgttaaaaagggggcgccggagggaggcaaggagaggaagttgggtgtaggaagaagcgagaggaaactgttgcctggacagagcgtgccgtgccaaagcgcggaaacgggatcaaggagggggcatcaggaatcgcctggggaccccccggagagtggcggaagcggtgcccttgggcgcagcaaagagagaagggagcacaggctgagatagagacagtcctgggcgctggagagcaggagcccccggagcggcagggaaaggaacgtagagcctgcatgctcggggtatgagcttactgcgctcgctagggtggcgcgcactggggctctagaaaagagggttgagaagccccgggcaagtgcctaggaaggtcagaggagtcagcaaagtccacggaagaacttccccgggttggagaggaaacgcaccctgggagctggaaagaagaggaaagctagcctgggggaagcttgatcagggctctgagtaccacgaggagtgcagaggaggtgctgatgattgcggggagagctctgagagcccgagaaaggtgaggaggaggtgcgaggacaaagaacacctagcgcgggccgggccgtgaggaagggagccgcagagagcgcgcggactcccctgcaggggctcaaagccgcccgggtctctcctcccaggctgcctctggccgtgattcactcaccatgatggaaaagaccaaagccacgatgttgatggggtacgcagggcaaaaacacgagacgatggtgagtcgaatggtggtcctagggcttcgtgaggtctttacctcgtgccgagggtacggggctcgaattgggaagtcatgcgcatagttgtcccagtatgagctt

SEQ ID NO: 284595 - DNA, 483 bp, Homo sapiens
  misc_feature (478)..(482): n is a, c, g, or t
ctctctgcttcaccaacagatgtgcaatctaagactcagagaagctggagaattttcctaacgtcacacagcaaaggaatggaagactcaggacaagaatacacgatcctctccttccaacatgtcacccagcagaacaagagaaggaatcacaattggtccatgacagtcacggtcatctcattcctcttgccagtggcaggtgtatgtgtgagtttgcagctcaatcctggccaaggggatccaaggactgctgaagaggcatgtctgcacatgtcacctagaacatctccagccatcatgtgatctctgggggaggcattcccaactctctgagagaagcagaccagaaagatggaaagaaagcacctggctccaggatgatgacattgagccgatgaattaaccacctttgtgctgctctaaccttcagagttcaccttaacatgagaaaataaaacccttattgcttaaacannnnna

SEQ ID NO: 284596 - DNA, 496 bp, Homo sapiens
aggttaaaatgaagcgattcagtcaagatacgtgtggcgcacatgatcctgcagaggtggaagcccacgccaagatattctggcagcacctaccctgacttccatattacacagaaagttgtcagcctgggtgaagaaggaaccagggcacccaactcatctgactgaaaaacaaaacaccacaagaggaatcccaagacctaaccaaaagataatctagactatgagctttgtcaattccaattggaatgtcgtggtcttctccttcgcccacagtgaatgccacatctctgcagtcaaacatccttccaccacagcggccttccaggtggactgagggcaaggagacaggagagtcaacagagctgcttcttaggactggctaattcagtgaagtgataaatgagtggtcgacaatgtagcaaataccatttcccctttctcatttcatcaagagacacacacagtgtgtcttggtgaagcttagtctacccag

SEQ ID NO: 284597 - DNA, 1307 bp, Homo sapiens
caggcgcccgccactgcgcccggctaattttttgtatttttagtagagagggggtttcaccgtggtctcgatctcctgacctcgtgatccgcccgcctcagcctcccaaagtgctgggattacaggcgtgagccaccgcgcccggccagttcaatggattttaaaaattattattctctagaaaaaagaccacgaactttggagtggacatcctgagacctgcctacgaagaccattaggtggcctccagaagacactcccctgattcctacaccgagggaacacacagcagcaagctaggaaagaaggggtgacccagcccaacgctgtaaaccagggcgcgaaccggcgttgagctgtgcagctgcgccctgggctccagtcctgctctgccgcagaccccaccggagccagcacctgcctccccgaccctcgctggggcggctgtgagatgagcccagagccttcctgagccaaccctcgcaaggaaagtctgtctgttcaccccactatccttgtcttgaaggatgaagaaaagagggccccccgggaggtcccaaaaggtggaatggacatctgggatccaagcacagcaatttctttatttttcttaagcctctcactagaggatgaaaatcgttctgcataaaggcctgggctttatgaaaaatatattcacacctcccgtgtccgagctgggataccaaagaagttcctggttgagtactacttatgaatgaaggattcaggggatgcacaggacacagaggaatctgggggatattatggttctgggaatgtggaatgtaacgtctcatcttcagcccatctgtgctactgatcatctcattccagaagccatgccttctctcaggagcagacagcacaagactttcctgccagaggcacagtccccaggtgagccacacagccttcacagggtaatgccaaagaacagaggagagttcctgctactctccgggtcttcttggcaaagcttctgatacagtctggctgtctctccacctgaatctcatcttgaattgtagctcccataattctcgtatgtcatgggagggatcaggtgagaggtaactgaatcatgggggtgggtctttcctgtgccgttctcgtgacagtgaataagttttatgagatctgatggttttataaaggggagttcccctgcaaatgttcttgcctgctgtgactttgctcctccttgccttccgccgtgattgtgaggcctccccagttatgtggaactgtgagtccattaaacctctttttctttataaattacctag

SEQ ID NO: 284598 - DNA, 1577 bp, Homo sapiens
gcggccgcaagccccgagccccaaggccggccgcgcagcgccgcgtcccgccctccccgctccgcggccggcccgggcgatgcggacacaaaggggacgcgcgtcactctacctgggcctgctcgtccgcggtgcgcggctctgacgcctccgcccggtactggctgcggggtgccgggtgcccgcagtttgccgcccgcgcctccccgcgcccgcgcagcccgcacggcccgcactgcaatgccagccctgccgcctcccgcctgccgagagcccgcgcggggagaagcggctgcgcgggcggggcgcgagcgcgcacagaggccgggcacgcgggaggctcggccccggccccgcccccgcgccgagccgcacagcgccccctgccgcccgcctgcgccggcccgaggcccggagccgccccgcaggccccaggacaggctccggcacgaggaggggctgcggagaccgcccgtgcacgctaacatgaaaatgctattcctgctttagtggcctccagaagacactcccctgattcctacaccgagggaacacacagcagcaagctaggaaagaaggggtgacccagcccaacgctgtaaaccagggcgcgaaccggcgttgagctgtgcagctgcgccctgggctccagtcctgctctgccgcagaccccaccggagccagcacctgcctccccgaccctcgctggggcggctgtgagatgagcccagagccttcctgagccaaccctcgcaaggaaagtctgtctgttcaccccactatccttgtcttgaaggatgaagaaaagagggccccccgggaggtcccaaaaggtggaatggacatctgggatccaagcacagcaatttctttatttttcttaagcctctcactagaggatgaaaatcgttctgcataaaggcctgggctttatgaaaaatatattcacacctcccgtgtccgagctgggataccaaagaagttcctggttgagtactacttatgaatgaaggattcaggggatgcacaggacacagaggaatctgggggatattatggttctgggaatgtggaatgtaacgtctcatcttcagcccatctgtgctactgatcatctcattccagaagccatgccttctctcaggagcagacagcacaagactttcctgccagaggcacagtccccaggtgagccacacagccttcacagggtaatgccaaagaacagaggagagttcctgctactctccgggtcttcttggcaaagcttctgatacagtctggctgtctctccacctgaatctcatcttgaattgtagctcccataattctcgtatgtcatgggagggatcaggtgagaggtaactgaatcatgggggtgggtctttcctgtgccgttctcgtgacagtgaataagttttatgagatctgatggttttataaaggggagttcccctgcaaatgttcttgcctgctgtgactttgctcctccttgccttccgccgtgattgtgaggcctccccagttatgtggaactgtgagtccattaaacctctttttctttataaattacctag

SEQ ID NO: 284599 - DNA, 607 bp, Homo sapiens
taattatatggttggatagatattatcacctatgaatttcatctcaggatagtaaacggtacaaaatatttctgaaagtatgcgtatcaaaaatgtttaacctggattggtgcagtggctcacgcctgtaattccaccactttgagaggctgaggcaggaggatcacttgaggccaggagttcaagaccagcctgggcaacgtggtgagaccctgcctttaaaaaaacaaaaaagtttaacctgaatctaatcaggcttttataacaaatgtccaatttatgggaaacaaaggaacaagtgaaaagatacataatgaccttatatatcttatataaaaaacaacctatgggaaaaatagtctccttaacaagacttctatcatgagacagaggggaatatactaagaatacgtccaaagccccacatgctatgctaagcctagagattacaaagatgaataagtcagttcctgtcctcaagtaacctactgagaaatctattcaatacttgaatattataaaactaaacttttcagacttcctctttctgtaaaggacacaaaaatagcagcaaaaagataataataaagtattgctagtaccattt

SEQ ID NO: 284600 - DNA, 1287 bp, Homo sapiens
cgtagtaacagaagctagataacagaggcttctggagtgagtaggcagtgagaaaatggaggtggtaaaagaggggaaaactagaacaaatagtcaagtaaagatttttgttttgttttaatgtactaaaagtaaccagtatagtgcttatgctttttcctgttattcttttgtggtttttcaatagatatctcagatctcagtgaagatatcttgctgtccacgccttaaaattcttcgcctggaagagaattgtcttgagctcagcatgcttccccagagcatcctcagtgattcccagatctgtctgcttgctgtggaaggcaatctttttgaaataaagaaacttcgagaactggaaggctatgataagtacatggagaggttcacagccaccaagaagaagtttgcgtgaagttctccaggactatggaaaccttacaggatactgacttagaacctctgttggaatgtggctgagtcaaagcctcctgttgttgttaggggtatctacagtaaggagatgatacttcaggagattatatttcactcaatgatcttttctcatttcagggctcttctcaaataagctaaaagaaaaaggatcaggagacaggaaaagtcttccgttttgagtcatgagtagggcaatagacaaggttctcttcaaaaccatcattagtttggctttaagaaaccagtagctagctgctatttatatggtgagggggtgctgcctggtaacagaatagctccacaccacagcttgagattttgtttagtttcactgtgtgagctttcataaagtctgttgccattccatctctgtgttaacacttcatatttttatgaaattcagataatttgtgagaggctggcatggatctaaggatttattatttttattctagtccatcagttcagtcgcagtttttatactaggactttaggatgtacataaatgtgtgactgtttgtcttgattaaaagtgcactttggcctgggcatggtggctcatgcctataatcccagcactttgggaggccaaggcgggtggctcacttgaggctaggagttcaagactagcgtggccaacatgaggaaaccctgtctctactaaaaatacaaaaattagctgggtgtgttggtgcatgcttataatcccagctacttgggaggctgaggcaggagaatcgcttgaacccaggaggtggaggttgcagtgagccgagattatgccactgtactccagcgtgggtgacagagtgagactctgtctcaaattaa

SEQ ID NO: 284601 - DNA, 1305 bp, Homo sapiens
tttggaggcaaggtctcactctgtcacctggctggagtgcagtggcaggatctcagctcaagtgatcctcccatctcaacctcctgattagctgagactacaggcgctaccatgcctcatttttctatttttggtagattgctcaggctggtctgaaactcctaggctcaagcgatccacctaccttggcctcccaaagtgttgagattgcaagtgtgagcctctgcacctggccaaaactatgtaattcattttgcatttacagcagttatattttgtaggaaatgaaaaaccacatgcaataaaaaccaaaatgaaaaaaaaaatagttaggcttatatttatttactcatgccaaaataccccttatgtattctttcatgttttttagtacatggagaggttcacagccaccaagaagaagtttgcgtgaagttctccaggactatggaaaccttacaggatactgacttagaacctctgttggaatgtggctgagtcaaagcctcctgttgttgttaggggtatctacagtaaggagatgatacttcaggagattatatttcactcaatgatcttttctcatttcagggctcttctcaaataagctaaaagaaaaaggatcaggagacaggaaaagtcttccgttttgagtcatgagtagggcaatagacaaggttctcttcaaaaccatcattagtttggctttaagaaaccagtagctagctgctatttatatggtgagggggtgctgcctggtaacagaatagctccacaccacagcttgagattttgtttagtttcactgtgtgagctttcataaagtctgttgccattccatctctgtgttaacacttcatatttttatgaaattcagataatttgtgagaggctggcatggatctaaggatttattatttttattctagtccatcagttcagtcgcagtttttatactaggactttaggatgtacataaatgtgtgactgtttgtcttgattaaaagtgcactttggcctgggcatggtggctcatgcctataatcccagcactttgggaggccaaggcgggtggctcacttgaggctaggagttcaagactagcgtggccaacatgaggaaaccctgtctctactaaaaatacaaaaattagctgggtgtgttggtgcatgcttataatcccagctacttgggaggctgaggcaggagaatcgcttgaacccaggaggtggaggttgcagtgagccgagattatgccactgtactccagcgtgggtgacagagtgagactctgtctcaaattaa

SEQ ID NO: 284602 - DNA, 531 bp, Homo sapiens
cgtagtaacagaagctagataacagaggcttctggagtgagtaggcagtgagaaaatggaggtggtaaaagaggggaaaactagaacaaatagtcaagtaaagatttttgttttgttttaatgtactaaaagtaaccagtatagtgcttatgctttttcctgttattcttttgtggtttttcaatagatatctcagatctcagtgaagatatcttgctgtccacgccttaaaattcttcgcctggaagagaattgtcttgagctcagcatgcttccccagagcatcctcagtgattcccagatctgtctgcttgctgtggaaggcaatctttttgaaataaagaaacttcgagaactggaaggctatgataaggtatgaattaatgtacttctgcatttctagtcactaccccagagaagacaatggtgaagtaatccacagaaatgtttatagctcatgtcaacaggatttgttcttccccattttggaagtagattcaaagcattggctgaatggtattgtaccaagat

SEQ ID NO: 284603 - DNA, 1675 bp, Homo sapiens
ccggctactgcgggtcctgggtcttcacctgcggagccttacggcagctgagcggtgggagggacctgagccgcggcgctaggatgggaaacagtgcgctccgcgctcatgtggaaacggcgcagaaaactggtgtctttcagcttaaggaccgagggctgaccgagttccccgcagacttgcagaagctgacgagcaatctcaggaccatcgacttgtccaacaacaagatcgaaagcctaccgcctttgctgataggaaagttcactctgctgaagagcctctccctgaacaacaacaaactgactgttctgcctgatgagatatgcaatctgaaaaaactagagacgctaagcctaaacaacaatcaccttagagagctgccgtctacctttgggcaactctctgccctcaagaccctgagcctctctgggaaccaactgggagcattacctccccaactttgtagcctacggcacctggatgtgatggatctctctaagaaccagattcgaagtatacctgactcagtgggagagctgcaagtcatcgaactcaacctcaaccagaatcagatatctcagatctcagtgaagatatcttgctgtccacgccttaaaattcttcgcctggaagagaattgtcttgagctcagcatgcttccccagagcatcctcagtgattcccagatctgtctgcttgctgtggaaggcaatctttttgaaataaagaaacttcgagaactggaaggctatgataagtacatggagaggttcacagccaccaagaagaagtttgcgtgaagttctccaggactatggaaaccttacaggatactgacttagaacctctgttggaatgtggctgagtcaaagcctcctgttgttgttaggggtatctacagtaaggagatgatacttcaggagattatatttcactcaatgatcttttctcatttcagggctcttctcaaataagctaaaagaaaaaggatcaggagacaggaaaagtcttccgttttgagtcatgagtagggcaatagacaaggttctcttcaaaaccatcattagtttggctttaagaaaccagtagctagctgctatttatatggtgagggggtgctgcctggtaacagaatagctccacaccacagcttgagattttgtttagtttcactgtgtgagctttcataaagtctgttgccattccatctctgtgttaacacttcatatttttatgaaattcagataatttgtgagaggctggcatggatctaaggatttattatttttattctagtccatcagttcagtcgcagtttttatactaggactttaggatgtacataaatgtgtgactgtttgtcttgattaaaagtgcactttggcctgggcatggtggctcatgcctataatcccagcactttgggaggccaaggcgggtggctcacttgaggctaggagttcaagactagcgtggccaacatgaggaaaccctgtctctactaaaaatacaaaaattagctgggtgtgttggtgcatgcttataatcccagctacttgggaggctgaggcaggagaatcgcttgaacccaggaggtggaggttgcagtgagccgagattatgccactgtactccagcgtgggtgacagagtgagactctgtctcaaattaa

SEQ ID NO: 284604 - DNA, 984 bp, Homo sapiens
gatcttttggaggagaggcagactctgcttagaacaggtggtttgtgttccctggttctcttgagaagggggaccacccataccagtctgtcttaacattttcttcctttctttctttcccctaataacagccagttttgggactgttaccccaaaaaagtttactattaaagctcaatatgaagccagcgaggtgaaattttagggattttagatgtatctgaagctacttctcagcaatatctccccagcctcatccttttcctgttgtctctttatttccagaaggcactggtgttattaaaattgtgtgttggaaggtgtttttctgttttctggaatcttctttctctggaaaatcatatgtaattgctttgtgaagtcttactttgttttctctcagagactggtgaactagagaatgctgagtctggaggagacggaggcaggagaggagggaagcaggataacgttgcctggtggaggcggatgcagaaggggggacttcccctgggatgacgaggatttccgcagtctggcccttttgggggcaggcgttgccatgggatttttctacctctattttcgagatcctggaagagaaatcacgtggaagcactttgtacagtattacctggccagaggtctggtggaccggctggaagtcgtgaacaaacaatctgtgcgtgttattcctgcccctgggacctcttctgaagtgaggggtgaatttaaggctgagtattgcagacataagtttatttcgtgtaaaaatgtagttttctatttttttcagtaaaatactcccttagtatccatcagctactcgttaatgtgtttttttctcattggcatgtatcaataacaaagccttccaaggaggacaggagcccttataagactgactagggttcagatttgccaagcagtgtctgagaacaactcatcaaggattgtggggagagaagagaaggagacaaagat

SEQ ID NO: 284605 - DNA, 717 bp, Homo sapiens
gctaggaaagctcatctggcctcctgctcatctggcctcctgttccagtgcttccaggggatccacgttcagaagctgactctgcaggcaagaccgacgttattttcctggtggctgtgttcaaaaccacccaaagagactggtgaactagagaatgctgagtctggaggagacggaggcaggagaggagggaagcaggataacgttgcctggtggaggcggatgcagaaggggggacttcccctgggatgacgaggatttccgcagtctggcccttttgggggcaggcgttgccatgggatttttctacctctattttcgagatcctggaagagaaatcacgtggaagcactttgtacagtattacctggccagaggtctggtggaccggctggaagtcgtgaacaaacaatctgtgcgtgttattcctgcccctgggacctcttctgaagtgaggggtgaatttaaggctgagtattgcagacataagtttatttcgtgtaaaaatgtagttttctatttttttcagtaaaatactcccttagtatccatcagctactcgttaatgtgtttttttctcattggcatgtatcaataacaaagccttccaaggaggacaggagcccttataagactgactagggttcagatttgccaagcagtgtctgagaacaactcatcaaggattgtggggagagaagagaaggagacaaagat

SEQ ID NO: 284606 - DNA, 786 bp, Homo sapiens
gctaggaaagctcatctggcctcctgctcatctggcctcctgttccagtgcttccaggggatccacgttcagaagctgactctgcaggcaagaccgacgttattttcctggtggctgtgttcaaaaccacccaaagggtttgagaaatactttaagaggagtggaaggaacacaaactgagaaacatcaacagcaccaaaaaaagagactggtgaactagagaatgctgagtctggaggagacggaggcaggagaggagggaagcaggataacgttgcctggtggaggcggatgcagaaggggggacttcccctgggatgacgaggatttccgcagtctggcccttttgggggcaggcgttgccatgggatttttctacctctattttcgagatcctggaagagaaatcacgtggaagcactttgtacagtattacctggccagaggtctggtggaccggctggaagtcgtgaacaaacaatctgtgcgtgttattcctgcccctgggacctcttctgaagtgaggggtgaatttaaggctgagtattgcagacataagtttatttcgtgtaaaaatgtagttttctatttttttcagtaaaatactcccttagtatccatcagctactcgttaatgtgtttttttctcattggcatgtatcaataacaaagccttccaaggaggacaggagcccttataagactgactagggttcagatttgccaagcagtgtctgagaacaactcatcaaggattgtggggagagaagagaaggagacaaagat

SEQ ID NO: 284607 - DNA, 909 bp, Homo sapiens
gcgcgcgcccgggcggcgcgggatctgggtctggggatgtggtaccggctgctggcggcggccggcagtagagcggtggccaggccgctggccttgctgtggcgatgtggtggcccaggaggcggcaggacggccaagaccagcgcgagggccctgggcaaggcccgacagtgcttccaggggatccacgttcagaagctgactctgcaggcaagaccgacgttattttcctggtggctgtgttcaaaaccacccaaagggtttgagaaatactttaagaggagtggaaggaacacaaactgagaaacatcaacagcaccaaaaaaagagactggtgaactagagaatgctgagtctggaggagacggaggcaggagaggagggaagcaggataacgttgcctggtggaggcggatgcagaaggggggacttcccctgggatgacgaggatttccgcagtctggcccttttgggggcaggcgttgccatgggatttttctacctctattttcgagatcctggaagagaaatcacgtggaagcactttgtacagtattacctggccagaggtctggtggaccggctggaagtcgtgaacaaacaatctgtgcgtgttattcctgcccctgggacctcttctgaagtgaggggtgaatttaaggctgagtattgcagacataagtttatttcgtgtaaaaatgtagttttctatttttttcagtaaaatactcccttagtatccatcagctactcgttaatgtgtttttttctcattggcatgtatcaataacaaagccttccaaggaggacaggagcccttataagactgactagggttcagatttgccaagcagtgtctgagaacaactcatcaaggattgtggggagagaagagaaggagacaaagat

SEQ ID NO: 284608 - DNA, 713 bp, Homo sapiens
gcgcgcgcccgggcggcgcgggatctgggtctggggatgtggtaccggctgctggcggcggccggcagtagagcggtggccaggccgctggccttgctgtggcgatgtggtggcccaggaggcggcaggacggccaagaccagcgcgagggccctgggcaaggcccgacagtggttatggccagtgagaatgtgcggtgttgcattgcagaagaagctaggaaagctcatctggcctcctgttccagtgcttccaggggatccacgttcagaagctgactctgcaggcaagaccgacgttattttcctggtggctgtgttcaaaaccacccaaagggtttgagaaatactttaagaggagtggaaggaacacaaactgagaaacatcaacagcaccaaaaaaagagtctcactctgtcacccaggctggagtgcagtggcacaatctcggctcactgcaagctctgcctcctgggttcacgccattctcctccttctcctgcctcagcctcccgagtagctgggactacagccgcccgccaccatgcccgggtaatttttttgtatttttagtagagacgggttttcaccgtgttagccaggatggtctcgatatcctgacctcgtgatctgcccgcctgggcctcccaaagggctgggattacaggcatgagccactgcacccggccaaggaatgtttctttgaagactcat

SEQ ID NO: 284609 - DNA, 2248 bp, Homo sapiens
gatcttttggaggagaggcagactctgcttagaacaggtggtttgtgttccctggttctcttgagaagggggaccacccataccagtctgtcttaacattttcttcctttctttctttcccctaataacagccagttttgggactgttaccccaaaaaagtttactattaaagctcaatatgaagccagcgaggtgaaattttagggattttagatgtatctgaagctacttctcagcaatatctccccagcctcatccttttcctgttgtctctttatttccagaaggcactggtgttattaaaattgtgtgttggaaggtgtttttctgttttctggaatcttctttctctggaaaatcatatgtaattgctttgtgaagtcttactttgttttctctcagagactggtgaactagagaatgctgagtctggaggagacggaggcaggagaggagggaagcaggataacgttgcctggtggaggcggatgcagaaggggggacttcccctgggatgacgaggatttccgcagtctggcccttttgggggcaggcgttgccatgggatttttctacctctattttcgagatcctggaagagaaatcacgtggaagcactttgtacagtattacctggccagaggtctggtggaccggctggaagtcgtgaacaaacaatctgtgcgtgttattcctgcccctgggacctcttctgaaacgtagctgggtgcgaagaatcaaattggaaattatggaatttgtgaatttcctgaagaatcccaagcagtatcaggacttaggagcaaaaattccaaagggagccatgctcactggtcctcctggtaccggcaagacccttcttgccaaagcaactgcaggggaggccactgtgcccttcatcactgtgaacgggtctgagttcctggaaatgtttattggcgttgggccagcaaggggttcaactctgccaccaacgtcgtggtgttggctggcaccaaccgccctgacgtcctggacccggccctcatgcggcctggccggtttcatcgccagatttacactggtcccccttacattaaaggcaggtcctccatctttaaggtccacctgcgcccactgaagctggacaagagcctcaataaggacaccctggcgaggaagctggcagtgctcaccccaggcttccctgacggggatgactcagcactacccctcaacagagatgactttgatgactctgcccctcagcagggcttactaagcactaccccttaacagggatgactccgcactgcccctcaacagggatgactcagcagagatgactcagcactgtcccttagcagggatgacacagcaaggatgattcagcactgcccctcagcaaggatgactcagcactgccgctcaacagacatgactcagggatggcttagtactgcccctcagcagggatgactcagcaccgcctctcaacagggatgactcagcagggatgactcagcaccgcccctcaacaggcatgactctgcagagatgactcagcactgtcccttagcagggatgacacagcaaggatgactcagcactgcccctcagcaaggatgactcagcactgccgctcaacagggatgactcagggatggcttagtactgcccctcaacagggatgactcagcagggatgactcagcaccacccctcagcaaggatgactcagcagggatgattcagcagagataactcggggatgactctgattgtccttcagcagggatgagtctgttttgctccgatggaagcatctgtagtgtccatcagcaggtgaatggccaaagtggtatatactgtagtcacattcagctataaaaaggaataaagtatcgatgcatgccacaacatgggtgaacctagaaaatactgatctaaatgcaagaagccaggcacaaaaggccacatagtatatgttcccatttatgtgaaatgtgcagaataataataaaaatgtatagaatagcaaatctgtagggacagacatgaggtgagtggttgccagaagtggaaatgggagttaactataaattgcacagggtaccttacagagatgatggaaatgtcctaaaactagattatggcaatagttgcactacgtgatcagtttattaaaaatcgttgatgtgtgtgtgtaaaatgggtggattttatggtttataaattataccttaataaaggttaacaaaaaatgtgg

SEQ ID NO: 284610 - DNA, 2249 bp, Homo sapiens
gcgcgcgcccgggcggcgcgggatctgggtctggggatgtggtaccggctgctggcggcggccggcagtagagcggtggccaggccgctggccttgctgtggcgatgtggtggcccaggaggcggcaggacggccaagaccagcgcgagggccctgggcaaggcccgacagtggttatggccagtgagaatgtgcggtgttgcattgcagaagaagctaggaaagctcatctggcctcctgttccagtgcttccaggggatccacgttcagaagctgactctgcaggcaagaccgacgttattttcctggtggctgtgttcaaaaccacccaaagggtttgagaaatactttaagaggagtggaaggaacacaaactgagaaacatcaacagcaccaaaaaaagagactggtgaactagagaatgctgagtctggaggagacggaggcaggagaggagggaagcaggataacgttgcctggtggaggcggatgcagaaggggggacttcccctgggatgacgaggatttccgcagtctggcccttttgggggcaggcgttgccatgggatttttctacctctattttcgagatcctggaagagaaatcacgtggaagcactttgtacagtattacctggccagaggtctggtggaccggctggaagtcgtgaacaaacaatctgtgcgtgttattcctgcccctgggacctcttctgaaacgtagctgggtgcgaagaatcaaattggaaattatggaatttgtgaatttcctgaagaatcccaagcagtatcaggacttaggagcaaaaattccaaagggagccatgctcactggtcctcctggtaccggcaagacccttcttgccaaagcaactgcaggggaggccactgtgcccttcatcactgtgaacgggtctgagttcctggaaatgtttattggcgttgggccagcaaggggttcaactctgccaccaacgtcgtggtgttggctggcaccaaccgccctgacgtcctggacccggccctcatgcggcctggccggtttcatcgccagatttacactggtcccccttacattaaaggcaggtcctccatctttaaggtccacctgcgcccactgaagctggacaagagcctcaataaggacaccctggcgaggaagctggcagtgctcaccccaggcttccctgacggggatgactcagcactacccctcaacagagatgactttgatgactctgcccctcagcagggcttactaagcactaccccttaacagggatgactccgcactgcccctcaacagggatgactcagcagagatgactcagcactgtcccttagcagggatgacacagcaaggatgattcagcactgcccctcagcaaggatgactcagcactgccgctcaacagacatgactcagggatggcttagtactgcccctcagcagggatgactcagcaccgcctctcaacagggatgactcagcagggatgactcagcaccgcccctcaacaggcatgactctgcagagatgactcagcactgtcccttagcagggatgacacagcaaggatgactcagcactgcccctcagcaaggatgactcagcactgccgctcaacagggatgactcagggatggcttagtactgcccctcaacagggatgactcagcagggatgactcagcaccacccctcagcaaggatgactcagcagggatgattcagcagagataactcggggatgactctgattgtccttcagcagggatgagtctgttttgctccgatggaagcatctgtagtgtccatcagcaggtgaatggccaaagtggtatatactgtagtcacattcagctataaaaaggaataaagtatcgatgcatgccacaacatgggtgaacctagaaaatactgatctaaatgcaagaagccaggcacaaaaggccacatagtatatgttcccatttatgtgaaatgtgcagaataataataaaaatgtatagaatagcaaatctgtagggacagacatgaggtgagtggttgccagaagtggaaatgggagttaactataaattgcacagggtaccttacagagatgatggaaatgtcctaaaactagattatggcaatagttgcactacgtgatcagtttattaaaaatcgttgatgtgtgtgtgtaaaatgggtggattttatggtttataaattataccttaataaaggttaacaaaaaatgtgg

SEQ ID NO: 284611 - DNA, 2116 bp, Homo sapiens
gatcttttggaggagaggcagactctgcttagaacaggtggtttgtgttccctggttctcttgagaagggggaccacccataccagtctgtcttaacattttcttcctttctttctttcccctaataacagccagttttgggactgttaccccaaaaaagtttactattaaagctcaatatgaagccagcgaggtgaaattttagggattttagatgtatctgaagctacttctcagcaatatctccccagcctcatccttttcctgttgtctctttatttccagaaggcactggtgttattaaaattgtgtgttggaaggtgtttttctgttttctggaatcttctttctctggaaaatcatatgtaattgctttgtgaagtcttactttgttttctctcagagactggtgaactagagaatgctgagtctggaggagacggaggcaggagaggagggaagcaggataacgttgcctggtggaggcggatgcagaaggggggacttcccctgggatgacgaggatttccgcagtctggcccttttgggggcaggcgttgccatgggatttttctacctctattttcgagatcctggaagagaaatcacgtggaagcactttgtacagtattacctggccagaggtctggtggaccggctggaagtcgtgaacaaacaatctgtgcgtgttattcctgcccctgggacctcttctgaaacgtagctgggtgcgaagaatcaaattggaaattatggaatttgtgaatttcctgaagaatcccaagcagtatcaggacttaggagcaaaaattccaaagggagccatgctcactggtcctcctggtaccggcaagacccttcttgccaaagcaactgcaggggaggccactgtgcccttcatcactgtgaacgggtctgagttcctggaaatgtttattggcgttgggccagcaaggggttcaactctgccaccaacgtcgtggtgttggctggcaccaaccgccctgacgtcctggacccggccctcatgcggcctggccggtttcatcgccagatttacactggtcccccttacattaaaggcaggtcctccatctttaaggtccacctgcgcccactgaagctggacaagagcctcaataaggacaccctggcgaggaagctggcagtgctcaccccaggcttccctgacggggatgactcagcactacccctcaacagagatgactttgatgactctgcccctcagcagggcttactaagcactaccccttaacagggatgactccgcactgcccctcaacagggatgactcagcagagatgactcagcactgtcccttagcagggatgacacagcaaggatgattcagcactgcccctcagcaaggatgactcagcactgccgctcaacagacatgactcagggatggcttagtactgcccctcagcagggatgactcagcaccgcccctcaacagggatgactcagcagactcagcagggatgactcagcactgcccctcaacagacatgactcagcagggacagggatgactcagcaccacccctcagcaaggatgactcagcagggatgattcagcagagataactcggggatgactctgattgtccttcagcagggatgagtctgttttgctccgatggaagcatctgtagtgtccatcagcaggtgaatggccaaagtggtatatactgtagtcacattcagctataaaaaggaataaagtatcgatgcatgccacaacatgggtgaacctagaaaatactgatctaaatgcaagaagccaggcacaaaaggccacatagtatatgttcccatttatgtgaaatgtgcagaataataataaaaatgtatagaatagcaaatctgtagggacagacatgaggtgagtggttgccagaagtggaaatgggagttaactataaattgcacagggtaccttacagagatgatggaaatgtcctaaaactagattatggcaatagttgcactacgtgatcagtttattaaaaatcgttgatgtgtgtgtgtaaaatgggtggattttatggtttataaattataccttaataaaggttaacaaaaaatgtgg

SEQ ID NO: 284612 - DNA, 2036 bp, Homo sapiens
  misc_feature (3)..(3): n is a, c, g, or t
ggnccctgggccaaggccccgacaagttggttatggccagtgagaatgtgcggtgttgcattgcagaagaagctaggaaagctcatctggcctcctgttccagtgcttccaggggatccacgttcagaagctgactctgcaggcaagaccgacgttattttcctggtggctgtgttcaaaaccacccaaagagactggtgaactagagaatgctgagtctggaggagacggaggcaggagaggagggaagcaggataacgttgcctggtggaggcggatgcagaaggggggacttcccctgggatgacgaggatttccgcagtctggcccttttgggggcaggcgttgccatgggatttttctacctctattttcgagatcctggaagagaaatcacgtggaagcactttgtacagtattacctggccagaggtctggtggaccggctggaagtcgtgaacaaacaatctgtgcgtgttattcctgcccctgggacctcttctgaaacgtagctgggtgcgaagaatcaaattggaaattatggaatttgtgaatttcctgaagaatcccaagcagtatcaggacttaggagcaaaaattccaaagggagccatgctcactggtcctcctggtaccggcaagacccttcttgccaaagcaactgcaggggaggccactgtgcccttcatcactgtgaacgggtctgagttcctggaaatgtttattggcgttgggccagcaaggggttcaactctgccaccaacgtcgtggtgttggctggcaccaaccgccctgacgtcctggacccggccctcatgcggcctggccggtttcatcgccagatttacactggtcccccttacattaaaggcaggtcctccatctttaaggtccacctgcgcccactgaagctggacaagagcctcaataaggacaccctggcgaggaagctggcagtgctcaccccaggcttccctgacggggatgactcagcactacccctcaacagagatgactttgatgactctgcccctcagcagggcttactaagcactaccccttaacagggatgactccgcactgcccctcaacagggatgactcagcagagatgactcagcactgtcccttagcagggatgacacagcaaggatgattcagcactgcccctcagcaaggatgactcagcactgccgctcaacagacatgactcagggatggcttagtactgcccctcagcagggatgactcagcaccgcctctcaacagggatgactcagcagggatgactcagcaccgcccctcaacaggcatgactctgcagagatgactcagcactgtcccttagcagggatgacacagcaaggatgactcagcactgcccctcagcaaggatgactcagcactgccgctcaacagggatgactcagggatggcttagtactgcccctcaacagggatgactcagcagggatgactcagcaccacccctcagcaaggatgactcagcagggatgattcagcagagataactcggggatgactctgattgtccttcagcagggatgagtctgttttgctccgatggaagcatctgtagtgtccatcagcaggtgaatggccaaagtggtatatactgtagtcacattcagctataaaaaggaataaagtatcgatgcatgccacaacatgggtgaacctagaaaatactgatctaaatgcaagaagccaggcacaaaaggccacatagtatatgttcccatttatgtgaaatgtgcagaataataataaaaatgtatagaatagcaaatctgtagggacagacatgaggtgagtggttgccagaagtggaaatgggagttaactataaattgcacagggtaccttacagagatgatggaaatgtcctaaaactagattatggcaatagttgcactacgtgatcagtttattaaaaatcgttgatgtgtgtgtgtaaaatgggtggattttatggtttataaattataccttaataaaggttaacaaaaaatgtgg

SEQ ID NO: 284613 - DNA, 1601 bp, Homo sapiens
agggggcctcttcggtgttggtgagacagcagccaagatcttaaaaagcaacatcgatgtgttatttgcagacgtagctgggtgcgaagaatcaaattggaaattatggaatttgtgaatttcctgaagaatcccaagcagtatcaggacttaggagcaaaaattccaaagggagccatgctcactggtcctcctggtaccggcaagacccttcttgccaaagcaactgcaggggaggccactgtgcccttcatcactgtgaacgggtctgagttcctggaaatgtttattggcgttgggccagcaaggggttcaactctgccaccaacgtcgtggtgttggctggcaccaaccgccctgacgtcctggacccggccctcatgcggcctggccggtttcatcgccagatttacactggtcccccttacattaaaggcaggtcctccatctttaaggtccacctgcgcccactgaagctggacaagagcctcaataaggacaccctggcgaggaagctggcagtgctcaccccaggcttccctgacggggatgactcagcactacccctcaacagagatgactttgatgactctgcccctcagcagggcttactaagcactaccccttaacagggatgactccgcactgcccctcaacagggatgactcagcagagatgactcagcactgtcccttagcagggatgacacagcaaggatgattcagcactgcccctcagcaaggatgactcagcactgccgctcaacagacatgactcagggatggcttagtactgcccctcagcagggatgactcagcaccgcctctcaacagggatgactcagcagggatgactcagcaccgcccctcaacaggcatgactctgcagagatgactcagcactgtcccttagcagggatgacacagcaaggatgactcagcactgcccctcagcaaggatgactcagcactgccgctcaacagggatgactcagggatggcttagtactgcccctcaacagggatgactcagcagggatgactcagcaccacccctcagcaaggatgactcagcagggatgattcagcagagataactcggggatgactctgattgtccttcagcagggatgagtctgttttgctccgatggaagcatctgtagtgtccatcagcaggtgaatggccaaagtggtatatactgtagtcacattcagctataaaaaggaataaagtatcgatgcatgccacaacatgggtgaacctagaaaatactgatctaaatgcaagaagccaggcacaaaaggccacatagtatatgttcccatttatgtgaaatgtgcagaataataataaaaatgtatagaatagcaaatctgtagggacagacatgaggtgagtggttgccagaagtggaaatgggagttaactataaattgcacagggtaccttacagagatgatggaaatgtcctaaaactagattatggcaatagttgcactacgtgatcagtttattaaaaatcgttgatgtgtgtgtgtaaaatgggtggattttatggtttataaattataccttaataaaggttaacaaaaaatgtgg

SEQ ID NO: 284614 - DNA, 1784 bp, Homo sapiens
agtgttcagaggcctcagagatcagtttcttagccccaaaactaatttgtacccacttgaatttctgtcttaattaaagtcagacttagtgagtcttactgcagagctgacagtaatgtcccagggggagaatctggcaacctgatgcttcccgcagcgtttctgcctggggcttgccctccctgctgaggaagctcgtttgcttttctctcttcttttcaatgaaatcctggtctatgctaggaaacctacttccctgcctaggcgggatcaccctcaggaatgagtggggacttttccagggagatgcctgttcttttcacccatgctccgcagctctttgctgcgtcagtacctcatggttatgtggccattggccacggcttctgacctatgcccgccggctcctgccacccctggaacattctgctgtggcatcttatcacctccagctgccttggcgcccccagtggtacccgtcccctggctccccacagtgtcctgcctagtgtcaggtcacgtgtattcacacaggattgtacgtttgcctgctgcaggatggtgagtgaggtcttggctggcaggtatctgaaaggtgtcatctgtcttagacacaaaatgtgcttcctcccttttgttctctcctctggctgacttcagatgtctgtttacataccaaagttaaaaagctggaatgttaccaagactgctttcttctgcccatagacggggatgactcagcactacccctcaacagagatgactttgatgactctgcccctcagcagggcttactaagcactaccccttaacagggatgactccgcactgcccctcaacagggatgactcagcagagatgactcagcactgtcccttagcagggatgacacagcaaggatgattcagcactgcccctcagcaaggatgactcagcactgccgctcaacagacatgactcagggatggcttagtactgcccctcagcagggatgactcagcaccgcctctcaacagggatgactcagcagggatgactcagcaccgcccctcaacaggcatgactctgcagagatgactcagcactgtcccttagcagggatgacacagcaaggatgactcagcactgcccctcagcaaggatgactcagcactgccgctcaacagggatgactcagggatggcttagtactgcccctcaacagggatgactcagcagggatgactcagcaccacccctcagcaaggatgactcagcagggatgattcagcagagataactcggggatgactctgattgtccttcagcagggatgagtctgttttgctccgatggaagcatctgtagtgtccatcagcaggtgaatggccaaagtggtatatactgtagtcacattcagctataaaaaggaataaagtatcgatgcatgccacaacatgggtgaacctagaaaatactgatctaaatgcaagaagccaggcacaaaaggccacatagtatatgttcccatttatgtgaaatgtgcagaataataataaaaatgtatagaatagcaaatctgtagggacagacatgaggtgagtggttgccagaagtggaaatgggagttaactataaattgcacagggtaccttacagagatgatggaaatgtcctaaaactagattatggcaatagttgcactacgtgatcagtttattaaaaatcgttgatgtgtgtgtgtaaaatgggtggattttatggtttataaattataccttaataaaggttaacaaaaaatgtgg

SEQ ID NO: 284615 - DNA, 2210 bp, Homo sapiens
gatcttttggaggagaggcagactctgcttagaacaggtggtttgtgttccctggttctcttgagaagggggaccacccataccagtctgtcttaacattttcttcctttctttctttcccctaataacagccagttttgggactgttaccccaaaaaagtttactattaaagctcaatatgaagccagcgaggtgaaattttagggattttagatgtatctgaagctacttctcagcaatatctccccagcctcatccttttcctgttgtctctttatttccagaaggcactggtgttattaaaattgtgtgttggaaggtgtttttctgttttctggaatcttctttctctggaaaatcatatgtaattgctttgtgaagtcttactttgttttctctcagagactggtgaactagagaatgctgagtctggaggagacggaggcaggagaggagggaagcaggataacgttgcctggtggaggcggatgcagaaggggggacttcccctgggatgacgaggatttccgcagtctggcccttttgggggcaggcgttgccatgggatttttctacctctattttcgagatcctggaagagaaatcacgtggaagcactttgtacagtattacctggccagaggtctggtggaccggctggaagtcgtgaacaaacaatctgtgcgtgttattcctgcccctgggacctcttctgaaacgtagctgggtgcgaagaatcaaattggaaattatggaatttgtgaatttcctgaagaatcccaagcagtatcaggacttaggagcaaaaattccaaagggagccatgctcactggtcctcctggtaccggcaagacccttcttgccaaagcaactgcaggggaggccactgtgcccttcatcactgtgaacgggtctgagttcctggaaatgtttattggcgttgggccagcaaggggttcaactctgccaccaacgtcgtggtgttggctggcaccaaccgccctgacgtcctggacccggccctcatgcggcctggccggtttcatcgccagatttacactggtcccccttacattaaaggcaggtcctccatctttaaggtccacctgcgcccactgaagctggacaagagcctcaataaggacaccctggcgaggaagctggcagtgctcaccccaggcttccctgacggggatgactcagcactacccctcaacagagatgactttgatgactctgcccctcagcagggcttactaagcactaccccttaacagggatgactccgcactgcccctcaacagggatgactcagcagagatgactcagcactgtcccttagcagggatgacacagcaaggatgattcagcactgcccctcagcaaggatgactcagcactgccgctcaacagacatgactcagggatggcttagtactgcccctcagcagggatgactcagcaccgcctctcaacagggatgactcagcagggatgactcagcaccgcccctcaacaggcatgactctgcagagatgactcagcactgtcccttagcagggatgacacagcaaggatgactcagcactgcccctcagcaaggatgactcagcactgccgctcaacagggatgactcagggatggcttagtactgcccctcaacagggatgactcagcagggatgactcagcaccgcccctcaacaggcatgactctgcagagatgacttagtactgcccctcagcagggatgactcagtactgcccctcagcagggatgactcagcactgcccctcaacagggatgactcagcagggatgactcagcactgtcccttagcagtgatgacacagcaaggatgactcagcactgcccctcagcaaggatgactcagcactgccgctcaacagacatgactcagggatggcttagtactgcccctcagcagggatgactcagcaccgcccctcaacagggatgactcagcactgcccctcaacagggatgactcagcagggatgactcagcactgtcccttagcagcgatgacacagcaaggatgactcagcactgcccctcaccaaggatgactcagcactgccgctcaacagacatgactcagggatggcttagtactgcccctcagcagggatgactcagcagggatgactcagcaccacccttcaacagggatgactcagcaggga

SEQ ID NO: 284616 - DNA, 1261 bp, Homo sapiens
tgttgaggtgggaggatctcagggcgagggcaggtcctccatctttaaggtccacctgcgcccactgaagctggacaagagcctcaataaggacaccctggcgaggaagctggcagtgctcaccccaggcttccctgatgtctgtttacataccaaagttaaaaagctggaatgttaccaagactgctttcttctgcccatagacggggatgactcagcactacccctcaacagagatgactttgatgactctgcccctcagcagggcttactaagcactaccccttaacagggatgactccgcactgcccctcaacagggatgactcagcagagatgactcagcactgtcccttagcagggatgacacagcaaggatgattcagcactgcccctcagcaaggatgactcagcactgccgctcaacagacatgactcagggatggcttagtactgcccctcagcagggatgactcagcaccgcctctcaacagggatgactcagcagggatgactcagcaccgcccctcaacaggcatgactctgcagagatgactcagcactgtcccttagcagggatgacacagcaaggatgactcagcactgcccctcagcaaggatgactcagcactgccgctcaacagggatgactcagggatggcttagtactgcccctcaacagggatgactcagcagggatgactcagcaccacccctcagcaaggatgactcagcagggatgattcagcagagataactcggggatgactctgattgtccttcagcagggatgagtctgttttgctccgatggaagcatctgtagtgtccatcagcaggtgaatggccaaagtggtatatactgtagtcacattcagctataaaaaggaataaagtatcgatgcatgccacaacatgggtgaacctagaaaatactgatctaaatgcaagaagccaggcacaaaaggccacatagtatatgttcccatttatgtgaaatgtgcagaataataataaaaatgtatagaatagcaaatctgtagggacagacatgaggtgagtggttgccagaagtggaaatgggagttaactataaattgcacagggtaccttacagagatgatggaaatgtcctaaaactagattatggcaatagttgcactacgtgatcagtttattaaaaatcgttgatgtgtgtgtgtaaaatgggtggattttatggtttataaattataccttaataaaggttaacaaaaaatgtgg

SEQ ID NO: 284617 - DNA, 923 bp, Homo sapiens
tcatccccgtcaggaagcctcagcactgtcccttgctgtgtcatccctgctaaggggacagtgctgagtcatccccgtcagggaagcctggggtgagcactgccagcttcctcgccagggtgtccttattagaggctctgcccctcagcagggcttactaagcactaccccttaacagggatgactcagcaccgcccctcaacaggcatgactctgcagagatgactcagcactgcccctcagcagggatggctcagcagggatgactcagcattgcccctcaacagggatgactcagcagactcagcagggatgactcagcactgcccctcaacagacatgactcagcagggacagggatgactcagcaccacccctcagcaaggatgactcagcagggatgattcagcagagataactcggggatgactctgattgtccttcagcagggatgagtctgttttgctccgatggaagcatctgtagtgtccatcagcaggtgaatggccaaagtggtatatactgtagtcacattcagctataaaaaggaataaagtatcgatgcatgccacaacatgggtgaacctagaaaatactgatctaaatgcaagaagccaggcacaaaaggccacatagtatatgttcccatttatgtgaaatgtgcagaataataataaaaatgtatagaatagcaaatctgtagggacagacatgaggtgagtggttgccagaagtggaaatgggagttaactataaattgcacagggtaccttacagagatgatggaaatgtcctaaaactagattatggcaatagttgcactacgtgatcagtttattaaaaatcgttgatgtgtgtgtgtaaaatgggtggattttatggtttataaattataccttaataaaggttaacaaaaaatgtgg

SEQ ID NO: 284618 - DNA, 398 bp, Homo sapiens
tcatccccgtcaggaagcctcagcactgtcccttgctgtgtcatccctgctaaggggacagtgctgagtcatccccgtcagggaagcctggggtgagcactgccagcttcctcgccagggtgtccttattagaggctctgcccctcagcagggcttactaagcactaccccttaacagggatgactcagcaccgcccctcaacaggcatgactctgcagagatgactcagcactgcccctcagcagggatggctcagcagggatgactcagcattgcccctcaacagggatgactcagcagactcagcagggatgactcagcactgcccctcaacagacatgactcagcagggatccccgagttatctctgctgaatcatccctgctgagtcatcctt

SEQ ID NO: 284619 - DNA, 322 bp, Homo sapiens
tctgaggatgaggcccgtggtttagtgttgaatatgatactcattgctttagctgtgggctggtctgagggtgaggcccctgtttcctgttgaatatcatactcactgctctagctgtgctgattatttttctctttttcccaggtggaccggctggaagtcgtgaacaaacaatctgtgcgtgttattcctgcccctgggacctcttctgaagtgaggggtgaatttaaggctgagtattgcagacataagtttatttcgtgtaaaaatgtagttttctatttttttcagtaaaatactcccttagtatccatcagctact

SEQ ID NO: 284620 - DNA, 340 bp, Homo sapiens
aatgtagcacatataaaatggccactaactatggcgcatattaaaaattagtgaattagttacagagacaaatagcactgtctccttcctcatgaactcaagtacttttagtaggaagtaactaaataaaaatgtacttatttttattcaaatgactccccaattttcattttttactactatcatgtgcttgatatctagaaatctcattaatagaaaatcttaaaagtgtaaatatcacataggtaacagagtgcttttgttcagtgaaggttctgcaatttgtccatctgaattaatttataaacaatcaagtacttattgaatacttttcctttta

SEQ ID NO: 284621 - DNA, 727 bp, Homo sapiens
ttcgtgacgcagcccgggtctcagggaacatggcggcgctggtgagacccgcgaggtttgtcgtgcgaccgttgctgcaggtggtccaggcttgggaccttgacgcgaggcgctgggtccgggcgctgcggcggagcccagtgaaagtggtgtttccttccggagaggtggtggaacagaagcgcgctcctgggaagcagccccgcaaggcaccatctgaggccagtgcccaggagcaacgagagaaacaaccgctcgaggagtccgcatcccgcgctcccagcacctgggaagagtctgggcttcgctacgataaagcttatcccggggacaggaggctgagcagtgtaatgacaatagtaaagtccaggccatttcgggaaaaacaagggaagatcctgctggaaggtcgcaggctcatttcagacgctctcaaggctggagctgtgccaaaaatgttcttctttagccgtctagaatacctaaaggagttgccagtcgataagctgaaaggtgtcagcctcattaaggtgaaatttgaggatatcaaggattggtccgacctcgtaacgccacaaggaataatgggttagtgattacccagtgtatctttttttttttttgtcttgttctgtcacccaggctggagtgcagccactgcactccagcctgggcgacagagcgagactctgcctcaaaaaaaaaaaattagacaaaacacataaaa

SEQ ID NO: 284622 - DNA, 1722 bp, Homo sapiens
ttcgtgacgcagcccgggtctcagggaacatggcggcgctggtgagacccgcgaggtttgtcgtgcgaccgttgctgcaggtggtccaggcttgggaccttgacgcgaggcgctgggtccgggcgctgcggcggagcccagtgaaagtggtgtttccttccggagaggtggtggaacagaagcgcgctcctgggaagcagccccgcaaggcaccatctgaggccagtgcccaggagcaacgagagaaacaaccgctcgaggagtccgcatcccgcgctcccagcacctgggaagagtctgggcttcgctacgataaagcttatcccggggacaggaggctgagcagtgtaatgacaatagtaaagtccaggccatttcgggaaaaacaagggaagatcctgctggaaggtcgcaggctcatttcagacgctctcaaggctggagctgtgccaaaaatgttcttctttagccgtctagaatacctaaaggagttgccagtcgataagctgaaaggtgtcagcctcattaaggtgaaatttgaggatatcaaggattggtccgacctcgtaacgccacaaggaataatggggatttttgccaagcctgaccatgttaagatgacatatccaaagactcagcttcagcattcactgcctttattattgatttgtgacaatctccgtgaccctgggaacctggggacaattctgagatctgcagctggggcaggctgcagcaaagtgttactcaccaaaggctgtgtggatgcctgggagcccaaagtgctccgggcgggtatgggcgcacatttccggatgcccattatcaataatctggaatgggaaaccgtgcccaattacctgccccctgacactcgggtctatgtggctgacaactgtggcctttatgcccaggctgagatgtctaataaagctagtgaccatggctgggtgtgtgatcaacgagtgatgaagtttcacaagtatgaggaagaggaagatgtagaaaccggagccagtcaagattggctgcctcatgttgaggttcagagttacgactcggactggacagaggcgccggcagctgtggtgattggcggggagacctacggcgtgagcctggagtccctgcagctggccgagagcactggtggcaagaggctgctgatccccgttgtgcctggtgtggacagcctcaactcggccatggcggcaagcatcctgcttttcgaagggaaaagacagctgcgggggagggcggaggacttgagcagggacaggagttaccactgaggacgcagaagtgacttctgcttgaggacgtctgcagctcctcctacaccagcacactggtgggaggctggcggagtcagtgactatggcccccacgttcaggaggaaggtgtgatgccgtcatacagttacaggaaaaataagaacttcctcagaaagaacaggtccgaattcttcctgtcgcgtcactgattttgaggttcttttttctcttggtgacaataggtgacccacgtggctctgtgtgtttttaaaaattgtccaccaagaagcactttgtgcccagaaagttcctgaagcatcatcctggcagggaggcgcctgctccaccagctggtgggtgtttgtaatcgccaagcaccagctataggtcacagccacatcactcacagctgatcactggttggtggaaaataaactatgagcagca

SEQ ID NO: 284623 - DNA, 824 bp, Homo sapiens
ttcgtgacgcagcccgggtctcagggaacatggcggcgctggtgagacccgcgaggtttgtcgtgcgaccgttgctgcaggtggtccaggcttgggaccttgacgcgaggcgctgggtccgggcgctgcggcggagcccagtgaaagtggtgtttccttccggagaggtggtggaacagaagcgcgctcctgggaagcagccccgcaaggcaccatctgaggccagtgcccaggagcaacgagagaaacaaccgctcgaggagtccgcatcccgcgctcccagcacctgggaagagtctgggcttcgctacgataaagcttatcccggggacaggaggctgagcagtgtaatgacaatagtaaagtccaggccatttcgggaaaaacaagggaagatcctgctggaaggtcgcaggctcatttcagacgctctcaaggctggagctgtgccaaaaatgttcttctttagccgtctagaatacctaaaggagttgccagtcgataagctgaaaggtgtcagcctcattaaggtgaaatttgaggatatcaaggattggtccgacctcgtaacgccacaaggaataatggggatttttgccaagcctgaccatgttaagatgacatatccaaagactcagcttcagcattcactgcctttattattgatttgtgacaatctccgtgaccctgggaacctggggacaattctgagatctgcagctggggcaggctgcagcaaagtgttactcaccaaaggtaaggacatcaaaggccaggcatagtggctcacactcgtaatccagccctttgggaggccgaggcag

SEQ ID NO: 284624 - DNA, 785 bp, Homo sapiens
ttcgtgacgcagcccgggtctcagggaacatggcggcgctggtgagacccgcgaggtttgtcgtgcgaccgttgctgcaggtggtccaggcttgggaccttgacgcgaggcgctgggtccgggcgctgcggcggagcccagtgaaagtggtgtttccttccggagaggtggtggaacagaagcgcgctcctgggaagcagccccgcaaggcaccatctgaggccagtgcccaggagcaacgagagaaacaaccgctcgaggagtccgcatcccgcgctcccagcacctgggaagagtctgggcttcgctacgataaagcttatcccggggacaggaggctgagcagtgtaatgacaatagtaaagtccaggccatttcgggaaaaacaagggaagatcctgctggaaggtcgcaggctcatttcagacgctctcaaggctggagctgtgccaaaaatgttcttctttagccgtctagaatacctaaaggagttgccagtcgataagctgaaaggtgtcagcctcattaaggtgaaatttgaggatatcaaggattggtccgacctcgtaacgccacaaggaataatgggttagtgattacccagtgtatctttttttttttttgtcttgttctgtcacccaggctggagtgcaatggcgcgatctcggcccactgcaacctccgcctctcgggttcaagggattctcttgcctcagcctccgcagtagctgggattacaggcgtctgccaccatgcccgggtgatttttgtatttttagtagagg

SEQ ID NO: 284625 - DNA, 310 bp, Homo sapiens
tagatagatctagagtatcccctcataatgtgtgcccacaccaggcaagtaaaccacctgttttgtttcctcagggatttttgccaagcctgaccatgttaagatgacatatccaaagactcagcttcagcattcactgcctttattattgatttgtgacaatctccgtgaccctgggaacctggggacaattctgagatctgcagctggggcaggctgcagcaaagtgttactcaccaaaggtaaggacatcaaaggccaggcatagtggctcacactcgtaatccagccctttgggaggccgaggcag

SEQ ID NO: 284626 - DNA, 2100 bp, Homo sapiens
ttcgtgacgcagcccgggtctcagggaacatggcggcgctggtgagacccgcgaggtttgtcgtgcgaccgttgctgcaggtggtccaggcttgggaccttgacgcgaggcgctgggtccgggcgctgcggcggagcccagtgaaagtggtgtttccttccggagaggtggtggaacagaagcgcgctcctgggaagcagccccgcaaggcaccatctgaggccagtgcccaggagcaacgagagaaacaaccgctcgaggagtccgcatcccgcgctcccagcacctgggaagagtctgggcttcgctacgataaagcttatcccggggacaggaggctgagcagtgtaatgacaatagtaaagtccaggccatttcgggaaaaacaagggaagatcctgctggaaggtcgcaggctcatttcagacgctctcaaggctggagctgtgccaaaaatgttcttctttagccgtctagaatacctaaaggagttgccagtcgataagctgaaaggtgtcagcctcattaaggtgaaatttgaggatatcaaggattggtccgacctcgtaacgccacaaggaataatggggatttttgccaagcctgaccatgttaagatgacatatccaaagactcagcttcagcattcactgcctttattattgatttgtgacaatctccgtgaccctgggaacctggggacaattctgagatctgcagctggggcaggctgcagcaaagtgttactcaccaaaggctgtgtggatgcctgggagcccaaagtgctccgggcgggtatgggcgcacatttccggatgcccattatcaataatctggaatgggaaaccgtgcccaattacctgccccctgacactcgggtctatgtggctgacaactgtggcctttatgcccaggctgagatgtctaataaagctagtgaccatggctgggtgtgtgatcaacgagtgatgaagtttcacaagtatgaggaagaggaagatgtagaaaccggagccagtcaagattggctgcctcatgttgaggttcagagttacgactcggactggacagaggcgccggcagctgtggtgattggcggggagacctacggcgtgagcctggagtccctgcagctggccgagagcactggtggcaagaggctgctgatccccgttgtgcctggtgtggacagcctcaactcggccatggcggcaagcatcctgcttttcgaagggaaaagacagctgcgggggagggcggaggacttgagcagggacaggagttaccactgaggacgcagaagtgacttctgcttgaggacgtctgcagctcctcctacaccagcacactggtgggaggctggcggagtcagtgactatggcccccacgttcaggaggaaggtgtgatgccgtcatacagttacaggaaaaataagaacttcctcagaaagaacaggtccgaattcttcctgtcgcgtcactgattttgaggttcttttttctcttggtgacaataggtgacccacgtggctctgtgtgtttttaaaaattgtccaccaagaagcactttgtgcccagaaagttcctgaagcatcatcctggcagggaggcgcctgctccaccagctggtgggtgtttgtaatcgccaagcaccagctataggtcacagccacatcactcacagctgatcactggttggtggaaaataaactatgagcagcagattacgttagtaagttgttttgtgtcgttggtgtgtcacagtacctgtcacctttggcctggtaacgaggacgtggctaagggaacaccaggaagctgagggctacgctcatggcatccagcagctctgctctgggctcagatggtctgtctttgagattgttcagggcttcactgagccactgtttatgtatccatagaaacggcttaattcaacaggccatgtcagaccttcttggcacctctgcagatacctttttgaggaccttgcagagacggaagtctatgcggaaaactgaatttcaaaatcggcagcctcaccctgcatgtgtcaggaaagtgtcactgtttcctggttccctgtgttagtcctactta

SEQ ID NO: 284627 - DNA, 1301 bp, Homo sapiens
aacttaggctagtacgaggctgcggtgttgaattcggccgaggctttaccgtctagaatacctaaaggagttgccagtcgataagctgaaaggtgtcagcctcattaaggtgaaatttgaggatatcaaggattggtccgacctcgtaacgccacaaggaataatggggatttttgccaagcctgaccatgttaagatgacatatccaaagactcagcttcagcattcactgcctttattattgatttgtgacaatctccgtgaccctgggaacctggggacaattctgagatctgcagctggggcaggctgcagcaaagtgttactcaccaaaggctgtgtggatgcctgggagcccaaagtgctccgggcgggtatgggcgcacatttccggatgcccattatcaataatctggaatgggaaaccgtgcccaattacctgccccctgacactcgggtctatgtggctgacaactgtggcctttatgcccaggctgagatgtctaataaagctagtgaccatggctgggtgtgtgatcaacgagtgatgaagtttcacaagtatgaggaagaggaagatgtagaaaccggagccagtcaagattggctgcctcatgttgaggttcagagttacgactcggactggacagaggcgccggcagctgtggtgattggcggggagacctacggcgtgagcctggagtccctgcagctggccgagagcactggtggcaagaggctgctgatccccgttgtgcctggtgtggacagcctcaactcggccatggcggcaagcatcctgcttttcgaagggaaaagacagctgcgggggagggcggaggacttgagcagggacaggagttaccactgaggacgcagaagtgacttctgcttgaggacgtctgcagctcctcctacaccagcacactggtgggaggctggcggagtcagtgactatggcccccacgttcaggaggaaggtgtgatgccgtcatacagttacaggaaaaataagaacttcctcagaaagaacaggtccgaattcttcctgtcgcgtcactgattttgaggttcttttttctcttggtgacaataggtgacccacgtggctctgtgtgtttttaaaaattgtccaccaagaagcactttgtgcccagaaagttcctgaagcatcatcctggcagggaggcgcctgctccaccagctggtgggtgtttgtaatcgccaagcaccagctataggtcacagccacatcactcacagctgatcactggttggtggaaaataaactatgagcagca

SEQ ID NO: 284628 - DNA, 1664 bp, Homo sapiens
ttcgtgacgcagcccgggtctcagggaacatggcggcgctggtgagacccgcgaggtttgtcgtgcgaccgttgctgcaggtggtccaggcttgggaccttgacgcgaggcgctgggtccgggcgctgcggcggagcccagtgaaagtggtgtttccttccggagaggtggtggaacagaagcgcgctcctgggaagcagccccgcaaggcaccatctgaggccagtgcccaggagcaacgagagaaacaaccgctcgaggagtccgcatcccgcgctcccagcacctgggaagagtctgggcttcgctacgataaagcttatcccggggacaggaggctgagcagtgtaatgacaatagtaaagtccaggccatttcgggaaaaacaagggaagatcctgctggaaggtcgcaggctcatttcagacgctctcaaggctggagctgtgccaaaaatgttcttctttagccgtctagaatacctaaaggagttgccagtcgataagctgaaaggtgtcagcctcattaagggatttttgccaagcctgaccatgttaagatgacatatccaaagactcagcttcagcattcactgcctttattattgatttgtgacaatctccgtgaccctgggaacctggggacaattctgagatctgcagctggggcaggctgcagcaaagtgttactcaccaaaggctgtgtggatgcctgggagcccaaagtgctccgggcgggtatgggcgcacatttccggatgcccattatcaataatctggaatgggaaaccgtgcccaattacctgccccctgacactcgggtctatgtggctgacaactgtggcctttatgcccaggctgagatgtctaataaagctagtgaccatggctgggtgtgtgatcaacgagtgatgaagtttcacaagtatgaggaagaggaagatgtagaaaccggagccagtcaagattggctgcctcatgttgaggttcagagttacgactcggactggacagaggcgccggcagctgtggtgattggcggggagacctacggcgtgagcctggagtccctgcagctggccgagagcactggtggcaagaggctgctgatccccgttgtgcctggtgtggacagcctcaactcggccatggcggcaagcatcctgcttttcgaagggaaaagacagctgcgggggagggcggaggacttgagcagggacaggagttaccactgaggacgcagaagtgacttctgcttgaggacgtctgcagctcctcctacaccagcacactggtgggaggctggcggagtcagtgactatggcccccacgttcaggaggaaggtgtgatgccgtcatacagttacaggaaaaataagaacttcctcagaaagaacaggtccgaattcttcctgtcgcgtcactgattttgaggttcttttttctcttggtgacaataggtgacccacgtggctctgtgtgtttttaaaaattgtccaccaagaagcactttgtgcccagaaagttcctgaagcatcatcctggcagggaggcgcctgctccaccagctggtgggtgtttgtaatcgccaagcaccagctataggtcacagccacatcactcacagctgatcactggttggtggaaaataaactatgagcagca

SEQ ID NO: 284629 - DNA, 1477 bp, Homo sapiens
ttcgtgacgcagcccgggtctcagggaacatggcggcgctggtgagacccgcgaggtttgtcgtgcgaccgttgctgcaggtggtccaggcttgggaccttgacgcgaggcgctgggtccgggcgctgcggcggagcccagtgaaagtggtgtttccttccggagaggtggtggaacagaagcgcgctcctgggaagcagccccgcaaggcaccatctgaggccagtgcccaggagcaacgagagaaacaaccgctcgaggagtccgcatcccgcgctcccagcacctgggaagagtctgggcttcgctacgataaagcttatcccggggacaggaggctgagggatttttgccaagcctgaccatgttaagatgacatatccaaagactcagcttcagcattcactgcctttattattgatttgtgacaatctccgtgaccctgggaacctggggacaattctgagatctgcagctggggcaggctgcagcaaagtgttactcaccaaaggctgtgtggatgcctgggagcccaaagtgctccgggcgggtatgggcgcacatttccggatgcccattatcaataatctggaatgggaaaccgtgcccaattacctgccccctgacactcgggtctatgtggctgacaactgtggcctttatgcccaggctgagatgtctaataaagctagtgaccatggctgggtgtgtgatcaacgagtgatgaagtttcacaagtatgaggaagaggaagatgtagaaaccggagccagtcaagattggctgcctcatgttgaggttcagagttacgactcggactggacagaggcgccggcagctgtggtgattggcggggagacctacggcgtgagcctggagtccctgcagctggccgagagcactggtggcaagaggctgctgatccccgttgtgcctggtgtggacagcctcaactcggccatggcggcaagcatcctgcttttcgaagggaaaagacagctgcgggggagggcggaggacttgagcagggacaggagttaccactgaggacgcagaagtgacttctgcttgaggacgtctgcagctcctcctacaccagcacactggtgggaggctggcggagtcagtgactatggcccccacgttcaggaggaaggtgtgatgccgtcatacagttacaggaaaaataagaacttcctcagaaagaacaggtccgaattcttcctgtcgcgtcactgattttgaggttcttttttctcttggtgacaataggtgacccacgtggctctgtgtgtttttaaaaattgtccaccaagaagcactttgtgcccagaaagttcctgaagcatcatcctggcagggaggcgcctgctccaccagctggtgggtgtttgtaatcgccaagcaccagctataggtcacagccacatcactcacagctgatcactggttggtggaaaataaactatgagcagca

SEQ ID NO: 284630 - DNA, 1668 bp, Homo sapiens
tgcccgggcgtcgccaggcaaccttcccccttcgcggccgagatggaccctgggctcggcgtcctccggaaaactgcactgtgaggcggggcgatggggaagggccgaagccccgccagcccagctaaagcagacggctcgcactgcgacccgaagcgcgagtcatggctggggccttagtggcaacaagtgctgagatcagcgggctcagtagcaggaacacaagcacccccttgcggtgtctggaggaagcggcgcggacagtctcccgctccaccgtgtcgggcctgaagaggccgctgaacgctcgcgattactgaggcatctggtaggatcgcaaggccatcaacctacaggtgaagctcgaggcgctgtggcgctttgaagccggagagaagctcagtagaatcgggaaggcgctggggctgtccaactccaccttggccaccattcgtgacaacaaggaaaagatctgggcgagttcccaggaggccacactgcaggcggccaccaagttgacgcgtggccgcagcctggtgatggagaacatggagcagctgctgagcatgcggatggaggaccagagccagcgcaacatgcccctcagtgtggtgctcattcgggagaaagcccacagcccgttcgagaaccgcaagcaggagcagggcgagggcgcctagcccgagagcttcggggccggtcgagggtgattcgctggctttaaggcgcgccacagcttgagcagcatcggggccagcggcccaagaacgcagcgtgcaagaacccagcgttaatgcgcagggtgatcccggagggcggctacacactctggctggtgttcaccatgaataagctctggctggtgttcaccatgaataagcccaggttcctctgtaagcgcctgccgagaggacgttcattttcctgtggaagatgagtcggcccctgggtcaaagccgccggagacctcctgaccctattgctcggtggcaacgcagccggcgacttcaagctgaaggccctgctggtgtacccctcggagaacccgtgtttcctcaagggctccttcaagcccaacctgcccttggtgtggtgctcgcacaagaaagcctgggtacagcctgggtgacagagcgagactccgtctcaaaaaaaaaaaaaaaagcctgggtaaccatgagcctcttccaggagtggttcctgcacttctgctctacagtggagggcgctgcacccagtacgaccttccctacaaggggctgcccatcctggacagcactcccggccaccctgggtgttgagacagagtctggctctgtcgcgcaggctggagtgcggtggcgcgatctcggctcactgcaacctccgcctcccgggttcacgccattctcctgcctcagcctcccaggtagctgggactacaggcgcccgccaccacgcccggctaatttttttgtatttttagtagagacggggtttcaccgtgttagccagaatggtctcggtctcctgaccccatgatccacccgccttggcgtcccaaagtgctgggattacaggcgtgagccatggtgcctggccctttaattcccccaatatttttttatctgcattaatttattatttcaagtgaacttccatctcaaatacatggttctcagacgcttc

SEQ ID NO: 284631 - DNA, 1400 bp, Homo sapiens
tgcccgggcgtcgccaggcaaccttcccccttcgcggccgagatggaccctgggctcggcgtcctccggaaaactgcactgtgaggcggggcgatggggaagggccgaagccccgccagcccagctaaagcagacggctcgcactgcgacccgaagcgggcccagcacagggatcacattgtcggggtgacctggatcctacttgaagcctttgagctggactgtggctttatccctgaggccaggcttcatgtccagatggccatgccagaggttgacgtggcagagaaggagtgtgacacaggccagtggagcgagtggagccagcctgtgtgcttccaggctccccagagacaagacggcaccgaaagcgaaggaagctcctgctcctcctaaagccgaagccaaagcgaaggctttaaaggccaagaaggcagtgttgaaaggtgtccgcagccacacgcaaaaaagaagatccgcatgtcactcaccttcaggcggcccaagacactgcgactccggaggcagcccagatatcctcggaagagcacccccaggagaaacaagcttggccactatgctatcatcaagtttccgctgaccactgagtcggccgtgaagaagatagaagaaaacaacacgcttgtgttcactgtggatgttaaagccaacaagcaccagatcagacaggctgtgaagaagctctatgacagtgatgtggccaaggtcaccaccctgatttgtcctgataaagagaagaaggcatatgttcgacttgctcctgattatgatgctttcgatgttgtaacaaaattgggatcacctaaactgagtccagctggctaactctaaatatatgtgtatcttttcagcataaaaaaataatgtttttcataagaatgacaacttaattagaatcaaatctataagctttaagattttacgtttctagtaagtataatattagcttatttgactagaactcaagcagaataggaatttatgcttgttttatattcaataatgataattttgaagatatagttgttttattacaccaaaaatactatattaatcttatttaactaagttttatccaaatcatgttaacttaagaaacatttgatcagttcctatatttctaggagtttggtgaatatttatttataaatgcttatttttttccaagccaagttagaatagagcacttttagaggatttcataaatggaattttgtaatgcctctctggagtttagaaaatatcacctataccttaacataccttatagatacacaaacacaaatagagatttcatagctttcatcctgaaatttcagccatgaatcaggcataaatattctgatggttaatttcagacatctacttgatcggattga

SEQ ID NO: 284632 - DNA, 3319 bp, Homo sapiens
tgcccgggcgtcgccaggcaaccttcccccttcgcggccgagatggaccctgggctcggcgtcctccggaaaactgcactgtgaggcggggcgatggggaagggccgaagccccgccagcccagctaaagcagacggctcgcactgcgacccgaagcgcgagtcatggctggggccttagtggcaacaagtgctgagatcagcgggctcagtagcaggaacacaagcacccccttgcggtgtctggaggaagcggcgcggacagtctcccgctccaccgtgtcgggcctgaagaggccgctgaacgctcgcgattactgaggcatctggtaggatcgcaaggccatcaacctacaggtgaagctcgaggcgctgtggcgctttgaagccggagagaagctcagtagaatcgggaaggcgctggggctgtccaactccaccttggccaccattcgtgacaacaaggaaaagatctgggcgagttcccaggaggccacactgcaggcggccaccaagttgacgcgtggccgcagcctggtgatggagaacatggagcagctgctgagcatgcggatggaggaccagagccagcgcaacatgcccctcagtgtggtgctcattcgggagaaagcccacagcccgttcgagaaccgcaagcaggagcagggcgagggcgcctagcccgagagcttcggggccggtcgagggtgattcgctggctttaaggcgcgccacagcttgagcagcatcggggccagcggcccaagaacgcagcgtgcaagaacccagcgttaatgcgcagggtgatcccggagggcggctacacactctggctggtgttcaccatgaataagctctggctggtgttcaccatgaataagcccaggttcctctgtaagcgcctgccgagaggacgttcattttcctgtggaagatgagtcggcccctgggtcaaagccgccggagacctcctgaccctattgctcggtggcaacgcagccggcgacttcaagctgaaggccctgctggtgtacccctcggagaacccgtgtttcctcaagggctccttcaagcccaacctgcccttggtgtggtgctcgcacaagaaagcctgggtacagcctgggtgacagagcgagactccgtctcaaaaaaaaaaaaaaaagcctgggtaaccatgagcctcttccaggagtggttcctgcacttctgctctacagtggagggcgctgcacccagtacgaccttccctacaaggggctgcccatcctggacagcactcccggccaccctgggtgttgagacagagtctggctctgtcgcgcaggctggagtgcggtggcgcgatctcggctcactgcaacctccgcctcccgggttcacgccattctcctgcctcagcctcccaggtagctgggactacaggcgcccgccaccacgcccggctaatttttttgtatttttagtagagacggggtttcaccgtgttagccagaatggtctcggtctcctgaccccatgatccacccgccttggcgtcccaaagtgctgggattacaggcgtgagccatggtgcctggccctttaattcccccaatatttttttatctgcattaatttattatttcaagtgaacttccatctcaaatacatggttctcagacgcttccatgaactctcaagtgtgacttattacagcctggggctccttggagcacagtgtgccagtgacctagtggaaggccatgagaaagccaggttcactgttcactgtgcagcatctccctccatggtcttcctggagcctattcccactgcactgagcattccgtgtgtccagaggtagggttagcagggatagatggacttcctgcttattttctgttcacatttccactgaccttcaatcctgtagactgcaaagattgagccagctgagcccccaaagagactcagcagtgcagaatgtgggcctgagtgggaggactgcccagccgcccaccttccagctctgttcttcccgggccctggatgcttcttgccacgctgtcctctgaaatgacgctctgccccagcagacctgtggtaggtgagctagtgaggaagcacacctgggctcttcccaccaggcatcccagccctggtgtggggtatccgcatggttgcaggcatcccctggccaggcctgggtgctcattctccctctctcttcttgtctcctcccctctccctgctttctctgccctgtcctcctgctttttgctgttttcccccggactcctgccatgcccccagactttctttttcccacggatatgggctcattccaaggaaagggtggcatttggacacaaggccctagatcccacgatggaggactggggggtacctgatgcccctcagaaagaggcctgcagggacagcacatgggaaagccccatggctttgtgatccatctggggatgtgatccatttgggtaaggacttgggtttcagggcatgagttggcttccttgcaggatgcaggtccttaggtgggtggcctctgtctccagctgtagggccctgccaggaagcctctatatgagcctacctccctcctgcaggaccagagaggggttgttatgaacagcccaggggattggttgcactaagcttgtcttgaagcttttgctggggagtccaggtgcccatgtctctcacctgctccccatacacatctctgcacacctggctgaggcattcccagacctaacctcagataatgtgcatgtgatgaacactcccaagtggctaggcctcttgcacctgagcaggtggattctgccccagcactggggctttctctgggctgtccatcatgggtatatctctggattccaggattgctagttagcacctcacatttgagggtctgtgctattcagtctagaatcagagttggatgagaaatcaactttgaacaccacctttggggtggctgcattggctcacacctgtaatctcagcactttgggaggctgaggcaggaggatagcttgaggccaggagttcgagactaaccggagcaacatagtaaggccacatctgtacaaaaaaaagaaagaaaaaattacccaggtttggtggcatgcacttgtagtcccagttgtgggctgaggattatgcaggtgacaaggcaagagactgaaggcacaaactgtttcagtataataaagaaaatagaataataatagtcataattatatatagagatgatcatgaacaattatcaatcattataataaacattattaatcattagcttttaaaaatactct

SEQ ID NO: 284633 - DNA, 2871 bp, Homo sapiens
tgcccgggcgtcgccaggcaaccttcccccttcgcggccgagatggaccctgggctcggcgtcctccggaaaactgcactgtgaggcggggcgatggggaagggccgaagccccgccagcccagctaaagcagacggctcgcactgcgacccgaagcgcgagtcatggctggggccttagtggcaacaagtgctgagatcagcgggctcagtagcaggaacacaagcacccccttgcggtgtctggaggaagcggcgcggacagtctcccgctccaccgtgtcgggcctgaagaggccgctgaacgctcgcgattactgaggcatctggtaggatcgcaaggccatcaacctacaggtgaagctcgaggcgctgtggcgctttgaagccggagagaagctcagtagaatcgggaaggcgctggggctgtccaactccaccttggccaccattcgtgacaacaaggaaaagatctgggcgagttcccaggaggccacactgcaggcggccaccaagttgacgcgtggccgcagcctggtgatggagaacatggagcagctgctgagcatgcggatggaggaccagagccagcgcaacatgcccctcagtgtggtgctcattcgggagaaagcccacagcccgttcgagaaccgcaagcaggagcagggcgagggcgcctagcccgagagcttcggggccggtcgagggtgattcgctggctttaaggcgcgccacagcttgagcagcatcggggccagcggcccaagaacgcagcgtgcaagaacccagcgttaatgcgcagggtgatcccggagggcggctacacactctggctggtgttcaccatgaataagctctggctggtgttcaccatgaataagcccaggttcctctgtaagcgcctgccgagaggacgttcattttcctgtggaagatgagtcggcccctgggtcaaagccgccggagacctcctgaccctattgctcggtggcaacgcagccggcgacttcaagctgaaggccctgctggtgtacccctcggagaacccgtgtttcctcaagggctccttcaagcccaacctgcccttggtgtggtgctcgcacaagttacaggcgtgagccatggtgcctggccctttaattcccccaatatttttttatctgcattaatttattatttcaagtgaacttccatctcaaatacatggttctcagacgcttccatgaactctcaagtgtgacttattacagcctggggctccttggagcacagtgtgccagtgacctagtggaaggccatgagaaagccaggttcactgttcactgtgcagcatctccctccatggtcttcctggagcctattcccactgcactgagcattccgtgtgtccagaggtagggttagcagggatagatggacttcctgcttattttctgttcacatttccactgaccttcaatcctgtagactgcaaagattgagccagctgagcccccaaagagactcagcagtgcagaatgtgggcctgagtgggaggactgcccagccgcccaccttccagctctgttcttcccgggccctggatgcttcttgccacgctgtcctctgaaatgacgctctgccccagcagacctgtggtaggtgagctagtgaggaagcacacctgggctcttcccaccaggcatcccagccctggtgtggggtatccgcatggttgcaggcatcccctggccaggcctgggtgctcattctccctctctcttcttgtctcctcccctctccctgctttctctgccctgtcctcctgctttttgctgttttcccccggactcctgccatgcccccagactttctttttcccacggatatgggctcattccaaggaaagggtggcatttggacacaaggccctagatcccacgatggaggactggggggtacctgatgcccctcagaaagaggcctgcagggacagcacatgggaaagccccatggctttgtgatccatctggggatgtgatccatttgggtaaggacttgggtttcagggcatgagttggcttccttgcaggatgcaggtccttaggtgggtggcctctgtctccagctgtagggccctgccaggaagcctctatatgagcctacctccctcctgcaggaccagagaggggttgttatgaacagcccaggggattggttgcactaagcttgtcttgaagcttttgctggggagtccaggtgcccatgtctctcacctgctccccatacacatctctgcacacctggctgaggcattcccagacctaacctcagataatgtgcatgtgatgaacactcccaagtggctaggcctcttgcacctgagcaggtggattctgccccagcactggggctttctctgggctgtccatcatgggtatatctctggattccaggattgctagttagcacctcacatttgagggtctgtgctattcagtctagaatcagagttggatgagaaatcaactttgaacaccacctttggggtggctgcattggctcacacctgtaatctcagcactttgggaggctgaggcaggaggatagcttgaggccaggagttcgagactaaccggagcaacatagtaaggccacatctgtacaaaaaaaagaaagaaaaaattacccaggtttggtggcatgcacttgtagtcccagttgtgggctgaggattatgcaggtgacaaggcaagagactgaaggcacaaactgtttcagtataataaagaaaatagaataataatagtcataattatatatagagatgatcatgaacaattatcaatcattataataaacattattaatcattagcttttaaaaatactct

SEQ ID NO: 284634 - DNA, 1332 bp, Homo sapiens
tgcccgggcgtcgccaggcaaccttcccccttcgcggccgagatggaccctgggctcggcgtcctccggaaaactgcactgtgaggcggggcgatggggaagggccgaagccccgccagcccagctaaagcagacggctcgcactgcgacccgaagcgcgagtcatggctggggccttagtggcaacaagtgctgagatcagcgggctcagtagcaggaacacaagcacccccttgcggtgtctggaggaagcggcgcggacagtctcccgctccaccgtgtcgggcctgaagaggccgctgaacgctcgcgattactgaggcatctggtaggatcgcaaggccatcaacctacaggtgaagctcgaggcgctgtggcgctttgaagccggagagaagctcagtagaatcgggaaggcgctggggctgtccaactccaccttggccaccattcgtgacaacaaggaaaagatctgggcgagttcccaggaggccacactgcaggcggccaccaagttgacgcgtggccgcagcctggtgatggagaacatggagcagctgctgagcatgcggatggaggaccagagccagcgcaacatgcccctcagtgtggtgctcattcgggagaaagcccacagcccgttcgagaaccgcaagcaggagcagggcgagggcgcctagcccgagagcttcggggccggtcgagggtgattcgctggctttaaggcgcgccacagcttgagcagcatcggggccagcggcccaagaacgcagcgtgcaagaacccagcgttaatgcgcagggtgatcccggagggcggctacacactctggctggtgttcaccatgaataagctctggctggtgttcaccatgaataagcccaggttcctctgtaagcgcctgccgagaggacgttcattttcctgtggaagatgagtcggcccctgggtcaaagccgccggagacctcctgaccctattgctcggtggcaacgcagccggcgacttcaagctgaaggccctgctggtgtacccctcggagaacccgtgtttcctcaagggctccttcaagcccaacctgcccttggtgtggtgctcgcacaagaaagcctgggtacagcctgggtgacagagcgagactccgtctcaaaaaaaaaaaaaaaagcctgggtaaccatgagcctcttccaggagtggttcctgcacttctgctctacagtggagggcgctgcacccagtacgaccttccctacaaggggctgcccatcctggacagcactcccggccaccctgggtgttgagacagagcgagactccgtctcaaaaaaaaaa

SEQ ID NO: 284635 - DNA, 3019 bp, Homo sapiens
tgcccgggcgtcgccaggcaaccttcccccttcgcggccgagatggaccctgggctcggcgtcctccggaaaactgcactgtgaggcggggcgatggggaagggccgaagccccgccagcccagctaaagcagacggctcgcactgcgacccgaagcgcgagtcatggctggggccttagtggcaacaagtgctgagatcagcgggctcagtagcaggaacacaagcacccccttgcggtgtctggaggaagcggcgcggacagtctcccgctccaccgtgtcgggcctgaagaggccgctgaacgctcgcgattactgaggcatctggtaggatcgcaaggccatcaacctacaggtgaagctcgaggcgctgtggcgctttgaagccggagagaagctcagtagaatcgggaaggcgctggggctgtccaactccaccttggccaccattcgtgacaacaaggaaaagatctgggcgagttcccaggaggccacactgcaggcggccaccaagttgacgcgtggccgcagctggtgttcaccatgaataagctctggctggtgttcaccatgaataagcccaggttcctctgtaagcgcctgccgagaggacgttcattttcctgtggaagatgagtcggcccctgggtcaaagccgccggagacctcctgaccctattgctcggtggcaacgcagccggcgacttcaagctgaaggccctgctggtgtacccctcggagaacccgtgtttcctcaagggctccttcaagcccaacctgcccttggtgtggtgctcgcacaagaaagcctgggtacagcctgggtgacagagcgagactccgtctcaaaaaaaaaaaaaaaagcctgggtaaccatgagcctcttccaggagtggttcctgcacttctgctctacagtggagggcgctgcacccagtacgaccttccctacaaggggctgcccatcctggacagcactcccggccaccctgggtgttgagacagagtctggctctgtcgcgcaggctggagtgcggtggcgcgatctcggctcactgcaacctccgcctcccgggttcacgccattctcctgcctcagcctcccaggtagctgggactacaggcgcccgccaccacgcccggctaatttttttgtatttttagtagagacggggtttcaccgtgttagccagaatggtctcggtctcctgaccccatgatccacccgccttggcgtcccaaagtgctgggattacaggcgtgagccatggtgcctggccctttaattcccccaatatttttttatctgcattaatttattatttcaagtgaacttccatctcaaatacatggttctcagacgcttccatgaactctcaagtgtgacttattacagcctggggctccttggagcacagtgtgccagtgacctagtggaaggccatgagaaagccaggttcactgttcactgtgcagcatctccctccatggtcttcctggagcctattcccactgcactgagcattccgtgtgtccagaggtagggttagcagggatagatggacttcctgcttattttctgttcacatttccactgaccttcaatcctgtagactgcaaagattgagccagctgagcccccaaagagactcagcagtgcagaatgtgggcctgagtgggaggactgcccagccgcccaccttccagctctgttcttcccgggccctggatgcttcttgccacgctgtcctctgaaatgacgctctgccccagcagacctgtggtaggtgagctagtgaggaagcacacctgggctcttcccaccaggcatcccagccctggtgtggggtatccgcatggttgcaggcatcccctggccaggcctgggtgctcattctccctctctcttcttgtctcctcccctctccctgctttctctgccctgtcctcctgctttttgctgttttcccccggactcctgccatgcccccagactttctttttcccacggatatgggctcattccaaggaaagggtggcatttggacacaaggccctagatcccacgatggaggactggggggtacctgatgcccctcagaaagaggcctgcagggacagcacatgggaaagccccatggctttgtgatccatctggggatgtgatccatttgggtaaggacttgggtttcagggcatgagttggcttccttgcaggatgcaggtccttaggtgggtggcctctgtctccagctgtagggccctgccaggaagcctctatatgagcctacctccctcctgcaggaccagagaggggttgttatgaacagcccaggggattggttgcactaagcttgtcttgaagcttttgctggggagtccaggtgcccatgtctctcacctgctccccatacacatctctgcacacctggctgaggcattcccagacctaacctcagataatgtgcatgtgatgaacactcccaagtggctaggcctcttgcacctgagcaggtggattctgccccagcactggggctttctctgggctgtccatcatgggtatatctctggattccaggattgctagttagcacctcacatttgagggtctgtgctattcagtctagaatcagagttggatgagaaatcaactttgaacaccacctttggggtggctgcattggctcacacctgtaatctcagcactttgggaggctgaggcaggaggatagcttgaggccaggagttcgagactaaccggagcaacatagtaaggccacatctgtacaaaaaaaagaaagaaaaaattacccaggtttggtggcatgcacttgtagtcccagttgtgggctgaggattatgcaggtgacaaggcaagagactgaaggcacaaactgtttcagtataataaagaaaatagaataataatagtcataattatatatagagatgatcatgaacaattatcaatcattataataaacattattaatcattagcttttaaaaatactct

SEQ ID NO: 284636 - DNA, 1810 bp, Homo sapiens
aacctgttctccgggctaggggacaaacagggaaaaagaaaatattacaggcgtgagccatggtgcctggccctttaattcccccaatatttttttatctgcattaatttattatttcaagtgaacttccatctcaaatacatggttctcagacgcttccatgaactctcaagtgtgacttattacagcctggggctccttggagcacagtgtgccagtgacctagtggaaggccatgagaaagccaggttcactgttcactgtgcagcatctccctccatggtcttcctggagcctattcccactgcactgagcattccgtgtgtccagaggtagggttagcagggatagatggacttcctgcttattttctgttcacatttccactgaccttcaatcctgtagactgcaaagattgagccagctgagcccccaaagagactcagcagtgcagaatgtgggcctgagtgggaggactgcccagccgcccaccttccagctctgttcttcccgggccctggatgcttcttgccacgctgtcctctgaaatgacgctctgccccagcagacctgtggtaggtgagctagtgaggaagcacacctgggctcttcccaccaggcatcccagccctggtgtggggtatccgcatggttgcaggcatcccctggccaggcctgggtgctcattctccctctctcttcttgtctcctcccctctccctgctttctctgccctgtcctcctgctttttgctgttttcccccggactcctgccatgcccccagactttctttttcccacggatatgggctcattccaaggaaagggtggcatttggacacaaggccctagatcccacgatggaggactggggggtacctgatgcccctcagaaagaggcctgcagggacagcacatgggaaagccccatggctttgtgatccatctggggatgtgatccatttgggtaaggacttgggtttcagggcatgagttggcttccttgcaggatgcaggtccttaggtgggtggcctctgtctccagctgtagggccctgccaggaagcctctatatgagcctacctccctcctgcaggaccagagaggggttgttatgaacagcccaggggattggttgcactaagcttgtcttgaagcttttgctggggagtccaggtgcccatgtctctcacctgctccccatacacatctctgcacacctggctgaggcattcccagacctaacctcagataatgtgcatgtgatgaacactcccaagtggctaggcctcttgcacctgagcaggtggattctgccccagcactggggctttctctgggctgtccatcatgggtatatctctggattccaggattgctagttagcacctcacatttgagggtctgtgctattcagtctagaatcagagttggatgagaaatcaactttgaacaccacctttggggtggctgcattggctcacacctgtaatctcagcactttgggaggctgaggcaggaggatagcttgaggccaggagttcgagactaaccggagcaacatagtaaggccacatctgtacaaaaaaaagaaagaaaaaattacccaggtttggtggcatgcacttgtagtcccagttgtgggctgaggattatgcaggtgacaaggcaagagactgaaggcacaaactgtttcagtataataaagaaaatagaataataatagtcataattatatatagagatgatcatgaacaattatcaatcattataataaacattattaatcattagcttttaaaaatactct

SEQ ID NO: 284637 - DNA, 1108 bp, Homo sapiens
ggcgcctgcgcggcggggttctcggtcgccagccattcctgaggaggactgccggtcgttcggacgtcttgcctgtcgctggaggagaggtccgggctctccaggaaggtggctgcggcgacaaaatgaagatattcgtgggcaacgtcgacggggcggatacgactccggaggagctggcagccctctttgcgccctacggcacggtcatgagctgcgccgtcatgaaacagttcgccttcgtgcacatgcgcgagaacgcgggcgcgctgcgcgccatcgaagccctgcacggccacgagctgcggccggggcgcgcgctcgtggtggagatgtcgcgcccaaggcctcttaatacttggaagattttcgtgggcaatgtgtcggctgcatgcacgagccaggaactgcgcagcctcttcgagcgccgcggacgcgtcatcgagtgtgacgtggtgaaagactacgcgtttgttcacatggagaaggaagcagatgccaaagccgcaatcgcgcagctcaacggcaaagaagtgaagggcaagcgcatcaacgtggaactctccaccaagggtcagaagaaggggcctggcctggctgtccagtctggggacaagaccaagaaaccaggggctggggatacggccttccctggaactggtggcttctctgccaccttcgactaccagcaggcttttggcaacagcactggtggctttgatgggcaagcccgtcagcccacaccacccttctttggtcgcgaccgcagccctctgcgccgttcacctccccgagcctcttatgtggctcctctgacggcccagccagctacctaccgggcccagccgtccgtgtcactgggagctgcctacagggcccagccttctgcctctttgggtgttggctatcggactcagcccatgacagcccaggcagcctcttaccgcgctcagccctctgtctcccttggggcaccatacaggggccagctggctagtcctagctcccagtctgctgcagcttcttcactcggcccatatggtggagcccagccctcagctcggccctttctcctatgggggtcaggcagctgcagcttcttcgctca

SEQ ID NO: 284638 - DNA, 1124 bp, Homo sapiens
ggacgcgtgggtcggacgcgtgggtcccgggaccgcgttgggtcgacccacgcgtccgggaggactgccggtcgttcggacgtcttgcctgtcgctggaggagaggtccgggctctccaggaaggtggctgcggcgacaaaatgaagatattcgtgggcaacgtcgacggggcggatacgactccggaggagctggcagccctctttgcgccctacggcacggtcatgagctgcgccgtcatgaaacagttcgccttcgtgcacatgcgcgagaacgcgggcgcgctgcgcgccatcgaagccctgcacggccacgagctgcggccggggcgcgcgctcgtggtggagatgtcgcgcccaaggcctcttaatacttggaagattttcgtgggcaatgtgtcggctgcatgcacgagccaggaactgcgcagcctcttcgagcgccgcggacgcgtcatcgagtgtgacgtggtgaaagactacgcgtttgttcacatggagaaggaagcagatgccaaagccgcaatcgcgcagctcaacggcaaagaagtgaagggcaagcgcatcaacgtggaactctccaccaagggtcagaagaaggggcctggcctggctgtccagtctggggacaagaccaagaaaccaggggctggggatacggccttccctggaactggtggcttctctgccaccttcgactaccagcaggcttttggcaacagcactggtggctttgatgggcaagcccgtcagcccacaccacccttctttggtcgcgaccgcagccctctgcgccgttcacctccccgagcctcttatgtggctcctctgacggcccagccagctacctaccgggcccagccgtccgtgtcactgggagctgcctacagggcccagccttctgcctctttgggtgttggctatcggactcagcccatgacagcccaggcagcctcttaccgcgctcagccctctgtctcccttggggcaccatacaggggccagctggctagtcctagctcccagtctgctgcagcttcttcactcggcccatatggtggagcccagccctcagctcggccctttctcctatgggggtcaggcagctgcagcttcttcgctca

SEQ ID NO: 284639 - DNA, 1056 bp, Homo sapiens
tgcgcggttgggaggggtggggaagtgcgcgggagcaggtcggaggtgttgggggcgcgttgggtagagccaccctcctcccctgcggtccaggaaccgtccaccaagtaggaggaagcggctctgggtgggtgcggcggccactgcgagccaagctacggggccggggacgcgcctgagagccttgcgagtgttccggggggcgcgccttctcctggtctcctgggcctggcacccagcggaaattgggaagtgacgggcacaagccggatcatgaagcggggaagatttctccacttccccacttcctctccagacgtcggtcagagcaagggaagagggaaaaggtgggggctgacgccccaaggccgccctcctgttccctcccgatgaatgtgctcaagcggaagactacgcgtttgttcacatggagaaggaagcagatgccaaagccgcaatcgcgcagctcaacggcaaagaagtgaagggcaagcgcatcaacgtggaactctccaccaagggtcagaagaaggggcctggcctggctgtccagtctggggacaagaccaagaaaccaggggctggggatacggccttccctggaactggtggcttctctgccaccttcgactaccagcaggcttttggcaacagcactggtggctttgatgggcaagcccgtcagcccacaccacccttctttggtcgcgaccgcagccctctgcgccgttcacctccccgagcctcttatgtggctcctctgacggcccagccagctacctaccgggcccagccgtccgtgtcactgggagctgcctacagggcccagccttctgcctctttgggtgttggctatcggactcagcccatgacagcccaggcagcctcttaccgcgctcagccctctgtctcccttggggcaccatacaggggccagctggctagtcctagctcccagtctgctgcagcttcttcactcggcccatatggtggagcccagccctcagctcggccctttctcctatgggggtcaggcagctgcagcttcttcgctca

SEQ ID NO: 284640 - DNA, 828 bp, Homo sapiens
ggacgcgtgggtcggacgcgtgggtcccgggaccgcgttgggtcgacccacgcgtccgggaggactgccggtcgttcggacgtcttgcctgtcgctggaggagaggtccgggctctccaggaaggtgctgcttcttcctacaacacccagggagcagcttcctccttaggctcctacggggctcaggcagcctcctatggggcccagtctgcagcctcctcactagcttatggagcccaggcagcttcatataatgcccagccctcggcctcttacaatgcccagtctgccccatatgctgcacagcaggctgcttcctactcttcccaacctgctgcctatgtggcacagccagccacagctgctgcctatgccagccagccagcagcctacgccgcacaagccactaccccaatggctggctcctatggggcccagccggttgtgcagacccagctgaatagttacggggcccaagcatcaatgggcctttcaggctcctatggggctcagtcggctgctgcggccactggctcctatggtgccgcagcagcctacggggcccaaccttctgccaccctggcagctccttaccgcactcagtcatcagcctcattggctgcttcctatgctgcccagcagcatccccaggctgctgcctcctaccgcggccagccaggcaatgcctacgatggggcaggtcagccgtctgcagcctacctgtccatgtcccagggggccgttgccaacgccaacagcaccccgccgccctatgagcgtacccgcctctccccaccccgggccagctacgacgatccctacaaaaag

SEQ ID NO: 284641 - DNA, 618 bp, Homo sapiens
tgttacatggagcagcagcacagtcaagcagggaacagatcacgtaaagccctttagagagtgaagtcggctttttatgctaggtgcaactgggagttctgaacacggcaaagttggacattccaaagatggcgtagatgaacatgaccaggaagagcaggaggccgatgttaaacaacgcaggaagggacatcatcaaagcaaagagcagcgtgcggatcccctttgctcctttgactagacgtaggattcggccaatcctggcaagacggatcactcggaacagggtaacagagatctctggaggtgaaacattgctctgaactggcattgattctagcccagctcttgtagaccaattaccaacttgtccatctccctccagtgcctggaactggacctggcacacaggcctctggctcatcggaattcataggttcagcctctgcttcttctccttctccaggcaaagggttatcaactgtgctgcactctgaggagcttgaccggtttaatctctagaaaggaattcaccaccccaccaggaccagagatctctgaggtgaacattgtctgaacggattgttctagccagtctgtaaccattacatgtcattc

SEQ ID NO: 284642 - DNA, 989 bp, Homo sapiens
  misc_feature (760)..(760): n is a, c, g, or t
  misc_feature (782)..(782): n is a, c, g, or t
  misc_feature (881)..(881): n is a, c, g, or t
  misc_feature (942)..(942): n is a, c, g, or t
tgttacatggagcagcagcacagtcaagcagggaacagatcacgtaaagccctttagagagtgaagtcggctttttatgctaggtgcaactgggagttctgaacacggcaaagttggacattccaaagatggcgtagatgaacatgaccaggaagagcaggaggccgatgttaaacaacgcaggaagggacatcatcaaagcaaagagcagcgtgcggatcccctttgctcctttgactagacgtaggattcggccaatcctggcaagacggatcactcggaacagggtaacagagatctctggaggtgaaacattgctctgaactggcattgattctagcccagctcttgtagaccaattaccaacttgtccatctccctccagtgcctggaactggacctggcacacaggcaaagggttatcaactgtgctgcactctgaggagcttgaccggtttaatctctagaaaggaattcaccaccccaccaggcacgcggaacacaatcaggaaggagtggaagaagtcgttcatgtgccaccgtgggagcgtacagtcatcattgatcttgcagacacattctttgtagctcttaccaaagagctgcatgccgaccacagcaaaaatgaagacgatgatggccaacactaagaagctgtccattggggagcatgagggctgagcgtccatcaaccagggagaccacaccgttgcagtccacagcactgtgcattttcccgttcaccggcagcattggtggngacctactggcttggctgatgntactgctgcgtcgctcctggggtctgtggagcacaaacagtgagccccttctgctctcattgtctacaagatgctgtgctcatcatcggcaaattcagnctcagatcctatatctcttcctcttgcctttgaactaaaaagacttgttctgctgcttcgncctgcagaaacaaggagcacgatgctcgagtgggactgcaaaaaaat

SEQ ID NO: 284643 - DNA, 623 bp, Homo sapiens
tgcactcacagtgggtggaggcaaaacccttcagcaagaagagaagcaacttcagccgtgtatgcaaatggataaccggttgcctcccaaaaaagttccaggtttctgttcctttcgctatggattgtctttccttgtgcactgttgtaatgttataataacagcacagcgtgcgtgcctgaacctcacaatggtagtcatggtgaatagcacagatccacatggtttgcccaacacctccacaaagaagctcctggataatataaagaaccctatgtataattggagcccagatatccagggaatcatcttgagttccacctcctatggtgtcatcatcatccaagttcctgttggatacttctctggaatatattctacaaagaaaatgattggctttgcattatgcctcagctctgtgttaagcctgctcatcccaccagcagctggaattggagtagcttgggtcgttgtatgtcgagcagttcagggagcagcccaggggatagttgcaacagcccagtttgaaatatatgtcaaatgggctcctcccctggaacgaggccgacttacttctatgagtacatcaggtaaagaattaaagcctagaatgtttgaatcct

SEQ ID NO: 284644 - DNA, 1786 bp, Homo sapiens
tgcactcacagtgggtggaggcaaaacccttcagcaagaagagaagcaacttcagccgtgtatgcaaatggataaccggttgcctcccaaaaaagttccaggtttctgttcctttcgctatggattgtctttccttgtgcactgttgtaatgttataataacagcacagcgtgcgtgcctgaacctcacaatggtagtcatggtgaatagcacagatccacatggtttgcccaacacctccacaaagaagctcctggataatataaagaaccctatgtataattggagcccagatatccagggaatcatcttgagttccacctcctatggtgtcatcatcatccaagttcctgttggatacttctctggaatatattctacaaagaaaatgattggctttgcattatgcctcagctctgtgttaagcctgctcatcccaccagcagctggaattggagtagcttgggtcgttgtatgtcgagcagttcagggagcagcccaggggatagttgcaacagcccagtttgaaatatatgtcaaatgggctcctcccctggaacgaggccgacttacttctatgagtacatcagggtttttgctgggaccctttattgtcctacttgtgactggagttatctgtgaatctctgggctggcccatggtcttctatatttttggtgcttgtggctgtgccgtatgtcttctctggttcgttctgttttatgatgaccccaaagaccacccatgtataagcatcagtgaaaaggaatacatcacatcctccctggtccagcaggtcagttcaagtagacaatctctgcctatcaaggctatacttaagtcgcttccagtctgggctatttccattggtagttttacgtttttctggtcacataacatcatgacactatacactccaatgtttatcaactccatgcttcatgttaatataaaagagaatgggttcttgtcttcccttccctatttgtttgcctggatctgtggtaacctagcaggtcagttatcagacttcttcctgaccaggaatattctcagcgtaattgctgtccggaaactcttcacagcagcaggatttctccttcctgcaatctttggtgtctgcctgccttacctgagttccaccttctacagcattgtcattttcctaatacttgctggtgcaacaggcagcttttgcttgggtggagtgtttataaatggcttggatattgctcccagatattttggatttattaaagcatgttcaactttaactggaatgataggaggactaattgcttccactttgactggattgatccttaagcaggatccggaatccgcctggtttaaaaccttcatcctgatggcagccattaatgtgactggcctaattttctaccttatagttgctacagcagaaattcaggactgggctaaagaaaaacaacacacacgtctctgaagtgtgaaacagagcacttgcagagcctgggacaacctccttattgaagggaagagggaccagcacatgaggctgaggctgaggggcagtcaccagcaccaggaagaaggtggtaggaggagtcctaggggccggttttaccctcccacatatcctgtgtgcatcgttttttaacatgtgttgtttgtaacatgtaatatatctgaattttaaatgggggtggtgatttatctcagtcttcctctctgcatcagttgctttataaatgattgtcaaaccaataaatacacacaagataaaattttattctaaggcttcatg

SEQ ID NO: 284645 - DNA, 442 bp, Homo sapiens
agtaacttaaggttgtcattggtaaaaagacttctgtgtcagaaaaaacaaaaggctcttttcagagccacctaccgtctcagaaaaaggctgtacgttacaaaacgttactgctgttaaccagccatcttacttgcctgtcacaaatgcccgtttaagcgcatttcgggaatgtacggggactgaattttcaaggagcgttccatcggccattagtttgagccttcctctgtcgcacagacgagtgcagtggcctgatctcagctcactgcagcctctgcctcctggattcaagcgattctcctccctcattctcccaagtagctgggattacaggagatgaaagatgccctccctataccagaaggaaagtatcattctcatcaaggacagaaaattaaggccaaggaaaatctgtacaaataaaccttgttacaccaac

SEQ ID NO: 284646 - DNA, 2065 bp, Homo sapiens
tgcactcacagtgggtggaggcaaaacccttcagcaagaagagaagcaacttcagccgtgtatgcaaatggataaccggttgcctcccaaaaaagttccaggtttctgttcctttcgctatggattgtctttccttgtgcactgttgtaatgttataataacagcacagcgtgcgtgcctgaacctcacaatggtagtcatggtgaatagcacagatccacatggtttgcccaacacctccacaaagaagctcctggataatataaagaaccctatgtataattggagcccagatatccagggaatcatcttgagttccacctcctatggtgtcatcatcatccaagttcctgttggatacttctctggaatatattctacaaagaaaatgattggctttgcattatgcctcagctctgtgttaagcctgctcatcccaccagcagctggaattggagtagcttgggtcgttgtatgtcgagcagttcagggagcagcccaggggatagttgcaacagcccagtttgaaatatatgtcaaatgggctcctcccctggaacgaggccgacttacttctatgagtacatcagggtttttgctgggaccctttattgtcctacttgtgactggagttatctgtgaatctctgggctggcccatggtcttctatatttttggtgcttgtggctgtgccgtatgtcttctctggttcgttctgttttatgatgaccccaaagaccacccatgtataagcatcagtgaaaaggaatacatcacatcctccctggtccagcaggtcagttcaagtagacaatctctgcctatcaaggctatacttaagtcgcttccagtctgggctatttccattggtagttttacgtttttctggtcacataacatcatgacactatacactccaatgtttatcaactccatgcttcatgttaatataaaagagaatgggttcttgtcttcccttccctatttgtttgcctggatctgtggtaacctagcaggtcagttatcagacttcttcctgaccaggaatattctcagcgtaattgctgtccggaaactcttcacagcagcaggatttctccttcctgcaatctttggtgtctgcctgccttacctgagttccaccttctacagcattgtcattttcctaatacttgctggtgcaacaggcagcttttgcttgggtggagtgtttataaatggcttggatattgctcccagatattttggatttattaaagcatgttcaactttaactggaatgataggaggactaattgcttccactttgactggattgatccttaagcaggatccggaatccgcctggtttaaaaccttcatcctgatggcagccattaatgtgactggcctaattttctaccttatagttgctacagcagaaattcaggactgggctaaagaaaaacaacacacacgtctctgaaggtgagaagtgatcagattaaggacaatttttgaaactgggaatgcaggagacagaggagataaggatgactcctcagacgagaaggaataacgggtgcaggtttggagaagaggagaccatgttaagcctgagaatattagacatcctgaaatggctgtgggactctgtggggatgctaaggctggagatataaatttgggaggctgggcctctttaacatcaaaagatgaggatgaaaaagagaagtttgcaaaaaagactgggaagggccttcaacgaagtaggaagaacagttgtaaaatggagactcgaagtgaaaaaggttgggagcaaggacctttggcaagtgctataatatcaagacattacattatataaggtctaagaatttacaatggtttaggcaagagaaactttaaaggtaaccctgactaaaatgattttcaaatgaatgatggagacaaagagtcctttaaggtgtgttcaaggtataatactgtgctttgcttatgtaaactctatcagtggtaaatgaattggaggagaaatgtctctttgtagaataattttggctaatacataaataagaattgaaag

SEQ ID NO: 284647 - DNA, 1818 bp, Homo sapiens
tgcactcacagtgggtggaggcaaaacccttcagcaagaagagaagcaacttcagccgtgtatgcaaatggataaccggttgcctcccaaaaaagttccaggtttctgttcctttcgctatggattgtctttccttgtgcactgttgtaatgttataataacagcacagcgtgcgtgcctgaacctcacaatggtagtcatggtgaatagcacagatccacatggtttgcccaacacctccacaaagaagctcctggataatataaagaaccctatgtataattggagcccagatatccagggaatcatcttgagttccacctcctatggtgtcatcatcatccaagttcctgttggatacttctctggaatatattctacaaagaaaatgattggctttgcattatgcctcagctctgtgttaagcctgctcatcccaccagcagctggaattggagtagcttgggtcgttgtatgtcgagcagttcagggagcagcccaggggatagttgcaacagcccagtttgaaatatatgtcaaatgggctcctcccctggaacgaggccgacttacttctatgagtacatcagggtttttgctgggaccctttattgtcctacttgtgactggagttatctgtgaatctctgggctggcccatggtcttctatatttttggtgcttgtggctgtgccgtatgtcttctctggttcgttctgttttatgatgaccccaaagaccacccatgtataagcatcagtgaaaaggaatacatcacatcctccctggtccagcaggtcagttcaagtagacaatctctgcctatcaaggctatacttaagtcgcttccagtctgggctatttccattggtagttttacgtttttctggtcacataacatcatgacactatacactccaatgtttatcaactccatgcttcatgttaatataaaagagaatgggttcttgtcttcccttccctatttgtttgcctggatctgtggtaacctagcaggtcagttatcagacttcttcctgaccaggaatattctcagcgtaattgctgtccggaaactcttcacagcagcaggatttctccttcctgcaatctttggtgtctgcctgccttacctgagttccaccttctacagcattgtcattttcctaatacttgctggtgcaacaggcagcttttgcttgggtggagtgtttataaatggcttggatattgctcccagatattttggatttattaaagcatgttcaactttaactggaatgataggaggactaattgcttccactttgactggattgatccttaagcaggatccggaatccgcctggtttaaaaccttcatcctgatggcagccattaatgtgactggcctaattttctaccttatagttgctacagcagaaattcaggactgggctaaagaaaaacaacacacacgtctctgaagccttcctctgtcgcacagacgagtgcagtggcctgatctcagctcactgcagcctctgcctcctggattcaagcgattctcctccctcattctcccaagtagctgggattacaggcatgtaccatcatgtctggctaatgtttatatctttagcacagacggggtttcaccatgttggccaggctggtctcgaactcctgaccacccaccttggccttatcctaaagtgctgggattacagacgtgagcaaccatgcccggctgacttattttttattataatcagactaatatgacactgtcttatgcctaatgctgggtttttatgggatttgtgtaattccaaaattg

SEQ ID NO: 284648 - DNA, 337 bp, Homo sapiens
tggatctgtggtaacctagcaggtcagttatcagacttcttcctgaccaggaatattctcagcgtaattgctgtccggaaactcttcacagcagcaggtaagcaacagccagaacatttaagcacttgggagatacttctcccctatctttaggatgcacctgactatgttgtctgaatcactccccaggatttctccttcctgcaatctttggtgtctgcctgccttacctgagttccaccttctacagcattgtcattttcctaatacttgctggtgcaacaggcagcttttgcttgggtggagtgtttataaatggcttggatattgctcccag

SEQ ID NO: 284649 - DNA, 607 bp, Homo sapiens
aaccctatgtataattggagcccagatatccagggaatcatcttgagttccacctcctatggtgtcatcatcatccaagttcctgttggatacttctctggaatatattctacaaagaaaatgattggctttgcattatgcctcagctctgtgttaagcctgctcatcccaccagcagctggaattggagtagcttgggtcgttgtatgtcgagcagttcagggagcagcccaggtattaaaataatgctaaaactgaacagagtttaaattcacaggaagtattagagattaaatgtcaaacctttctcatttcaggggatagttgcaacagcccagtttgaaatatatgtcaaatgggctcctcccctggaacgaggccgacttacttctatgagtacatcaggtaaagaattaaagcctagaatgtttgaatcctatcttcatctcattgtattacattcttccctagagccataagaaatgtgtgttttgaatggtcaagggctttggaaatcatctgtttcagcattcttgctatgaagatgagagaattgtatagaatggagaagagccatccttatctcaaacaacagagaaaaagagag

SEQ ID NO: 284650 - DNA, 3279 bp, Homo sapiens
  misc_feature (1013)..(1013): n is a, c, g, or t
cactgccggcctgcgcggtactcactgccggcctccgcggtacccactgccggcctccgcgctacccggccgcagcgcgcgagtcacatggaagctcctgaggagcccgcgccagtgcgcggaggcccggaggccacccttgaggtccgtgggtcgcgctgcttgcggctgtccgccttccgagaagagctgcgggcgctcttggtcctggctggccccgcgttcttggttcagctgatggtgttcctgatcagcttcataagctccgtgttctgtggccacctgggcaagctggagctggatgcagtcacgctggcaatcgcggttatcaatgtcactggtgtctcagtgggattcggcttatcttctgcctgtgacaccctcatctcccagacgtacgggagccagaacctgaagcacgtgggcgtgatcctgcagcggagtgcgctcgtcctgctcctctgctgcttcccctgctgggcgctctttctcaacacccagcacatcctgctgctcttcaggcaggacccagatgtgtccaggcttacccagacctatgtcacgatcttcattccagctcttcctgcaacctttctttatatgttacaagttaaatatttgctcaaccagggaattgtactgccccagatcgtaactggagttgcagccaaccttgtcaatgccctcgccaactatctgtttctccatcaactgcatcttggggtgataggctctgcactggcaaacttgatttcccagtacaccctggctctactcctctttctctacatcctcgggaaaaaactgcatcaagctacatggggaggctggtccctcgagtgcctgcaggactgggcctccttcctccgcctggccatccccagcatgctcatgctgtgcatggagtggtgggcctatgaggtcgggagcttcctcagtggcatcctcggcatggtggagctgggcgctcagtccatcgtgtatgaactggccatcattgtgtacatggtccntgcaggcttcagtgtggctgccagtgtccgggtaggaaacgctctgggtgctggagacatggagcaggcacggaagtcctctaccgtttccctgctgattacagtgctctttgctgtagccttcagtgtcctgctgttaagctgtaaggatcacgtggggtacatttttactaccgaccgagacatcattaatctggtggctcaggtggttccaatttatgctgtttcccacctctttgaagctcttgcttgcacgagtggtggtgttctgagggggagtggaaatcagaaggttggagccattgtgaataccattgggtactatgtggttggcctccccatcgggatcgcgctgatgtttgcaaccacacttggagtgatgggtctgtggtcagggatcatcatctgtacagtctttcaagctgtgtgttttctaggctttattattcagctaaattggaaaaaagcctgtcagcaggctcaggtacacgccaatttgaaagtaaacaacgtgcctcggagtgggaattctgctctccctcaggatccgcttcacccagggtgccctgaaaaccttgaaggaattttaacgaacgatgttggaaagacaggcgagcctcagtcagatcagcagatgcgccaagaagaacctttgccggaacatccacaggacggcgctaaattgtccaggaaacagctggtgctgcggcgagggcttctgctcctgggggtcttcttaatcttgctggtggggattttagtgagattctatgtcagaattcagtgacgtggtaggaaagaaagtcaggtcaagtgatgcttttgagcttacacacaattcacaggcccaccagtgacaatttactgtgagttaatgtcattcaggtgtgcccatggattttgagggctggaaatgcaaagacacatttttctataaaaagaaaaagcaactaaggttaaaagctatattgtggcccaagacactgtctgaaagatgacatgagtagtaattcaccactatctgaaccaagcaaggatcaatgtgctgactgcattggccaatggctttgatacttctgctatttttttagacacaaacccataaactaactgcttaagaattcatactgcttgaattatgtaaaatatattttacagtatatctttccttgggccttagattactattcactgggcaaatggtatttgtttttgttttaattttttttttaatagacggaagtcttgctctgtcatgcaggctggagtgcggtggtgcgatcatagctcactgcagcctcgaactcttgggcttcaagcaatcctcctgtgtcagccaccagagtagctgagactacaggggtatgccaccatgcccagctggcatttgttaatcttcatttgaggtctagatctaggcactgtggacactgaaaaacagttgggaaatctttcgagctgtggaaatccaaacaaagactgataattcctggtaggggtgtgtgcgtgacgtactgcagcctcaacctcctgggctcaagtgatcctcccacctcagcctcctgagtagctgagaccacaggcgtgtgccaccacgcctagctaattttttataccagggtctaccctttgtttcccaggctggtcttgaattcctgggatcaagcaatccttccaccttgccctcccaaagtgttgggattataggcatgagccaccacgactggccagaggacaaaattttaataaaggtcttagcttaagcagtaatcctacttcattaagccttcctggggtgcggtacacaccgttaattcagcaaccctcagtacatactaagtatgctcagtgctgtgaaagtggattacaccaaattaagtcattcttatcacacccaatcaaaagtcaagaagccagggataaaagcacctcaggcacataacattaatctagtaatgtaattctctgcacatccagctggtgaaactgcgtgctgtaagctgggaccagctttgtccataactgctgagagaacttgctgaagctctaggaataattttgcctgcccggttgctcaccagttgtagcttgccagctcccaacacccttcctggtgccaataaactttctcaaagagcaatactgacatttcttttgataaaacctccagccttctctgtgttgttccgacataccgaggaccaactggtctacatggatgccctgaacatgcaattctttcttccaaaataaaacattaaataga

SEQ ID NO: 284651 - DNA, 3184 bp, Homo sapiens
  misc_feature (1013)..(1013): n is a, c, g, or t
cactgccggcctgcgcggtactcactgccggcctccgcggtacccactgccggcctccgcgctacccggccgcagcgcgcgagtcacatggaagctcctgaggagcccgcgccagtgcgcggaggcccggaggccacccttgaggtccgtgggtcgcgctgcttgcggctgtccgccttccgagaagagctgcgggcgctcttggtcctggctggccccgcgttcttggttcagctgatggtgttcctgatcagcttcataagctccgtgttctgtggccacctgggcaagctggagctggatgcagtcacgctggcaatcgcggttatcaatgtcactggtgtctcagtgggattcggcttatcttctgcctgtgacaccctcatctcccagacgtacgggagccagaacctgaagcacgtgggcgtgatcctgcagcggagtgcgctcgtcctgctcctctgctgcttcccctgctgggcgctctttctcaacacccagcacatcctgctgctcttcaggcaggacccagatgtgtccaggcttacccagacctatgtcacgatcttcattccagctcttcctgcaacctttctttatatgttacaagttaaatatttgctcaaccagggaattgtactgccccagatcgtaactggagttgcagccaaccttgtcaatgccctcgccaactatctgtttctccatcaactgcatcttggggtgataggctctgcactggcaaacttgatttcccagtacaccctggctctactcctctttctctacatcctcgggaaaaaactgcatcaagctacatggggaggctggtccctcgagtgcctgcaggactgggcctccttcctccgcctggccatccccagcatgctcatgctgtgcatggagtggtgggcctatgaggtcgggagcttcctcagtggcatcctcggcatggtggagctgggcgctcagtccatcgtgtatgaactggccatcattgtgtacatggtccntgcaggcttcagtgtggctgccagtgtccgggtaggaaacgctctgggtgctggagacatggagcaggcacggaagtcctctaccgtttccctgctgattacagtgctctttgctgtagccttcagtgtcctgctgttaagctgtaaggatcacgtggggtacatttttactaccgaccgagacatcattaatctggtggctcaggtggttccaatttatgctgtttcccacctctttgaagctcttgcttgcacgagtggtggtgttctgagggggagtggaaatcagaaggttggagccattgtgaataccattgggtactatgtggttggcctccccatcgggatcgcgctgatgtttgcaaccacacttggagtgatgggctcaggtacacgccaatttgaaagtaaacaacgtgcctcggagtgggaattctgctctccctcaggatccgcttcacccagggtgccctgaaaaccttgaaggaattttaacgaacgatgttggaaagacaggcgagcctcagtcagatcagcagatgcgccaagaagaacctttgccggaacatccacaggacggcgctaaattgtccaggaaacagctggtgctgcggcgagggcttctgctcctgggggtcttcttaatcttgctggtggggattttagtgagattctatgtcagaattcagtgacgtggtaggaaagaaagtcaggtcaagtgatgcttttgagcttacacacaattcacaggcccaccagtgacaatttactgtgagttaatgtcattcaggtgtgcccatggattttgagggctggaaatgcaaagacacatttttctataaaaagaaaaagcaactaaggttaaaagctatattgtggcccaagacactgtctgaaagatgacatgagtagtaattcaccactatctgaaccaagcaaggatcaatgtgctgactgcattggccaatggctttgatacttctgctatttttttagacacaaacccataaactaactgcttaagaattcatactgcttgaattatgtaaaatatattttacagtatatctttccttgggccttagattactattcactgggcaaatggtatttgtttttgttttaattttttttttaatagacggaagtcttgctctgtcatgcaggctggagtgcggtggtgcgatcatagctcactgcagcctcgaactcttgggcttcaagcaatcctcctgtgtcagccaccagagtagctgagactacaggggtatgccaccatgcccagctggcatttgttaatcttcatttgaggtctagatctaggcactgtggacactgaaaaacagttgggaaatctttcgagctgtggaaatccaaacaaagactgataattcctggtaggggtgtgtgcgtgacgtactgcagcctcaacctcctgggctcaagtgatcctcccacctcagcctcctgagtagctgagaccacaggcgtgtgccaccacgcctagctaattttttataccagggtctaccctttgtttcccaggctggtcttgaattcctgggatcaagcaatccttccaccttgccctcccaaagtgttgggattataggcatgagccaccacgactggccagaggacaaaattttaataaaggtcttagcttaagcagtaatcctacttcattaagccttcctggggtgcggtacacaccgttaattcagcaaccctcagtacatactaagtatgctcagtgctgtgaaagtggattacaccaaattaagtcattcttatcacacccaatcaaaagtcaagaagccagggataaaagcacctcaggcacataacattaatctagtaatgtaattctctgcacatccagctggtgaaactgcgtgctgtaagctgggaccagctttgtccataactgctgagagaacttgctgaagctctaggaataattttgcctgcccggttgctcaccagttgtagcttgccagctcccaacacccttcctggtgccaataaactttctcaaagagcaatactgacatttcttttgataaaacctccagccttctctgtgttgttccgacataccgaggaccaactggtctacatggatgccctgaacatgcaattctttcttccaaaataaaacattaaataga

SEQ ID NO: 284652 - DNA, 3452 bp, Homo sapiens
  misc_feature (1013)..(1013): n is a, c, g, or t
  misc_feature (3289)..(3290): n is a, c, g, or t
  misc_feature (3303)..(3304): n is a, c, g, or t
  misc_feature (3328)..(3328): n is a, c, g, or t
cactgccggcctgcgcggtactcactgccggcctccgcggtacccactgccggcctccgcgctacccggccgcagcgcgcgagtcacatggaagctcctgaggagcccgcgccagtgcgcggaggcccggaggccacccttgaggtccgtgggtcgcgctgcttgcggctgtccgccttccgagaagagctgcgggcgctcttggtcctggctggccccgcgttcttggttcagctgatggtgttcctgatcagcttcataagctccgtgttctgtggccacctgggcaagctggagctggatgcagtcacgctggcaatcgcggttatcaatgtcactggtgtctcagtgggattcggcttatcttctgcctgtgacaccctcatctcccagacgtacgggagccagaacctgaagcacgtgggcgtgatcctgcagcggagtgcgctcgtcctgctcctctgctgcttcccctgctgggcgctctttctcaacacccagcacatcctgctgctcttcaggcaggacccagatgtgtccaggcttacccagacctatgtcacgatcttcattccagctcttcctgcaacctttctttatatgttacaagttaaatatttgctcaaccagggaattgtactgccccagatcgtaactggagttgcagccaaccttgtcaatgccctcgccaactatctgtttctccatcaactgcatcttggggtgataggctctgcactggcaaacttgatttcccagtacaccctggctctactcctctttctctacatcctcgggaaaaaactgcatcaagctacatggggaggctggtccctcgagtgcctgcaggactgggcctccttcctccgcctggccatccccagcatgctcatgctgtgcatggagtggtgggcctatgaggtcgggagcttcctcagtggcatcctcggcatggtggagctgggcgctcagtccatcgtgtatgaactggccatcattgtgtacatggtccntgcaggcttcagtgtggctgccagtgtccgggtaggaaacgctctgggtgctggagacatggagcaggcacggaagtcctctaccgtttccctgctgattacagtgctctttgctgtagccttcagtgtcctgctgttaagctgtaaggatcacgtggggtacatttttactaccgaccgagacatcattaatctggtggctcaggtggttccaatttatgctgtttcccacctctttgaagctcttgcttgcacgagtggtggtgttctgagggggagtggaaatcagaaggttggagccattgtgaataccattgggtactatgtggttggcctccccatcgggatcgcgctgatgtttgcaaccacacttggagtgatgggtctgtggtcagggatcatcatctgtacagtctttcaagctgtgtgttttctaggctttattattcagctaaattggaaaaaagcctgtcagcaggctcaggtacacgccaatttgaaagtaaacaacgtgcctcggagtgggaattctgctctccctcaggatccgcttcacccagggtgccctgaaaaccttgaaggaattttaacgaacgatgttggaaagacaggcgagcctcagtcagatcagcagatgcgccaagaagaacctttgccggaacatccacaggacggcgctaaattgtccaggaaacagctggtgctgcggcgagggcttctgctcctgggggtcttcttaatcttgctggtggggattttagtgagattctatgtcagaattcagtgacgtggtaggaaagaaagtcaggtcaagtgatgcttttgagcttacacacaattcacaggcccaccagtgacaatttactgtgagttaatgtcattcaggtgtgcccatggattttgagggctggaaatgcaaagacacatttttctataaaaagaaaaagcaactaaggttaaaagctatattgtggcccaagacactgtctgaaagatgacatgagtagtaattcaccactatctgaaccaagcaaggatcaatgtgctgactgcattggccaatggctttgatacttctgctatttttttagacacaaacccataaactaactgcttaagaattcatactgcttgaattatgtaaaatatattttacagtatatctttccttgggccttagattactattcactgggcaaatggtatttgtttttgttttaattttttttttaatagacggaagtcttgctctgtcatgcaggctggagtgcggtggtgcgatcatagctcactgcagcctcgaactcttgggcttcaagcaatcctcctgtgtcagccaccagagtagctgagactacaggggtatgccaccatgcccagctggcatttgttaatcttcatttgaggtctagatctaggcactgtggacactgaaaaacagttgggaaatctttcgagctgtggaaatccaaacaaagactgataattcctggtaggggtgtgtgcgtgacgtactgcagcctcaacctcctgggctcaagtgatcctcccacctcagcctcctgagtagctgagaccacaggcgtgtgccaccacgcctagctaattttttataccagggtctaccctttgtttcccaggctggtcttgaattcctgggatcaagcaatccttccaccttgccctcccaaagtgttgggattataggcatgagccaccacgactggccagaggacaaaattttaataaaggtcttagcttaagcagtaatcctacttcattaagccttcctggggtgcggtacacaccgttaattcagcaaccctcagtacatactaagtatgctcagtgctgtgaaagtggattacaccaaattaagtcattcttatcacacccaatcaaaagtcaagaagccagggataaaagcacctcaggcacataacattaatctagtaatgtaattctctgcacatccagctggtgaaactgcgtgctgtaagctgggaccagctttgtccataactgctgagagaacttgctgaagctctaggaataattttgcctgcccggttgctcaccagttgtagcttgccagctcccaacacccttcctggtgccaataaactttctcaaagagcaatactgacatttcttttgataaaacctccagccttctctgtgttgttccgacataccgaggaccaactggtctacatggatgccctgaacatgcaattctttcttccaaaataaaacattaaatagaaaaaacaaanntactaaaagggannttaaacctggccattttataaagnaaggaccctttgatattcctgcccaaggttgccctaagtttggcaaatccgcccaattatctcaaaaaaaaaaaccccgggggggggcctctgccccaattggcccttttgggaggcttaaaaa

SEQ ID NO: 284653 - DNA, 3152 bp, Homo sapiens
  misc_feature (886)..(886): n is a, c, g, or t
gagagtctctgctgctcctgctgctgctcctgctgctcctgttctgctcctgctgctcgtgctgctcctgctgctcctgcccggctcccctctagttcttggttcagctgatggtgttcctgatcagcttcataagctccgtgttctgtggccacctgggcaagctggagctggatgcagtcacgctggcaatcgcggttatcaatgtcactggtgtctcagtgggattcggcttatcttctgcctgtgacaccctcatctcccagacgtacgggagccagaacctgaagcacgtgggcgtgatcctgcagcggagtgcgctcgtcctgctcctctgctgcttcccctgctgggcgctctttctcaacacccagcacatcctgctgctcttcaggcaggacccagatgtgtccaggcttacccagacctatgtcacgatcttcattccagctcttcctgcaacctttctttatatgttacaagttaaatatttgctcaaccagggaattgtactgccccagatcgtaactggagttgcagccaaccttgtcaatgccctcgccaactatctgtttctccatcaactgcatcttggggtgataggctctgcactggcaaacttgatttcccagtacaccctggctctactcctctttctctacatcctcgggaaaaaactgcatcaagctacatggggaggctggtccctcgagtgcctgcaggactgggcctccttcctccgcctggccatccccagcatgctcatgctgtgcatggagtggtgggcctatgaggtcgggagcttcctcagtggcatcctcggcatggtggagctgggcgctcagtccatcgtgtatgaactggccatcattgtgtacatggtccntgcaggcttcagtgtggctgccagtgtccgggtaggaaacgctctgggtgctggagacatggagcaggcacggaagtcctctaccgtttccctgctgattacagtgctctttgctgtagccttcagtgtcctgctgttaagctgtaaggatcacgtggggtacatttttactaccgaccgagacatcattaatctggtggctcaggtggttccaatttatgctgtttcccacctctttgaagctcttgcttgcacgagtggtggtgttctgagggggagtggaaatcagaaggttggagccattgtgaataccattgggtactatgtggttggcctccccatcgggatcgcgctgatgtttgcaaccacacttggagtgatgggtctgtggtcagggatcatcatctgtacagtctttcaagctgtgtgttttctaggctttattattcagctaaattggaaaaaagcctgtcagcaggctcaggtacacgccaatttgaaagtaaacaacgtgcctcggagtgggaattctgctctccctcaggatccgcttcacccagggtgccctgaaaaccttgaaggaattttaacgaacgatgttggaaagacaggcgagcctcagtcagatcagcagatgcgccaagaagaacctttgccggaacatccacaggacggcgctaaattgtccaggaaacagctggtgctgcggcgagggcttctgctcctgggggtcttcttaatcttgctggtggggattttagtgagattctatgtcagaattcagtgacgtggtaggaaagaaagtcaggtcaagtgatgcttttgagcttacacacaattcacaggcccaccagtgacaatttactgtgagttaatgtcattcaggtgtgcccatggattttgagggctggaaatgcaaagacacatttttctataaaaagaaaaagcaactaaggttaaaagctatattgtggcccaagacactgtctgaaagatgacatgagtagtaattcaccactatctgaaccaagcaaggatcaatgtgctgactgcattggccaatggctttgatacttctgctatttttttagacacaaacccataaactaactgcttaagaattcatactgcttgaattatgtaaaatatattttacagtatatctttccttgggccttagattactattcactgggcaaatggtatttgtttttgttttaattttttttttaatagacggaagtcttgctctgtcatgcaggctggagtgcggtggtgcgatcatagctcactgcagcctcgaactcttgggcttcaagcaatcctcctgtgtcagccaccagagtagctgagactacaggggtatgccaccatgcccagctggcatttgttaatcttcatttgaggtctagatctaggcactgtggacactgaaaaacagttgggaaatctttcgagctgtggaaatccaaacaaagactgataattcctggtaggggtgtgtgcgtgacgtactgcagcctcaacctcctgggctcaagtgatcctcccacctcagcctcctgagtagctgagaccacaggcgtgtgccaccacgcctagctaattttttataccagggtctaccctttgtttcccaggctggtcttgaattcctgggatcaagcaatccttccaccttgccctcccaaagtgttgggattataggcatgagccaccacgactggccagaggacaaaattttaataaaggtcttagcttaagcagtaatcctacttcattaagccttcctggggtgcggtacacaccgttaattcagcaaccctcagtacatactaagtatgctcagtgctgtgaaagtggattacaccaaattaagtcattcttatcacacccaatcaaaagtcaagaagccagggataaaagcacctcaggcacataacattaatctagtaatgtaattctctgcacatccagctggtgaaactgcgtgctgtaagctgggaccagctttgtccataactgctgagagaacttgctgaagctctaggaataattttgcctgcccggttgctcaccagttgtagcttgccagctcccaacacccttcctggtgccaataaactttctcaaagagcaatactgacatttcttttgataaaacctccagccttctctgtgttgttccgacataccgaggaccaactggtctacatggatgccctgaacatgcaattctttcttccaaaataaaacattaaataga

SEQ ID NO: 284654 - DNA, 3629 bp, Homo sapiens
  misc_feature (1013)..(1013): n is a, c, g, or t
cactgccggcctgcgcggtactcactgccggcctccgcggtacccactgccggcctccgcgctacccggccgcagcgcgcgagtcacatggaagctcctgaggagcccgcgccagtgcgcggaggcccggaggccacccttgaggtccgtgggtcgcgctgcttgcggctgtccgccttccgagaagagctgcgggcgctcttggtcctggctggccccgcgttcttggttcagctgatggtgttcctgatcagcttcataagctccgtgttctgtggccacctgggcaagctggagctggatgcagtcacgctggcaatcgcggttatcaatgtcactggtgtctcagtgggattcggcttatcttctgcctgtgacaccctcatctcccagacgtacgggagccagaacctgaagcacgtgggcgtgatcctgcagcggagtgcgctcgtcctgctcctctgctgcttcccctgctgggcgctctttctcaacacccagcacatcctgctgctcttcaggcaggacccagatgtgtccaggcttacccagacctatgtcacgatcttcattccagctcttcctgcaacctttctttatatgttacaagttaaatatttgctcaaccagggaattgtactgccccagatcgtaactggagttgcagccaaccttgtcaatgccctcgccaactatctgtttctccatcaactgcatcttggggtgataggctctgcactggcaaacttgatttcccagtacaccctggctctactcctctttctctacatcctcgggaaaaaactgcatcaagctacatggggaggctggtccctcgagtgcctgcaggactgggcctccttcctccgcctggccatccccagcatgctcatgctgtgcatggagtggtgggcctatgaggtcgggagcttcctcagtggcatcctcggcatggtggagctgggcgctcagtccatcgtgtatgaactggccatcattgtgtacatggtccntgcaggcttcagtgtggctgccagtgtccgggtaggaaacgctctgggtgctggagacatggagcaggcacggaagtcctctaccgtttccctgctgattacagtgctctttgctgtagccttcagtgtcctgctgttaagctgtaaggatcacgtggggtacatttttactaccgaccgagacatcattaatctggtggctcaggtggttccaatttatgctgtttcccacctctttgaagctcttgcttgcacgagtggtggtgttctgagggggagtggaaatcagaaggttggagccattgtgaataccattgggtactatgtggttggcctccccatcgggatcgcgctgatgtttgcaaccacacttggagtgatgggtctgtggtcagggatcatcatctgtacagtctttcaagctgtgtgttttctaggctttattattcagctaaattggaaaaaagcctgtcagcaggctcaggtacacgccaatttgaaagtaaacaacgtgcctcggagtgggaattctgctctccctcaggatccgcttcacccagggtgccctgaaaaccttgaaggaattttaacgaacgatgttggaaagacaggcgagcctcagtcagatcagcagatgcgccaagaagaacctttgccggaacatccacaggacggcgctaaattgtccaggaaacagctggtgctgcggcgagggcttctgctcctgggggtcttcttaatcttgctggtggggattttagtgagattctatgtcagaattcagtgacgtggtaggaaagaaagtcaggtcaagtgatgcttttgagcttacacacaattcacaggcccaccagtgacaatttactgtgagttaatgtcattcaggtgtgcccatggattttgagggctggaaatgcaaagacacatttttctataaaaagaaaaagcaactaaggttaaaagctatattgtggcccaagacactgtctgaaagatgacatgagtagtaattcaccactatctgaaccaagcaaggatcaatgtgctgactgcattggccaatggctttgatacttctgctatttttttagacacaaacccataaactaactgcttaagaattcatactgcttgaattatgtaaaatatattttacagtatatctttccttgggccttagattactattcactgggcaaatggtatttgtttttgttttaattttttttttaatagacggaagtcttgctctgtcatgcaggctggagtgcggtggtgcgatcatagctcactgcagcctcgaactcttgggcttcaagcaatcctcctgtgtcagccaccagagtagctgagactacaggggtatgccaccatgcccagctggcatttgttaatcttcatttgaggtctagatctaggcactgtggacactgaaaaacagttgggaaatctttcgagctgtggaaatccaaacaaagactgataattcctggtaggggtgtgtgcgtgacgtactgcagcctcaacctcctgggctcaagtgatcctcccacctcagcctcctgagtagctgagaccacaggcgtgtgccaccacgcctagctaattttttataccagggtctaccctttgtttcccaggctggtcttgaattcctgggatcaagcaatccttccaccttgccctcccaaagtgttgggattataggcatgagccaccacgactggccagaggacaaaattttaataaaggtcttagcttaagcagtaatcctacttcattaagccttcctggggtgcggtacacaccgttaattcagcaaccctcagtacatactaagtatgctcagtgctgtgaaagtggattacaccaaattaagtcattcttatcacacccaatcaaaagtcaagaagccagggataaaagcacctcaggcacataacattaatctagtaatgtaattctctgcacatccagctggtgaaactgcgtgctgtaagctgggaccagctttgtccataactgctgagagaacttgctgaagctctaggaataattttgcctgcccggttgctcaccagttgtagcttgccagctcccaacacccttcctggtgccaataaactttctcaaagagcaatactgacatttcttttgataaaacctccagccttctctgtgttgttccgacataccgaggaccaactggtctacatggatgccctgaacatgcaattctttcttccaaaataaaacattaaatagaaaaaaaaaaaaaaaaaaaagaaaaaaaaacacagaaaaaaaaaaagaaaaaaagaagaaaaaaaaaagaaagagaaaaggaacagaaaagagaagaagaaagagcaggacagagggaggagccaaaacaggcaagacaaaaaaaggcgagcagggacaaaaatatagcacacgcggaggcgagaacaaacacagagaagcagaggaataagaaagaggagaggagcgacgaaaagagacaaaacaaaaggaagaacaagaggggagaaaaaaaagaagagcaggaggaacaaacagaggtgggtaaaagaggaaagacaaaaagaggggggagaaaacagaagaacacat

SEQ ID NO: 284655 - DNA, 1869 bp, Homo sapiens
aggggcactctgcgataagatttcttttatttattcactgtagcaatagtgtcctgaattaactttctctccactattagcacatattccttttatacatagccctttataaaaatgaaaaaaaaaatcccttttaagctgctaagttcctttttcctcccagggtgccctgaaaaccttgaaggaattttaacgaacgatgttggaaagacaggcgagcctcagtcagatcagcagatgcgccaagaagaacctttgccggaacatccacaggacggcgctaaattgtccaggaaacagctggtgctgcggcgagggcttctgctcctgggggtcttcttaatcttgctggtggggattttagtgagattctatgtcagaattcagtgacgtggtaggaaagaaagtcaggtcaagtgatgcttttgagcttacacacaattcacaggcccaccagtgacaatttactgtgagttaatgtcattcaggtgtgcccatggattttgagggctggaaatgcaaagacacatttttctataaaaagaaaaagcaactaaggttaaaagctatattgtggcccaagacactgtctgaaagatgacatgagtagtaattcaccactatctgaaccaagcaaggatcaatgtgctgactgcattggccaatggctttgatacttctgctatttttttagacacaaacccataaactaactgcttaagaattcatactgcttgaattatgtaaaatatattttacagtatatctttccttgggccttagattactattcactgggcaaatggtatttgtttttgttttaattttttttttaatagacggaagtcttgctctgtcatgcaggctggagtgcggtggtgcgatcatagctcactgcagcctcgaactcttgggcttcaagcaatcctcctgtgtcagccaccagagtagctgagactacaggggtatgccaccatgcccagctggcatttgttaatcttcatttgaggtctagatctaggcactgtggacactgaaaaacagttgggaaatctttcgagctgtggaaatccaaacaaagactgataattcctggtaggggtgtgtgcgtgacgtactgcagcctcaacctcctgggctcaagtgatcctcccacctcagcctcctgagtagctgagaccacaggcgtgtgccaccacgcctagctaattttttataccagggtctaccctttgtttcccaggctggtcttgaattcctgggatcaagcaatccttccaccttgccctcccaaagtgttgggattataggcatgagccaccacgactggccagaggacaaaattttaataaaggtcttagcttaagcagtaatcctacttcattaagccttcctggggtgcggtacacaccgttaattcagcaaccctcagtacatactaagtatgctcagtgctgtgaaagtggattacaccaaattaagtcattcttatcacacccaatcaaaagtcaagaagccagggataaaagcacctcaggcacataacattaatctagtaatgtaattctctgcacatccagctggtgaaactgcgtgctgtaagctgggaccagctttgtccataactgctgagagaacttgctgaagctctaggaataattttgcctgcccggttgctcaccagttgtagcttgccagctcccaacacccttcctggtgccaataaactttctcaaagagcaatactgacatttcttttgataaaacctccagccttctctgtgttgttccgacataccgaggaccaactggtctacatggatgccctgaacatgcaattctttcttccaaaataaaacattaaataga

SEQ ID NO: 284656 - DNA, 1915 bp, Homo sapiens
ggatgaacacgtgtcacgctggccatctcaatggagtttattaccaaggtggcacttactcaaaagcatctactcctaatggttatgataatggcattatttgggccacttggaaaacccggtggtattccatgaagaaaaccactatgaagataatcccattcaacagactcacaattggagaaggacagcaacaccacctggggggagccaaacaggctggagacgtttaaaagacacgtttgatgttggaaagacaggcgagcctcagtcagatcagcagatgcgccaagaagaacctttgccggaacatccacaggacggcgctaaattgtccaggaaacagctggtgctgcggcgagggcttctgctcctgggggtcttcttaatcttgctggtggggattttagtgagattctatgtcagaattcagtgacgtggtaggaaagaaagtcaggtcaagtgatgcttttgagcttacacacaattcacaggcccaccagtgacaatttactgtgagttaatgtcattcaggtgtgcccatggattttgagggctggaaatgcaaagacacatttttctataaaaagaaaaagcaactaaggttaaaagctatattgtggcccaagacactgtctgaaagatgacatgagtagtaattcaccactatctgaaccaagcaaggatcaatgtgctgactgcattggccaatggctttgatacttctgctatttttttagacacaaacccataaactaactgcttaagaattcatactgcttgaattatgtaaaatatattttacagtatatctttccttgggccttagattactattcactgggcaaatggtatttgtttttgttttaattttttttttaatagacggaagtcttgctctgtcatgcaggctggagtgcggtggtgcgatcatagctcactgcagcctcgaactcttgggcttcaagcaatcctcctgtgtcagccaccagagtagctgagactacaggggtatgccaccatgcccagctggcatttgttaatcttcatttgaggtctagatctaggcactgtggacactgaaaaacagttgggaaatctttcgagctgtggaaatccaaacaaagactgataattcctggtaggggtgtgtgcgtgacgtactgcagcctcaacctcctgggctcaagtgatcctcccacctcagcctcctgagtagctgagaccacaggcgtgtgccaccacgcctagctaattttttataccagggtctaccctttgtttcccaggctggtcttgaattcctgggatcaagcaatccttccaccttgccctcccaaagtgttgggattataggcatgagccaccacgactggccagaggacaaaattttaataaaggtcttagcttaagcagtaatcctacttcattaagccttcctggggtgcggtacacaccgttaattcagcaaccctcagtacatactaagtatgctcagtgctgtgaaagtggattacaccaaattaagtcattcttatcacacccaatcaaaagtcaagaagccagggataaaagcacctcaggcacataacattaatctagtaatgtaattctctgcacatccagctggtgaaactgcgtgctgtaagctgggaccagctttgtccataactgctgagagaacttgctgaagctctaggaataattttgcctgcccggttgctcaccagttgtagcttgccagctcccaacacccttcctggtgccaataaactttctcaaagagcaatactgacatttcttttgataaaacctccagccttctctgtgttgttccgacataccgaggaccaactggtctacatggatgccctgaacatgcaattctttcttccaaaataaaacattaaataga

SEQ ID NO: 284657 - DNA, 1794 bp, Homo sapiens
  misc_feature (1013)..(1013): n is a, c, g, or t
cactgccggcctgcgcggtactcactgccggcctccgcggtacccactgccggcctccgcgctacccggccgcagcgcgcgagtcacatggaagctcctgaggagcccgcgccagtgcgcggaggcccggaggccacccttgaggtccgtgggtcgcgctgcttgcggctgtccgccttccgagaagagctgcgggcgctcttggtcctggctggccccgcgttcttggttcagctgatggtgttcctgatcagcttcataagctccgtgttctgtggccacctgggcaagctggagctggatgcagtcacgctggcaatcgcggttatcaatgtcactggtgtctcagtgggattcggcttatcttctgcctgtgacaccctcatctcccagacgtacgggagccagaacctgaagcacgtgggcgtgatcctgcagcggagtgcgctcgtcctgctcctctgctgcttcccctgctgggcgctctttctcaacacccagcacatcctgctgctcttcaggcaggacccagatgtgtccaggcttacccagacctatgtcacgatcttcattccagctcttcctgcaacctttctttatatgttacaagttaaatatttgctcaaccagggaattgtactgccccagatcgtaactggagttgcagccaaccttgtcaatgccctcgccaactatctgtttctccatcaactgcatcttggggtgataggctctgcactggcaaacttgatttcccagtacaccctggctctactcctctttctctacatcctcgggaaaaaactgcatcaagctacatggggaggctggtccctcgagtgcctgcaggactgggcctccttcctccgcctggccatccccagcatgctcatgctgtgcatggagtggtgggcctatgaggtcgggagcttcctcagtggcatcctcggcatggtggagctgggcgctcagtccatcgtgtatgaactggccatcattgtgtacatggtccntgcaggcttcagtgtggctgccagtgtccgggtaggaaacgctctgggtgctggagacatggagcaggcacggaagtcctctaccgtttccctgctgattacagtgctctttgctgtagccttcagtgtcctgctgttaagctgtaaggatcacgtggggtacatttttactaccgaccgagacatcattaatctggtggctcaggtggttccaatttatgctgtttcccacctctttgaagctcttgcttgcacgagtggtggtgttctgagggggagtggaaatcagaaggttggagccattgtgaataccattgggtactatgtggttggcctccccatcgggatcgcgctgatgtttgcaaccacacttggagtgatggagcagtgccccatgtgctcaccaagcagcatggctggatccttggagggcaatgggtggccagtgcccttctcatcaccctcatcgcactccgcagcctccacctccctccttgtgcagccttagctctgtgcccccacagagctccccacaaggccatacacgtggtcggtgtgaacagcacagaaggaagggggcggacttgagcaccttcccacatttggaagaaaaaacttaatccacagcatctgaaattaccagagctaatctttttaaaaagtacggaaataaatgactgcccagctttgatttctaaaataataatttggaacatattggcagttaataaatgatgatatgaaaacctggacatttatctttggggtgagtagtgactga

SEQ ID NO: 284658 - DNA, 1555 bp, Homo sapiens
cactgccggcctgcgcggtactcactgccggcctccgcggtacccactgccggcctccgcgctacccggccgcagcgcgcgagtcacatggaagctcctgaggagcccgcgccagtgcgcggaggcccggaggccacccttgaggtccgtgggtcgcgctgcttgcggctgtccgccttccgagaagagctgcgggcgctcttggtcctggctggccccgcgttcttggttcagctgatggtgttcctgatcagcttcataagctccgtgttctgtggccacctgggcaagctggagctggatgcagtcacgctggcaatcgcggttatcaatgtcactggtgtctcagtgggattcggcttatcttctgcctgtgacaccctcatctcccagacgtacgggagccagaacctgaagcacgtgggcgtgatcctgcagcggagtgcgctcgtcctgctcctctgctgcttcccctgctgggcgctctttctcaacacccagcacatcctgctgctcttcaggcaggacccagatgtgtccaggcttacccagacctatgtcacgatcttcattccagctcttcctgcaacctttctttatatgttacaagttaaatatttgctcaaccagggaattgtactgccccagatcgtaactggagttgcagccaaccttgtcaatgccctcgccaactatctgtttctccatcaactgcatcttggggtgataggctctgcactggcaaacttgatttcccagtacaccctggctctactcctctttctctacatcctcgggaaggcctccttcctccgcctggccatccccagcatgctcatgctgtgcatggagtggtgggcctatgaggtcgggagcttcctcagtggcatcctcggcatggtggagctgggcgctcagtccatcgtgtatgaactggccatcattgtgtacatgagacatcattaatctggtggctcaggtggttccaatttatgctgtttcccacctctttgaagctcttgcttgcacgagtggtggtgttctgagggggagtggaaatcagaaggttggagccattgtgaataccattgggtactatgtggttggcctccccatcgggatcgcgctgatgtttgcaaccacacttggagtgatggagcagtgccccatgtgctcaccaagcagcatggctggatccttggagggcaatgggtggccagtgcccttctcatcaccctcatcgcactccgcagcctccacctccctccttgtgcagccttagctctgtgcccccacagagctccccacaaggccatacacgtggtcggtgtgaacagcacagaaggaagggggcggacttgagcaccttcccacatttggaagaaaaaacttaatccacagcatctgaaattaccagagctaatctttttaaaaagtacggaaataaatgactgcccagctttgatttctaaaataataatttggaacatattggcagttaataaatgatgatatgaaaacctggacatttatctttggggtgagtagtgactga

SEQ ID NO: 284659 - DNA, 849 bp, Homo sapiens
cggcctgcgcggtactcactgccggcctccgcggtacccactgccggcctccgcgctacccggccgcagcgcgcgagtcacatggaagctcctgaggagcccgcgccagtgcgcggaggcccggaggccacccttgaggtccgtgggtcgcgctgcttgcggctgtccgccttccgagaagagctgcgggcgctcttggtcctggctggccccgcggtgagtaaggtggcctcagtggcaggccggtaccggcgggctggggacctggtgatttctgcctccgcgggtgactttggcgggctttggggaccgagcgagctgtccgccggcgggctccggggagcatcgtgccaggagccgggcgggcaccccagctcctctgcctgcgtcccggccgctttccgctccgcaccacccgactgggggccccgcggggcactgcgggaacggctggtacgcgcccgggcgcatgttggctcggagaggccggcggctccagcctcctgcgccaggagacaccggagagctgggacctttgcccctaacggggctctaccaggtccaggctgcatttgcatccgggggtgccttctctgggagctgattccggccaataaaacgcaagttgcctgaacttcaaaacacaagggaacttgtttctttgaaaagtagcggtcaaaagttcgggagctctgcgatctaaataatcccgaggcacggaggagggggtgcgtggtctgtcgtggactcagagctgcgaaatgatttcttcagaattcagtcaacctctaccgaggaaaccagaggcatcctgtaccaccccctccccgccagtaattatgtatgtga

SEQ ID NO: 284660 - DNA, 1942 bp, Homo sapiens
ggcagtcggtgggcgcggcggctgctggaggctagcgcgacccgactcttaagttttcttttcctctccagaggggccgattagggagagagaccaggaatgagtggaatgctatcttaagccaaaaaaaactattataatttttatttagtactacttaaatgaagagagataaaaaaagaaacaaaattccaattgataattatcccattcagacattagtgaatatgtcactcaatccaagtcgaccttcctcatcagagttggtggaacttcatgttttttatgtccctgaaggatcatggaactataagctaaataccatttcaacagaagttgttaacaaattcatttcagctggatttctaagagtatctcctcaacttactttacgagccctgagggagcgtcttggtgagttcctgggtgaagatgctattgcagaaaaatttttatttctgaaatgcattggaaataatttagctgtggtgaaggaaaagcaagaatcagaactgaaactcaaatcatttgctcctccatatgctcctcaaccagaattatatttgcttcctgtaatggaccatttaggaaatgtttattcaccatcaacagttattttagatgagcggcagactaataatggtgttaatgaggctgatggaacaatccacagaccaattagtgtaactttgttcaaggaggaacttggaagagatcccagtttgttagaaaacactttgaaagagcttcctaacaagaatcaggaagaagctgggggaaaagccactgcagaaaaaagccaaattgcaaaaaatcaaattggaaattctgagttgccaggatcattggaagattcaaataatgattgctttggcactaaaaaaagtgtctttgggaaaatgaagatgatacagctatcagtagaagacaggacaatcagacagctgaaaaagagtacatcaccctaccagatcacccttcacttccttgtcaacctgttctttcttcaggaataactgatatatctttattacaaactgaaagagagaagattatcaaacaaatgaaacaagtaaaggaagaaagaaggtatctggaaagaaatagagaagaaccagtaaaaacggttgaaaagctatttgaacaaagcaaattaaaacgatatcatgcctacaatggttggaagaaaaaatacttggaaacaaagaaagtcacagcatcaatggaggaggttttaacaaaacttcgagaagatttggaactctactataaaaaactgctcatgcaacttgaagccagggagatcaagatgagaccaaagaatctggcaaacatcacagactccaagaattacctaataatccagatcactgaggtacagcatgcaattgaccagcttaagagaaaactagatactgacaaaatgaaactcatagtagaagttaagatgagaaaacaagcagtttcagatttacgaacattgaaaactgaactggcacagaaaaaaaaaataatacatctctacaatctcaattagttgctagaagtgtgcctggctaggaggtctacagaagattttgtttatgatgaatcagccaagtcaaaagggagcattggctgctgcaatacattctgaccagatctgactttgttcatcataagacatcacaaagaggaagtcacaagcatctgcaattccagtataattatagcatcttctgtctatgttctttggagaccaagctacatcaaaggttacctgtggaaaaaaatcttactattttatgtaatatgatcacgtgtgcatattacgtcagatttttaaaattatatatattttttaccttatactacacaaggaaaaggaactgcttacagtatatgaatgtagggtttgacacacatagaacttgaaccattctaagaaatattttttgcttac

SEQ ID NO: 284661 - DNA, 1717 bp, Homo sapiens
ggcagtcggtgggcgcggcggctgctggaggctagcgcgacccgactcttaagttttcttttcctctccagaggggccgattagggagagagaccaggaatgagtggaatgctatcttaagccaaaaaaaactattataatttttatttagtactacttaaatgaagagagataaaaaaagaaacaaaattccaattgataattatcccattcagacattagtgaatatgtcactcaatccaagtcgaccttcctcatcagagttggtggaacttcatgttttttatgtccctgaaggatcatggaactataagctaaataccatttcaacagaagttgttaacaaattcatttcagctggatttctaagagtatctcctcaacttactttacgagccctgagggagcgtcttggtgagttcctgggtgaagatgctattgcagaaaaatttttatttctgaaatgcattggaaataatttagctgtggtgaaggaaaagcaagaatcagaactgaaactcaaatcatttgctcctccatatgctcctcaaccagaattatatttgcttcctgtaatggaccatttaggaaatgtttattcaccatcaacagttattttagatgagcggcagactaataatggtgttaatgaggctgatggaacaatccacagaccaattagtgtaactttgttcaaggaggaacttggaagagatcccagtttgttagaaaacactttgaaagagcttcctaacaagaatcaggaagaagctgggggaaaagccactgcagaaaaaagccaaattgcaaaaaatcaaattggaaattctgagttgccaggatcattggaagattcaaataatgattgctttggcactaaaaaaagtgtctttgggaaaatgaagatgatacagctatcagtagaagacaggacaatcagacagctgaaaaagagtacatcaccctaccagatcacccttcacttccttgtcaacctgttctttcttcaggaataactgatatatctttattacaaactgaaacctacaatggttggaagaaaaaatacttggaaacaaagaaagtcacagcatcaatggaggaggttttaacaaaacttcgagaagatttggaactctactataaaaaactgctcatgcaacttgaagccagggagatcaagatgagaccaaagaatctggcaaacatcacagactccaagatgagaaaacaagcagtttcagatttacgaacattgaaaactgaactggcacagaaaaaaaaaataatacatctctacaatctcaattagttgctagaagtgtgcctggctaggaggtctacagaagattttgtttatgatgaatcagccaagtcaaaagggagcattggctgctgcaatacattctgaccagatctgactttgttcatcataagacatcacaaagaggaagtcacaagcatctgcaattccagtataattatagcatcttctgtctatgttctttggagaccaagctacatcaaaggttacctgtggaaaaaaatcttactattttatgtaatatgatcacgtgtgcatattacgtcagatttttaaaattatatatattttttaccttatactacacaaggaaaaggaactgcttacagtatatgaatgtagggtttgacacacatagaacttgaaccattctaagaaatattttttgcttac

SEQ ID NO: 284662 - DNA, 860 bp, Homo sapiens
ggcagtcggtgggcgcggcggctgctggaggctagcgcgacccgactcttaagttttcttttcctctccagaggggccgattagggagagagaccaggaatgagtggaatgctatcttaagccaaaaaaaactattataatttttatttagtactacttaaatgaagagagataaaaaaagaaacaaaattccaattgataattatcccattcagacattagtgaatatgtcactcaatccaagtcgaccttcctcatcagagttggtggaacttcatgttttttatgtccctgaaggatcatggaactataagctaaataccatttcaacagaagttgttaacaaattcatttcagctggatttctaagagtatctcctcaacttactttacgagccctgagggagcgtcttggtgagttcctgggtgaagatgctattgcagaaaaatttttatttctgaaatgcattggaaataatttagctgtggtgaaggaaaagcaagaatcagaactgaaactcaaatcatttgctcctccatatgctcctcaaccagaattatatttgcttcctgtaatggaccatttaggaaatgtttattcaccatcaacagttattttagatgagcggcagactaataatggtgttaatgaggctgatggaacaatccacagaccaattagtgtaactttgttcaaggaggaacttggaagagatcccagtttgttagaaaacactttgaaagagcttcctaacaagaatcaggaagaagaaatgaagacacatacagactcttaaagcctcttatattaaaatataaacatttcatattaataaatatagatctgtgtcattatagaa

SEQ ID NO: 284663 - DNA, 565 bp, Homo sapiens
aaatactagtatctgattctgtaaaatttttgaaaaaaaaataagagactaatacacttagaagagtgcttgccacagagtaaacactatatttctgaaatatctattccgttcctaagggctaggaattaagggttttttttgtattttgttttcttgttgttttcactattttctttacacattgagaacaacaggttttgaagtttaagcaaaacataaaattctttctcactctagtttttagaacagttcaattgtattgtccctatctactcataaacaaggttaccttatagcatatctcaccagtagataagcatgcttattaaacagcattcataatctacacatttactgtagtaatccagtgggagttgaaagcactgaagccaaatgagagaagacagttaaagcggttacaaaaaccctgtttacatgacaactatgatgtacttttagaagggtatgatgaagttcatttttgaaaagtaattctttttatagatgagaaaacaagcagtttcagatttacgaacattgaaaactgaactggcacagaaaa

SEQ ID NO: 284664 - DNA, 691 bp, Homo sapiens
tggaaataatacacaaatgaagcctgatttatttaaagactggcattttcacctggaatgattgttcacgttttttattattgaggcatcaaagcccaggaagaaatgtatatgatataacagttttcatcattctatagccattttaactagccaagaggctaactaaaactttaggcatgcttagaatttgtagttgatactaaccaagtatcataaattctgcctttctacttccaaatgtgtatttctacttcatgtaaaatgctatatatttaaccttaatttttgaccaagaaaagatgaattatttagaatagtaaaatatgtcctggtcacaagtccattataatgtaatttgtcatgttacttagttgtatagatttatgctcattttattacacagtcctatttactagtaatatgtccttttgagttagaataataaagattgtatatatgtctaagttttcatttgtagtttatttaatgcttttgtgttttcctttttatttcttgaacaaatcagagaccaggaatgagtggaatgctatcttaagccaaaaaaaactattataatttttatttagtactacttaaatgaagagagataaaaaaagaaacaaaattccaattgataattatcccattcagacattagtgaatatgtcactcaatccaagtcgacctt

SEQ ID NO: 284665 - DNA, 418 bp, Homo sapiens
taaattttaagtttgaagtacttgtttataatgtccaagtaatagaatacagagaccagaacatgggagagaatctgcagctataaatacaaaatttggagttcatcaccactaagtaaaaagaatgcatttctggtttgcattatcaaatacctacgggcaagtgaaaaaagaatgtgacagtgtagccgatcttactcattttcacgtttgcttacagacagctgaaaaagagtacatcaccctaccagatcacccttcacttccttgtcaacctgttctttcttcaggaataactgatatatctttattacaaactgaaagtaagtatagtgcaatcgtaagtacagatgattctgtgaggtaaagtaaataatgttaatggggagttactgtttaatgggtatagagtttcagt

SEQ ID NO: 284666 - DNA, 621 bp, Homo sapiens
cctacaatggttggaagaaaaaatacttggaaacaaagaaagtcacagcatcaatggaggaggttttaacaaaacttcgagaagatttggaactctactataaaaaactgctcatgcaacttgaagccagggagatcaagatgagaccaaagaatctggcaaacatcacagactccaaggtattactaaatgtatcccccttccgttagagaagttctgttcaaaacacatgctttataagtgctagtagtatcacaagatgcattaggctaactttgacttaaacttgcttaaaacaataaaaaaactcatgaccttatgtaataggaggagcattgctgaggagatacagtcagcagcttaatgttgcctttaaggggtctgatattttcttcctattattttcagtgttaatttcattgtaagactgcttctaatagtagcaatagagtggtcaagggcaagtagggctttatatccccaaacagggagaaacctctctctgaatcatggaatatataaatctttccctttatcctaggtaagggatcaactaggcctacccctggatgagaaatagttgccaaggaatgctatatgctgactgacttacagactaat

SEQ ID NO: 284667 - DNA, 1158 bp, Homo sapiens
cgcaagctttgaaaggcgccgtcaagtcaaataaataaatgccctacaacaccaacccaggactgagatctgcatgctggaatgacggtggtggtggtggctttcagtattccccaggttttgtccggagcaccggcacgccctctcttgaagtccgctctccgcacagtggttagacgggaagatccggagctgtccagtgtcttgggtaatgcacggcatcgcctgatgtctgacgctagaacaccacgtaaagtcaagcagagggaagtgaatgcgccctaggcccctgcaggccaccaagaagagctagagggagttggtgcaatcctagagatgccggcaggtgcaccaatctgtggcacacgtacgctctccaatggaagacaactcaagaccacaccaagtttgtattaaaaaagtactgttgtgttactttttaccaacctccaatcattatacaaaatgttaaaaaatacacaaacacacacacacactcacagccatagaggttatcgcaaaagatcaacccagaatctttcagaatatgacagatgcactgagaaggcagataaattgattcaatatacaaaaggcctctttcctatggaatttcattagattaaataaggtgttccctcctcacagcctcatccttatgagcaatcatataaataatctatttaaagtccttgaactataacttgtataatttttagttttccccctttgaaggggcctaagagaaaggtttgagaaaccagctcttgaggggggcaggggtgaggggtaagaggtcctgtgcctttcattcatcctgggagcttctcaggattgcagcatttccacctgagtgttcattcttgtacattttctcatctttctcctgggttcctaggatcttggagattacctagtccaatccttttacttcagaaacaaaaaacctgaggctcagaaaggctaagtcaaatgcctagggtcacacagggaaactgtgggagttggatccctgagtcccagtccttaaactggttgctacatgacattctagaacctctccccaccaactccctttttaaagacagggtctggttctgtcacccaggctgaagtgcagtgacatgatcttgggcgacagaacgagactctgtctca

SEQ ID NO: 284668 - DNA, 712 bp, Homo sapiens
ctgtgcatgtaatgaaatcacctaataatgcatttctccaagcatatccgtgtcattaagtgacatatcttttgtgtgaataatactagattatgtagatatactgtgtttaagcattcatcagctgatgtttggatttttctcacttcttggctattatgaataaatgcttattgaagagttttgaaataaagatgatgaaaagaaggtaaagtatccagaattgttgcttttgtttttttttttgagacacagtctcactctgttgcccaggctggagtgcagtggcgcgttcttggctcactgcaatctccacctcctgggttcaagtgattctcgtatctcagcctcccgagtagctgggatcacaggcatgtgccaccacactcagctaattttttatttttagtgcagacggtgtttcaccatgttggccaggctgctgtcaaactcctggcctcaagcagtccacccgcgtcagcctcccagagtgctgggattacaggcatgagccactgcgcctggccgagaactgcttttcttaatgtttaattacagttaagcaaaaatctaaagggcgattatgccattaatgaaatatccaaagtagtagtgttcttacttaactttatttcatgaggttagcatctaagcccaaattgttaaaagtagaattttggctaaaattccataatttggttgtgttttgcag

SEQ ID NO: 284669 - DNA, 1921 bp, Homo sapiens
agggccaggaagcgcggaaggaaccgccgggggccatggacggagcagtgatggaagggccgctttttttgcagagtcagcgctttgggaccaagaggtggaggaagacctgggccgtgctctacccggccagtccccacggcgtagcgcggctcgagttctttgaccataaggggtcgagctctgggggtggccgagggagctcgcgccgcctggactgcaaagtgatccgtctggctgagtgtgtgagtgtggcccccgtcaccgtggagaccccccctgagcccggcgccactgccttccgcctggacactgctcagcgctcgcacctgctggcggccgacgcgccgtccagtgcagcctgggtgcagacgctgtgccgaaacgcctttccgaaaggcagctggactctggcgcctaccgataacccacctaagctttctgccctggagatgctggagaactccttgtacagccctacctgggaaggatcccaattctgggtaacggtgcagaggactgaggccgccgagcgctgtggcctgcatggctcctacgtgctgagggtggaggctgaaaggctgactctcctgaccgtgggggcccagagtcagatactggagccactcctgtcctggccctacactctgttgcgtcgctatggccgggacaaggtcatgttctctttcgaggccggccgccgctgcccctcaggccctggaaccttcaccttccagacggcacagggaaatgacatcttccaggcagttgagactgccatccaccggcagaaggcccagggaaaggccggacaggggcacgatgttctcagagctgactcccatgaaggggaggtggcagaggggaagttgccttccccacctggcccccaagagctcctcgacagtcccccagccctgtatgctgagcccttagactccctgcgcattgctccatgcccttcccaggactccctatactcagaccccttggacagcacgtctgctcaggcaggagagggagtacaacggaagaaacctctctattgggacttgtatgagcatgcgcagcagcagttgctgaaggccaagctgacagaccccaaagaggatcccatctatgatgaacctgagggcctggccccagtccctccccagggcctttatgatctgcctcgggagcccaaggatgcatggtggtgccaagctcgggtgaaggaggagggctatgagctcccctacaaccctgccactgatgactacgctgtgccaccccctcggagcacaaagcccctccttgctcccaagccccagggcccagccttccctgaacctggtactgcaactggcagtggcatcaaaagccacaactcagccctgtacagccaggtccagaagagcggggcctcagggagctgggactgtgggctctctagagtagggactgacaagactggggtcaagtcagagggctctacctgagaaggacggcaaggctgaggtggctaagggggaccatggggaggtggcactagggatcaaagaagatggttagaaccagcagaagccagagggtgggaggggccatgctgtgtgagaccaggggaccagagggatgggagagtcaagggaaggacaatcccaggaagtcctaagaagtggggcagatggcagggctgaggatgggctctgcatcccccaaagccatcccttccctacttccccaaatgaagggacggctgtgggaccaggtctgtggaaagtggtgcatggtcagaatgggtgcagtttgaggggcctgtgtggaggcctcagggagatgttggactgtgcctggatccttactcctgcattgttctttgccagagacctatttaaaaattttaaaattctcattaaagtcagcttgggtttaagaagtt

SEQ ID NO: 284670 - DNA, 2001 bp, Homo sapiens
cggccgcgtccttactgaactcggaaatcgctggccggcagcgccagcgctggaatcgcccccgcgcctgggagtggcctcgcgaggccggcgcgcgccccggggccgaggaatccgcctgcccgcccaggcgtcggccacgagagagcgggagcctcgctggtccccatttcagaggtggaggaagacctgggccgtgctctacccggccagtccccacggcgtagcgcggctcgagttctttgaccataaggggtcgagctctgggggtggccgagggagctcgcgccgcctggactgcaaagtgatccgtctggctgagtgtgtgagtgtggcccccgtcaccgtggagaccccccctgagcccggcgccactgccttccgcctggacactgctcagcgctcgcacctgctggcggccgacgcgccgtccagtgcagcctgggtgcagacgctgtgccgaaacgcctttccgaaaggcagctggactctggcgcctaccgataacccacctaagctttctgccctggagatgctggagaactccttgtacagccctacctgggaaggatcccaattctgggtaacggtgcagaggactgaggccgccgagcgctgtggcctgcatggctcctacgtgctgagggtggaggctgaaaggctgactctcctgaccgtgggggcccagagtcagatactggagccactcctgtcctggccctacactctgttgcgtcgctatggccgggacaaggtcatgttctctttcgaggccggccgccgctgcccctcaggccctggaaccttcaccttccagacggcacagggaaatgacatcttccaggcagttgagactgccatccaccggcagaaggcccagggaaaggccggacaggggcacgatgttctcagagctgactcccatgaaggggaggtggcagaggggaagttgccttccccacctggcccccaagagctcctcgacagtcccccagccctgtatgctgagcccttagactccctgcgcattgctccatgcccttcccaggactccctatactcagaccccttggacagcacgtctgctcaggcaggagagggagtacaacggaagaaacctctctattgggacttgtatgagcatgcgcagcagcagttgctgaaggccaagctgacagaccccaaagaggatcccatctatgatgaacctgagggcctggccccagtccctccccagggcctttatgatctgcctcgggagcccaaggatgcatggtggtgccaagctcgggtgaaggaggagggctatgagctcccctacaaccctgccactgatgactacgctgtgccaccccctcggagcacaaagcccctccttgctcccaagccccagggcccagccttccctgaacctggtactgcaactggcagtggcatcaaaagccacaactcagccctgtacagccaggtccagaagagcggggcctcagggagctgggactgtgggctctctagagtagggactgacaagactggggtcaagtcagagggctctacctgagaaggacggcaaggctgaggtggctaagggggaccatggggaggtggcactagggatcaaagaagatggttagaaccagcagaagccagagggtgggaggggccatgctgtgtgagaccaggggaccagagggatgggagagtcaagggaaggacaatcccaggaagtcctaagaagtggggcagatggcagggctgaggatgggctctgcatcccccaaagccatcccttccctacttccccaaatgaagggacggctgtgggaccaggtctgtggaaagtggtgcatggtcagaatgggtgcagtttgaggggcctgtgtggaggcctcagggagatgttggactgtgcctggatccttactcctgcattgttctttgccagagacctatttaaaaattttaaaattctcattaaagtcagcttgggtttaagaagtt

SEQ ID NO: 284671 - DNA, 1736 bp, Homo sapiens
agggccaggaagcgcggaaggaaccgccgggggccatggacggagcagtgatggaagggccgctttttttgcagagtcagcgctttgggaccaagaggtggaggaagacctgggccgtgctctacccggccagtccccacggcgtagcgcggctcgagttctttgaccataaggggtcgagctctgggggtggccgagggagctcgcgccgcctggactgcaaagtgatccgtctggctgagtgtgtgagtgtggcccccgtcaccgtggagaccccccctgagcccggcgccactgccttccgcctggacactgctcagcgctcgcacctgctggcggccgacgcgccgtccagtgcagcctgggtgcagacgctgtgccgaaacgcctttccgaaaggcagctggactctggcgcctaccgataacccacctaagctttctgccctggagatgctggagaactccttgtacagccctacctgggaaggtcatgttctctttcgaggccggccgccgctgcccctcaggccctggaaccttcaccttccagacggcacagggaaatgacatcttccaggcagttgagactgccatccaccggcagaaggcccagggaaaggccggacaggggcacgatgttctcagagctgactcccatgaaggggaggtggcagaggggaagttgccttccccacctggcccccaagagctcctcgacagtcccccagccctgtatgctgagcccttagactccctgcgcattgctccatgcccttcccaggactccctatactcagaccccttggacagcacgtctgctcaggcaggagagggagtacaacggaagaaacctctctattgggacttgtatgagcatgcgcagcagcagttgctgaaggccaagctgacagaccccaaagaggatcccatctatgatgaacctgagggcctggccccagtccctccccagggcctttatgatctgcctcgggagcccaaggatgcatggtggtgccaagctcgggtgaaggaggagggctatgagctcccctacaaccctgccactgatgactacgctgtgccaccccctcggagcacaaagcccctccttgctcccaagccccagggcccagccttccctgaacctggtactgcaactggcagtggcatcaaaagccacaactcagccctgtacagccaggtccagaagagcggggcctcagggagctgggactgtgggctctctagagtagggactgacaagactggggtcaagtcagagggctctacctgagaaggacggcaaggctgaggtggctaagggggaccatggggaggtggcactagggatcaaagaagatggttagaaccagcagaagccagagggtgggaggggccatgctgtgtgagaccaggggaccagagggatgggagagtcaagggaaggacaatcccaggaagtcctaagaagtggggcagatggcagggctgaggatgggctctgcatcccccaaagccatcccttccctacttccccaaatgaagggacggctgtgggaccaggtctgtggaaagtggtgcatggtcagaatgggtgcagtttgaggggcctgtgtggaggcctcagggagatgttggactgtgcctggatccttactcctgcattgttctttgccagagacctatttaaaaattttaaaattctcattaaagtcagcttgggtttaagaagtt

SEQ ID NO: 284672 - DNA, 524 bp, Homo sapiens
cggccgcgtccttactgaactcggaaatcgctggccggcagcgccagcgctggaatcgcccccgcgcctgggagtggcctcgcgaggccggcgcgcgccccggggccgaggaatccgcctgcccgcccaggcgtcggccacgagagagcgggagcctcgctggtccccatttcaggtgatgctctacctgggggcggggccacaagcagggaaagaatcccagtggcacctttcatgtgtcccgccgcccttaaggaaccctgcttggtgtgcctgctgtaaacccagtggcgggatgggcccgaggcggcgctgagagagcggccacgatggccgcagtccgcggtgtggactctcttgcagccagcagcgcgtgggatgtgctgtgctcccagagaggattcagggcactaggaaggaggccctccctgtgcctggagcaggagggagcacttcaaaaaggaaatggctttgaaggaggagaaagtcagaaggaagatgtctcaggaaagcaggaacatttg

SEQ ID NO: 284673 - DNA, 1827 bp, Homo sapiens
agggccaggaagcgcggaaggaaccgccgggggccatggacggagcagtgatggaagggccgctttttttgcagagtcagcgctttgggaccaagaggtggaggaagacctgggccgtgctctacccggccagtccccacggcgtagcgcggctcgagttctttgaccataaggggtcgagctctgggggtggccgagggagctcgcgccgcctggactgcaaagtgatccgtctggctgagtgtgtgagtgtggcccccgtcaccgtggagaccccccctgagcccggcgccactgccttccgcctggacactgctcagcgctcgcacctgctggcggccgacgcgccgtccagtgcagcctgggtgcagacgctgtgccgaaacgcctttccggatcccaattctgggtaacggtgcagaggactgaggccgccgagcgctgtggcctgcatggctcctacgtgctgagggtggaggctgaaaggctgactctcctgaccgtgggggcccagagtcagatactggagccactcctgtcctggccctacactctgttgcgtcgctatggccgggacaaggtcatgttctctttcgaggccggccgccgctgcccctcaggccctggaaccttcaccttccagacggcacagggaaatgacatcttccaggcagttgagactgccatccaccggcagaaggcccagggaaaggccggacaggggcacgatgttctcagagctgactcccatgaaggggaggtggcagaggggaagttgccttccccacctggcccccaagagctcctcgacagtcccccagccctgtatgctgagcccttagactccctgcgcattgctccatgcccttcccaggactccctatactcagaccccttggacagcacgtctgctcaggcaggagagggagtacaacggaagaaacctctctattgggacttgtatgagcatgcgcagcagcagttgctgaaggccaagctgacagaccccaaagaggatcccatctatgatgaacctgagggcctggccccagtccctccccagggcctttatgatctgcctcgggagcccaaggatgcatggtggtgccaagctcgggtgaaggaggagggctatgagctcccctacaaccctgccactgatgactacgctgtgccaccccctcggagcacaaagcccctccttgctcccaagccccagggcccagccttccctgaacctggtactgcaactggcagtggcatcaaaagccacaactcagccctgtacagccaggtccagaagagcggggcctcagggagctgggactgtgggctctctagagtagggactgacaagactggggtcaagtcagagggctctacctgagaaggacggcaaggctgaggtggctaagggggaccatggggaggtggcactagggatcaaagaagatggttagaaccagcagaagccagagggtgggaggggccatgctgtgtgagaccaggggaccagagggatgggagagtcaagggaaggacaatcccaggaagtcctaagaagtggggcagatggcagggctgaggatgggctctgcatcccccaaagccatcccttccctacttccccaaatgaagggacggctgtgggaccaggtctgtggaaagtggtgcatggtcagaatgggtgcagtttgaggggcctgtgtggaggcctcagggagatgttggactgtgcctggatccttactcctgcattgttctttgccagagacctatttaaaaattttaaaattctcattaaagtcagcttgggtttaagaagtt

SEQ ID NO: 284674 - DNA, 439 bp, Homo sapiens
ctttcttgcctacccggtgaccccgcgtctgttcgcaggtggtctcttctttgtagataccctaactagtgcaggcgtgtgactcacttcctctgatggctcctggtaatgtgtttccccctctaccctccttaggtcatgttctctttcgaggccggccgccgctgcccctcaggccctggaaccttcaccttccagacggcacagggaaatgacatcttccaggcagttgagactgccatccaccggcagaaggcccagggaaaggccggacaggggcacgatgttctcagagctgactcccatgaaggggaggtggcagaggggaagttgccttccccacctggcccccaagagctcctcgacagtcccccagccctgtatgctgagcccttagactccctgcgcattgctccatgcccttcccaggactccctat

SEQ ID NO: 284675 - DNA, 412 bp, Homo sapiens
ggctaagggggaccatggggaggtggcactagggatcaaagaagatggttagaaccagcagaagccagagggtgggaggggccatgctgtgtgagaccaggggaccagagggatgggagagtcaagggaaggacaatcccaggaagtcctaagaagtggggcagatggcagggctgaggatgggctctgcatcccccaaagccatcccttccctacttccccaaatgaagggacggctgtgggaccaggtctgtggaaagtggtgcatggtcagaatgggtgcagtttgaggggcctgtgtggaggcctcagggagatgttggactgtgcctggatccttactcctgcattgttctttgccagagacctatttaaaaattttaaaattctcattaaagtcagcttgggttta

SEQ ID NO: 284676 - DNA, 451 bp, Homo sapiens
catagaatattgagaacaggaaagatcagagatgggatgaaaactctgagattgtgaaccagaaagtcatcaagattacctaagagcatcacagattctagctttctcaaaacttgtgaaacacagttgaacattttcaagatttcttggccagtcgcaaatcctcaagcatccaggaaatgaaatgccagaaattcctatattataggaccaaaactgagctcacagactaccttttgaaccttgtactcagaacgacttaggcttctaagtcctgattcttcgtccagaaaacatcattactgaagaccatgcagagaaagtaaccctatagcttagaaaagggagaacatgagaaagcagccaagtgtcactactccatactttctcacaagtctgcagaaattgcttggaaaaataaatgtgcatttcataatgcagaaacctgatt

SEQ ID NO: 284677 - DNA, 697 bp, Homo sapiens
tttttgtgaagtttgggtcatagtacaacctgtgagcagtgaaaaaggaatcctgggcattttgtccctcttgacccgttctctaatctgatggtttggagatttgcagtttaaataaaaggcatagaggaaagtgggatgtgtttatagccctaacttagaatatgtcgattgtaatcatctgaagtatatcacagattggtgtggttaacatagtctctagattagtaaaatactagtttgagcctgagccacgtctgtctatcacctttaccttttactaatataggtagtctttgatgggttcatctgcctttcagattacctaagagcatcacagattctagctttctcaaaacttgtgaaacacagttgaacattttcaagatttcttggccagtcgcaaatcctcaagcatccaggaaatgaaatgccagaaattcctatattataggaccaaaactgagctcacagactaccttttgaaccttgtactcagaacgacttaggcttctaagtcctgattcttcgtccagaaaacatcattactgaagaccatgcagagaaagtaaccctatagcttagaaaagggagaacatgagaaagcagccaagtgtcactactccatactttctcacaagtctgcagaaattgcttggaaaaataaatgtgcatttcataatgcagaaacctgatt

SEQ ID NO: 284678 - DNA, 1411 bp, Homo sapiens
agagccatctttgcgaatttcttggggtgttaatgtaaacatatctttagaatatctcatcgggtttcagtcagagccatgctttgggtttttcctagcagcagtgatgatatcaacttacaaggtttggctttcaggatttcagaagctggcattcaagacaacaggcagtttgtcagagctgaatgagaatcagcctggacaaatcaagtgctttaacaagggcatcttcctctgggaataatcagtccttaatacagtttgcacttgacataatagttttggtaaatgtctttttctggctgcacccccttttaagtaagcctttaattttaaatggtctggaaagatcttcgatgctttctgtaaggtttagtcaccaagaagccagaacttttggtgaaaacagaatttataaaatgaaactgaaccttctcctttcttacaaaataaagatcctgtcagactccagtctcagaccacctttgcccatttgtaattcagacttgcagagtgaggagagaactgcttcagccttactgtcttgtagagagatttggtgaaaatcatgttactttagacccagtagttttcaggaccgcaacaggatgcggggcacctggcttcccgggtaaggtcacatagtctcttaaaattctgtcactaatttttttaaacgactttttttaaaaagccacctcctcatgcctgtccaaaatgaaccacgcaactggttacctttctctgcctaccttttgggctggggaagaggggcacctttctcatcactctcagggaagtcctgaggaactgtgcaagccaggaagcatgagtcgctgaattggtgatggaggggtgtccacttttttctagttcctcagctgcttctggagcagtgttcacaacgggaatgtttttactgtccttggtaggctacaggttcacagcttcaaatcaaggcctccaaggattttattctcttacatcacagttttgacaagtatgcttttaaaaaacaacatttgcaaaactggtctttaagcgacgtgagtcagaggtaacaaaggcatatatataccgaacaaaggtgctccggtgcagtggagagaacagtattagtgtcgcaagcacaggagtgcagacagccccgccttcatcgtgatgcctgcagcacaccacgattatcatgagaggtcaagattttgatttactaatttataatcttatttccaagcaaaacaagtcaatttcatgttacaacttttttcttgtttctttttatcttgtttggcctgagggttgggggatttgggggagttgtcagctgcacaatctttgaagtgtaagttaatttttatgtgatatttcagtatatattttattgattaaatttattggaaaacttaaaatt

SEQ ID NO: 284679 - DNA, 310 bp, Homo sapiens
aagatattctaggccccttgttgcttcagccatcagtctataaataacacaacactaattttccatcaagtaacagcttaaaacagaacactgtcaagattttgatttactaatttataatcttatttccaagcaaaacaagtcaatttcatgttacaacttttttcttgtttctttttatcttgtttggcctgagggttgggggatttgggggagttgtcagctgcacaatctttgaagtgtaagttaatttttatgtgatatttcagtatatattttattgattaaatttattggaaaacttaaaatt

SEQ ID NO: 284680 - DNA, 773 bp, Homo sapiens
ctcggtacccacctcctaccccacgctaatttttttaaacgactttttttaaaaagccacctcctcatgcctgtccaaaatgaaccacgcaactggttacctttctctgcctaccttttgggctggggaagaggggcacctttctcatcactctcagggaagtcctgaggaactgtgcaagccaggaagcatgagtcgctgaattggtgatggaggggtgtccacttttttctagttcctcagctgcttctggagcagtgttcacaacgggaatgtttttactgtccttggtaggctacaggttcacagcttcaaatcaaggcctccaaggattttattctcttacatcacagttttgacaagtatgcttttaaaaaacaacatttgcaaaactggtctttaagcgacgtgagtcagaggtaacaaaggcatatatataccgaacaaaggtgctccggtgcagtggagagaacagtattagtgtcgcaagcacaggagtgcagacagccccgccttcatcgtgatgcctgcagcacaccacgattatcatgagaggtcaagattttgatttactaatttataatcttatttccaagcaaaacaagtcaatttcatgttacaacttttttcttgtttctttttatcttgtttggcctgagggttgggggatttgggggagttgtcagctgcacaatctttgaagtgtaagttaatttttatgtgatatttcagtatatattttattgattaaatttattggaaaacttaaaatt

SEQ ID NO: 284681 - DNA, 787 bp, Homo sapiens
gctcttcggacatggtgtgcgagctgcttggggttcgggggatggacatcctgtacattggggaccacatttttggggacattctcaagtccaagaagcgtcagggctggcggacttgcctggtggttcctgagctgtcctgggagctggacatctgggcccaggagaaggagcggttggaggagctgaagagactggacacgcacctggcagacatataccagcacatggatgggagcagttgtgagctgcaagtcatcaacttcaccaagagagagatccagatgccacatgagtcagttgtggagcaagaacaggccaatctagaccctgcctcctgcctcctctcctgcaaccagaggtctcttccagcaaagagctgtttgtcttctgccatctaggattccaaggaagtgggacactccagtctaggctgttttggtggaaacaacctttgttcagtattgagtagtgcatttacttgtaataatacaaataagtcagctgatgacaatggctgaaagggccaggtcatggaaaccaagaagtgagaagcatttcaggggatgattcttttcttctttttcctatatgtcctggatgatttttactggtacagctagagaagatgaatttaaattcaaaaataatagtaccttctgtggttctgtttgagtcttgcaagatattaagaacaactttccgcaactcttgtattggctggaaggaaggaagaaaacatacaaaatcttataacactgagggggctacaatagaacttcttggc

SEQ ID NO: 284682 - DNA, 874 bp, Homo sapiens
ttaacttggtgtgagaacttttggctgatgaatacaagatacgctcattcattctcttcattgctatgaaatgagtttttccacaacctcctgcagaacctcaacacatcactaggtggcaacatccctacaccatatcggtttagaaaccacggttaggaggagcagcaaaacacgcggcatcccagtatgattcagaagtaaagtttacaatctttgaggcctggctgactcatggaacaactaggacaagaaacaaagacaaagaacacacacctgactggacagagataaaccaagagctgagagttttggaaacaaggctggagctgaggaaaaggactgggaacacgaacctgtacaaacaacaaattcttacaacagaaaacaagccactcctggccatcaagaaacccacaaatctcagaagcaaaagcaaaacaaatgaaaatacaaaccaaatagtctctattaccttcatgcctgttgggtcccaataaaggaatcattccaaaaaaaaataaaaatggcctgcttggctcaacggtggatctcttgggcctttccctttagggaggttatttatgatactagtcattaacttcctcctccgccggtcggttgggggagagtttagccactcaaggcggaatcggtattccatattccggatatcatgtaaaaatgtgaacacagcccccaaagcttaacctcataggccctttttgctttctcttggtccgcccctgacagttcaaaaatagtttcgtcacagtgttaaccccacgctttctatacggcgcttccctggattccctggccgtttcgtcccttccctacagtcccggccgtttctatgagaggggctctaaat

SEQ ID NO: 284683 - DNA, 512 bp, Homo sapiens
ttaacttggtgtgagaacttttggctgatgaatacaagatacgctcattcattctcttcattgctatgaaatgagtttttccacaacctcctgcagaacctcaacacatcactaggtggcaacatccctacaccatatcggtttagaaaccacggttaggaggagcagcaaaacacgcggcatcccagtatgattcagaagtaaagtttacaatctttgaggcctggctgactcatggaacaactaggacaagaaacaaagacaaagaacacacacctgactggacagagataaaccaagagctgagagttttggaaacaaggctggagctgaggaaaaggactgggaacacgaacctgtacaaacaacaaattcttacaacagaaaacaagccactcctggccatcaagaaacccacaaatctcagaagcaaaagcaaaacaaatgaaaatacaaaccaaatagtctctattaccttcatgcctgttgggtcccaataaaggaatcattcc

SEQ ID NO: 284684 - DNA, 773 bp, Homo sapiens
ttaacttggtgtgagaacttttggctgatgaatacaagatacgctcattcattctcttcattgctatgaaatgagtttttccacaacctcctgcagaacctcaacacatcactaggtggcaacatccctacaccatatcggtttagaaaccacggttaggaggagcagcaaaacacgcggcatcccagtatgattcagaagtaaatacaggcaagctgccggagtgaacgctgagtgagggaaaggaacgcaccatcgttatcaaactcgatccgcgtgcatggcccccgggcggtgatgtcgcagctgtacagccctcccgttctgttggctctctgcagtggaagcgcttctgcccgcggggcccccacgagcaacctgttgatgaaacagagacaatttggagatttgaatttaatatacgtttaacagttaaatcagtcagaactaggagatagtgggattattctttgtctaggagtccactaattcttcaacagcttaggcagtgagtgagaacaaatgtagagtcctatggctggttcatgcaaaacgcacaaacacaactaaacaggggaagccaaagaggggataccaaaacgaggaaaataggcctgtctctcatagtatcagcatttcttgctgggtatgatctggtgtttaaaagacaccctcttcaaagaatacaacctctaagcccctatgatgccagggatatcatatgaaactcaagagaagaaaccaaatacttgtgacaatggaaggaaaaaatg

SEQ ID NO: 284685 - DNA, 765 bp, Homo sapiens
cttaaaatttcaccatctcacagcttgacaggctctttagagatccaatgaccttgttgctaggtctcttttgctaacacctttactcaccatcaggtttacaatctttgaggcctggctgactcatggaacaactaggacaagaaacaaagacaaagaacacacacctgactggacagagataaaccaagagctgagagttttggaaacaaggctggagctgaggaaaaggactgggaacacgaacctgtacaaacaacaaattcttacaacagaaaacaagccactcctggccatcaagaaacccacaaatctcagaagcaaaagcaaaacaaatgaaaatacaaaccaaatagtctctattaccttcatgcctgttgggtcccaataaaggaatcattccaaaaaaaaataaaaatggcctgcttggctcaacggtggatctcttgggcctttccctttagggaggttatttatgatactagtcattaacttcctcctccgccggtcggttgggggagagtttagccactcaaggcggaatcggtattccatattccggatatcatgtaaaaatgtgaacacagcccccaaagcttaacctcataggccctttttgctttctcttggtccgcccctgacagttcaaaaatagtttcgtcacagtgttaaccccacgctttctatacggcgcttccctggattccctggccgtttcgtcccttccctacagtcccggccgtttctatgagaggggctctaaat

SEQ ID NO: 284686 - DNA, 6584 bp, Homo sapiens
catttttctcaagacacttcttcagagaaaaatggttctctcagtattcactgtaagctgattgaatgctagatgtggttaatagtacacctggcaacttttacatatatgggtagaataaatagaatagccaacatggtatcaacaaaaagcttcggggtttagactgggaaaattagcatttcatgatatgactgttatgtggaagaatttttgcatttttccatttaagattggctaggaagaaattgtgttcctcctatttaaatcatctctaggtgaagataaccgacaataaagtagtattgtagagtcctgtctcttctgttggaaccagtctactacttcatttcaagaatgtggtctttatatgccctttagattattagaaagagattggctactattcttctttgctgtgtgcttcttttttttttttttgcatgtcttgctgttttgctaatttattgacccccaacctgctctaactcaccttcctcatttctgtcacagggcttcccacctcgactgccaccacagtacccaggagattcaaatattgctccctcttccaacgtggcttctgtttgcatccattctacagtcctatcccctcccatgccgacagaagtactggctacacctgggtactttcccacagtggtgcagccttatgtggaatcaaatcttttagttcctatgggtggtgtaggaggacaggttcaagtgtcccagccaggagggagtttagcacaagcccccactacatcctcccagcaagcagttttggagagtactcagggagtctctcaggttgctcctgcagagccagttgcagtagcacagccccaagctacccagccgaccactttggcttcctctgtagacagtgcacattcagatgttgcttcaggtatgagtgatggcaatgagaacgtcccatcttccagtggaaggcatgaaggaagaactacaaaacggcattaccgaaaatctgtaaggagtcgctctcgacatgaaaaaacttcacgcccaaaattaagaattttgaatgtttcaaataaaggagaccgagtagtagaatgtcaattagagactcataataggaaaatggttacattcaaatttgacctagatggtgacaaccccgaggagatagcaacaattatggtgaacaatgactttattctagcaatagagagagagtcgtttgtggatcaagtgcgagaaattattgaaaaagctgatgaaatgctcagtgaggatgtcagtgtggaaccagagggtgatcagggattggagagtctacaaggaaaggatgactatggcttttcaggttctcagaaattggaaggagagttcaaacaaccaattcctgcgtcttccatgccacagcaaataggcattcctaccagttctttaactcaagttgttcattctgcgggaaggcggtttatagtgagtcctgtgccagaaagccgattacgagaatcaaaagttttccccagtgaaataacagatacagttgctgcctctacagctcagagccctggaatgaacttgtctcactctgcatcatcccttagtctacaacaggccttttctgaacttagacgtgcccaaatgacagaaggacccaacacagcacctccaaactttagtcatacaggaccaacatttccagtagtacctcctttcttaagtagcattgctggagtcccaaccacagcagcagccacagcaccagtccctgcaacaagcagccctcctaatgacatttccacatcagtaattcagtctgaggttacagtgcccactgaagaggggattgctggagttgccaccagcacaggtgtggtaacttcaggtggtctccccataccacctgtgtctgaatcaccagtactttccagcgtagtttcaagtatcacaatacctgcagttgtctcaatatctactacatccccgtcacttcaagtccccacatccacatctgagatcgttgtttctagtacagcactgtatccttcagtaacagtttcagcaacttcagcctctgcagggggcagtactgctaccccaggtcctaagcctccagctgtagtatctcagcaggcagcaggcagcactactgtgggagccacattaacatcagtttctaccaccacttcattcccaagcacagcttcacagctgtccattcagcttagcagcagtacttctactcctactttagctgaaaccgtggtagttagcgcacactcactagataagacatctcatagcagtacaactggattggctttctccctctctgcaccatcttcctcttcctctcctggagcaggagtgtctagttatatttctcagcctggtgggctgcatcctttggtcattccatcagtgatagcttctactcctattcttccccaagcagcaggacctacttctacacctttattaccccaagtacctagtatcccacccttggtacagcctgttgccaatgtgcctgctgtacagcagacactaattcatagtcagcctcaaccagctttgcttcccaaccagccccatactcattgtcctgaagtagattctgatacacaacccaaagctcctggaattgatgacataaagactctagaagaaaagctgcggtctctgttcagtgaacacagctcatctggagctcagcatgcctctgtctcactggagacctcactagtcatagagagcactgtcacaccaggcatcccaactactgctgttgcaccaagcaaactcctgacttctaccacaagtacttgcttaccaccaaccaatttaccactaggaacagttgctttgccagttacaccagtggtcacacctgggcaagtttctaccccagtcagcactactacatcaggagtgaaacctggaactgctccctccaagccacctctaactaaggctccggtgctgccagtgggtactgaacttccagcaggtactctacccagcgagcagctgccaccttttccaggaccttctctaacccagtcccagcaacctctagaggatcttgatgctcaattgagaagaacacttagtccagagatgatcacagtgacttctgcggttggtcctgtgtccatggcggctccaacagcaatcacagaagcaggaacacagcctcagaagggtgtttctcaagtcaaagaaggccctgtcctagcaactagttcaggagctggtgtttttaagatgggacgatttcaggtttctgttgcagcagacggtgcccagaaagagggtaaaaataagtcagaagatgcaaagtctgttcattttgaatccagcacctcagagtcctcagtgctatcaagtagtagtccagagagtaccttggtgaaaccagagccgaatggcataaccatccctggtatctcttcagatgtgccagagagtgcccacaaaactactgcctcagaggcaaagtcagacactgggcagcctaccaaggttggacgttttcaggtgacaactacagcaaacaaagtgggtcgtttctctgtatcaaaaactgaggacaagatcactgacacaaagaaagaaggaccagtggcatctcctccttttatggatttggaacaagctgttcttcctgctgtgataccaaagaaagagaagcctgaactgtcagagccttcacatctaaatgggccgtcttctgacccggaggccgcttttttaagtagggatgtggatgatggttccggtagtccacactcgccccatcagctgagctcaaagagccttcctagccagaatctaagtcaaagccttagtaattcatttaactcctcttacatgagtagcgacaatgagtcagatatcgaagatgaagacttaaagttagagctgcgacgactacgagataaacatctcaaagagattcaggacctgcagagtcgccagaagcatgaaattgaatctttgtataccaaactgggcaaggtgccccctgctgttattattcccccagctgctcccctttcagggagaagacgacgacccactaaaagcaaaggcagcaaatctagtcgaagcagttccttggggaataaaagcccccagctttcaggtaacctgtctggtcagagtgcagcttcagtcttgcacccccagcagaccctccaccctcctggcaacatcccagagtccgggcagaatcagctgttacagccccttaagccatctccctccagtgacaacctctattcagccttcaccagtgatggtgccatttcagtaccaagcctttctgctccaggtcaaggtaataaagcaaccatcatcgtccaaaaacaataaaatggagatgttgccatacctgggacaaaagcctgttaaggcgggttgggagactagctgaccagaacacagcctgtgtgttgtacactgaagaatctgggtgaaaagggaagtggagtgataatgagaatcggtgggctcactgctcccattaggtgaaattactttttttcaaggaattacagtgaaaagttacatctgtgtggcctatatgacttgctcatttgggatttggaacttaggctttaatattaggctgagatttcctggatgaaattctaaggtgttttagcagtttctgaagctaatacattttcttagccattgtagaattttgttacttttaagtatgggagtggcatactaaaatgaataaccttacaattcagttttttatccataatctactttccaaatatagctctgtttattagtgattgctgaaaaaattcccacagaggaaagagcttttagtcatattagaacaagaattgaaaagacttgggcatctgggtgagaagaatgaaaaaaatataggtactggcttatgtgcctttgccacagtttcacagaaattagagatcagtctcttcacaggaagaatgcacttgattggtaaggagggcaaactagctagcattattcgaactaagaaaagcttccgcattttgcagatgggtagaattaagacctaatatttcatctcttacatatctgaccttccccccagaagcttgttcttctgtgtgccatcttagtgcatttcaccactccagcctcaagtttctaacatcttgtagttgtgttctgtctcttctcctctctctgttctaccctgtttttcccctctcacaggctgtgcgaagtttaactgtgcatctgaacaggtgacattcaaacctggtggcaggaggacccgatttctgagtacgccctgcttggctctttgtgtgtaacacctttactccttccttgtccttgtgtttctgctgcttggatctgatgtttcacgcagtccattttcatttgtctctttttgtatatcatctactcagtggcttggctgaattactgttaccctcagaagtttgggcccccacattaattatgataaaaaatgtcaaaataacaagttatctacaaatttcaatgtaactttctggtagaagtgcttcttcatggatctgtgacagagagtggatatggtatctaggcaatagattgctgggtcatttagaataatgaagactgaactccacagtcgtagtcagtgctgtctgtctgccctagcattagaaatgagagaaatcagccagacacggtggcgtacacctgtaatcccagcactttgggaggccgaggcgggaagattgcttgaggccaggagctcgagaccaaccctgggcaacatggtgataccccatctctaaaaaaaaaaaaaaagttagcctggcatggtggtgtgcacctatagtcccagctgcccaggaggctgaggcgggaggattaccaccttaagaccaggaggttgagactgcagtgagccatgattgcaccactgcaccccagcctgagcgacagagtgagactctatctcaaaaaaaagaaacgaaatgaagaaagcattttgaccaatgatgctcttagatcctggcagcaggtaaaaattatgtaccatttttttccattctttgtcagagtagattgaaatcttatttttcttctctattaagcctaagcagctaccagttgaaaagatgctaggatctcttcattggatcattccaccactactgtcctctaaccccataaaatcaaaagcggtttttagtttggttattctgataaagcacttagtctaataaagatcaaagcccagcatctgcaagtgaaaattctccttctaacatgatttctgggattttgcagctttctacttaaaaacaaggcacaatagcaagtcaccccatcttccccatatgtgaaatggagatgatgccagtgtcctagggccatcgtacaaatcaagctaagatcatgtacagagaaacaggtagcgcttgaaaagcactcatggtttctctctgatgagtcagtgcctacctggcacagaacaggtagtcaataactgttcgtggaagaacagtttaaaacaaacaaaaacatagttcaagtagaaaaacctttgttataatttgaataaagatcttctctgttaaggcctc

SEQ ID NO: 284687 - DNA, 2500 bp, Homo sapiens
ggaagagctggacatgtttcctcatgccactttatcttttggcaggtaacctgtctggtcagagtgcagcttcagtcttgcacccccagcagaccctccaccctcctggcaacatcccagagtccgggcagaatcagctgttacagccccttaagccatctccctccagtgacaacctctattcagccttcaccagtgatggtgccatttcagtaccaagcctttctgctccaggtcaaggtaataaagcaaccatcatcgtccaaaaacaataaaatggagatgttgccatacctgggacaaaagcctgttaaggcgggttgggagactagctgaccagaacacagcctgtgtgttgtacactgaagaatctgggtgaaaagggaagtggagtgataatgagaatcggtgggctcactgctcccattaggtgaaattactttttttcaaggaattacagtgaaaagttacatctgtgtggcctatatgacttgctcatttgggatttggaacttaggctttaatattaggctgagatttcctggatgaaattctaaggtgttttagcagtttctgaagctaatacattttcttagccattgtagaattttgttacttttaagtatgggagtggcatactaaaatgaataaccttacaattcagttttttatccataatctactttccaaatatagctctgtttattagtgattgctgaaaaaattcccacagaggaaagagcttttagtcatattagaacaagaattgaaaagacttgggcatctgggtgagaagaatgaaaaaaatataggtactggcttatgtgcctttgccacagtttcacagaaattagagatcagtctcttcacaggaagaatgcacttgattggtaaggagggcaaactagctagcattattcgaactaagaaaagcttccgcattttgcagatgggtagaattaagacctaatatttcatctcttacatatctgaccttccccccagaagcttgttcttctgtgtgccatcttagtgcatttcaccactccagcctcaagtttctaacatcttgtagttgtgttctgtctcttctcctctctctgttctaccctgtttttcccctctcacaggctgtgcgaagtttaactgtgcatctgaacaggtgacattcaaacctggtggcaggaggacccgatttctgagtacgccctgcttggctctttgtgtgtaacacctttactccttccttgtccttgtgtttctgctgcttggatctgatgtttcacgcagtccattttcatttgtctctttttgtatatcatctactcagtggcttggctgaattactgttaccctcagaagtttgggcccccacattaattatgataaaaaatgtcaaaataacaagttatctacaaatttcaatgtaactttctggtagaagtgcttcttcatggatctgtgacagagagtggatatggtatctaggcaatagattgctgggtcatttagaataatgaagactgaactccacagtcgtagtcagtgctgtctgtctgccctagcattagaaatgagagaaatcagccagacacggtggcgtacacctgtaatcccagcactttgggaggccgaggcgggaagattgcttgaggccaggagctcgagaccaaccctgggcaacatggtgataccccatctctaaaaaaaaaaaaaaagttagcctggcatggtggtgtgcacctatagtcccagctgcccaggaggctgaggcgggaggattaccaccttaagaccaggaggttgagactgcagtgagccatgattgcaccactgcaccccagcctgagcgacagagtgagactctatctcaaaaaaaagaaacgaaatgaagaaagcattttgaccaatgatgctcttagatcctggcagcaggtaaaaattatgtaccatttttttccattctttgtcagagtagattgaaatcttatttttcttctctattaagcctaagcagctaccagttgaaaagatgctaggatctcttcattggatcattccaccactactgtcctctaaccccataaaatcaaaagcggtttttagtttggttattctgataaagcacttagtctaataaagatcaaagcccagcatctgcaagtgaaaattctccttctaacatgatttctgggattttgcagctttctacttaaaaacaaggcacaatagcaagtcaccccatcttccccatatgtgaaatggagatgatgccagtgtcctagggccatcgtacaaatcaagctaagatcatgtacagagaaacaggtagcgcttgaaaagcactcatggtttctctctgatgagtcagtgcctacctggcacagaacaggtagtcaataactgttcgtggaagaacagtttaaaacaaacaaaaacatagttcaagtagaaaaacctttgttataatttgaataaagatcttctctgttaaggcctc

SEQ ID NO: 284688 - DNA, 295 bp, Homo sapiens
ctgtgattgttttcattcagtcccagcaacctctagaggatcttgatgctcaattgagaagaacacttagtccagagatgatcacagtgacttctgcggttggtcctgtgtccatggcggctccaacagcaatcacagaagcaggaacacagcctcagaagggtgtttctcaagtcaaagaaggccctgtcctagcaactagttcaggagctggtgtttttaagatgggacgatttcagtttctgatgcagcacacggtgtcccagaagaggggatcatcaagaaccagcgcgca

SEQ ID NO: 284689 - DNA, 10831 bp, Homo sapiens
ggcgggatccgagcgggctgtgtggaggcttcagactcccggcgccatttagcgcggagagtttcccgggtggacgcggctcctctctcggccactccgcacccccatcttcggtgacagaaggcgcctggtgggggtggctgctcttttctctccctgttccccctcacccagtcctctaggtctcctctcctcttgcctcagagaagcagcggagctcgggccccgcggtgagcggccctcccctccccgccgttccctcctccgtcagcccccggcaccggcccgggaggagacgggtttgccaggcctggggcgggcggggaggcctcggggaagggggggcccgctcctcaggcgccgaggctccgaggctccggcccttcgcctctgggcgatgggcgacctgtgaggccggtccccatcgctgggggcgcgtgtgggaggaggcggccgcccgagtgaccgggagccgggccgcggccttccctcgcccgcctcggcccctcccactcctctgccccggggccgccaccgcccgggcgtcggacctggtcccgtgctcgcggtgccgccgccctctgggcctagcccgcccagctcggcgagcggcggcagtgggagccgcgtccgccgcatccgcctcgactcggtgccggcccctggccctcccctcatgactgcggcgcctctgctgccaccgcccgcccggccgccgctcgccgcaggatggatgcggaccgtgcggcgctaacccccgtggctcagctcccgaatcgcccgccttcgagccctcctcgtgagccgcagcagcctcggtgccagcccccgccgcagctgggcccagcggtccgcctgtccctcgttgcggcttgtcggtgctgagtgaggcgtcgtccgggtcggcgcgaacccgcccggccgcggtgccctgcagacctctgcgcgggcggctcggcccttcacgcccttttcgttcacgaatccgagcccgctcgcctctctccagcgaaccgaccatgtctggcggcgccgcagagaagcagagcagcactcccggttccctgttcctctcgccgccggctcctgcccccaagaatggctccagctccgattcctccgtgggggagaaactgggagccgcggccgccgacgctgtgaccggcaggaccgaggagtacaggcgccgccgccacactatggacaaggacagccgtggggcggccgcgaccactaccaccactgagcaccgcttcttccgccggagcgtcatctgcgactccaatgccactgcactggagcttcccggccttcctctttccctgccccagcccagcatccccgcggctgtcccgcagagtgctccaccggagccccaccgggaagagaccgtgaccgccaccgccacttcccaggtagcccagcagcctccagccgctgccgcccctggggaacaggccgtcgcgggccctgccccctcgactgtccccagcagtaccagcaaagaccgcccagtgtcccagcctagccttgtggggagcaaagaggagccgccgccggcgagaagtggcagcggcggcggcagcgccaaggagccacaggaggaacggagccagcagcaggatgatatcgaagagctggagaccaaggccgtgggaatgtctaacgatggccgctttctcaagtttgacatcgaaatcggcagaggctcctttaagacggtctacaaaggtctggacactgaaaccaccgtggaagtcgcctggtgtgaactgcaggatcgaaaattaacaaagtctgagaggcagagatttaaagaagaagctgaaatgttaaaaggtcttcagcatcccaatattgttagattttatgattcctgggaatccacagtaaaaggaaagaagtgcattgttttggtgactgaacttatgacgtctggaacacttaaaacgtatctgaaaaggtttaaagtgatgaagatcaaagttctaagaagctggtgccgtcagatccttaaaggtcttcagtttcttcatactcgaactccacctatcattcaccgcgatcttaaatgtgacaacatctttatcaccggccctactggctcagtcaagattggagacctcggtctggcaaccctgaagcgggcttcttttgccaagagtgtgataggtaccccagagttcatggcccctgagatgtatgaggagaaatatgatgaatccgttgacgtttatgcttttgggatgtgcatgcttgagatggctacatctgaatatccttactcggagtgccaaaatgctgcgcagatctaccgtcgcgtgaccagtggggtgaagccagccagttttgacaaagtagcaattcctgaagtgaaggaaattattgaaggatgcatacgacaaaacaaagatgaaagatattccatcaaagaccttttgaaccatgccttcttccaagaggaaacaggagtacgggtagaattagcagaagaagatgatggagaaaaaatagccataaaattatggctacgtattgaagatattaagaaattaaagggaaaatacaaagataatgaagctattgagttttcttttgatttagagagagatgtcccagaagatgttgcacaagaaatggtagagtctgggtatgtctgtgaaggtgatcacaagaccatggctaaagctatcaaagacagagtatcattaattaagaggaaacgagagcagcggcagttggtacgggaggagcaagaaaaaaaaaagcaggaagagagcagtctcaaacagcaggtagaacaatccagtgcttcccagacaggaatcaagcagctcccttctgctagcaccggcatacctactgcttctaccacttcagcttcagtttctacacaagtagaacctgaagaacctgaggcagatcaacatcaacaactacagtaccagcaacccagtatatctgtgttatctgatgggacggttgacagtggtcagggatcctctgtcttcacagaatctcgagtgagcagccaacagacagtttcatatggttcccaacatgaacaggcacattctacaggcacagtcccagggcatataccttctactgtccaagcacagtctcagccccatggggtatatccaccctcaagtgtggcacaggggcagagccagggtcagccatcctcaagtagcttaacaggggtttcatcttcccaacccatacaacatcctcagcagcagcagggaatacagcagacagcccctcctcaacagacagtgcagtattcactttcacagacatcaacctccagtgaggccactactgcacagccagtgagtcaacctcaagctccacaagtcttgcctcaagtatcagctggaaaacagcttccagtttcccagccagtaccaactatccaaggcgaacctcagatcccagttgcgacacaaccctcggttgttccagtccactctggtgctcatttccttccagtgggacagccgctccctactcccttgctccctcagtaccctgtctctcagattcccatatcaactcctcatgtgtctacggctcagacaggtttctcatcccttcccatcacaatggcagctggcattactcagcctctgctcacgttggcttcatctgctacaacagctgcgatcccgggggtatcaactgtggttcctagtcagcttccaacccttctgcagcctgtgactcagctgccaagtcaggttcacccacagctcctacaaccagcagttcagtccatgggaataccagctaaccttggacaagctgctgaggttccactttcctctggagatgttctgtaccagggcttcccacctcgactgccaccacagtacccaggagattcaaatattgctccctcttccaacgtggcttctgtttgcatccattctacagtcctatcccctcccatgccgacagaagtactggctacacctgggtactttcccacagtggtgcagccttatgtggaatcaaatcttttagttcctatgggtggtgtaggaggacaggttcaagtgtcccagccaggagggagtttagcacaagcccccactacatcctcccagcaagcagttttggagagtactcagggagtctctcaggttgctcctgcagagccagttgcagtagcacagccccaagctacccagccgaccactttggcttcctctgtagacagtgcacattcagatgttgcttcaggtatgagtgatggcaatgagaacgtcccatcttccagtggaaggcatgaaggaagaactacaaaacggcattaccgaaaatctgtaaggagtcgctctcgacatgaaaaaacttcacgcccaaaattaagaattttgaatgtttcaaataaaggagaccgagtagtagaatgtcaattagagactcataataggaaaatggttacattcaaatttgacctagatggtgacaaccccgaggagatagcaacaattatggtgaacaatgactttattctagcaatagagagagagtcgtttgtggatcaagtgcgagaaattattgaaaaagctgatgaaatgctcagtgaggatgtcagtgtggaaccagagggtgatcagggattggagagtctacaaggaaaggatgactatggcttttcaggttctcagaaattggaaggagagttcaaacaaccaattcctgcgtcttccatgccacagcaaataggcattcctaccagttctttaactcaagttgttcattctgcgggaaggcggtttatagtgagtcctgtgccagaaagccgattacgagaatcaaaagttttccccagtgaaataacagatacagttgctgcctctacagctcagagccctggaatgaacttgtctcactctgcatcatcccttagtctacaacaggccttttctgaacttagacgtgcccaaatgacagaaggacccaacacagcacctccaaactttagtcatacaggaccaacatttccagtagtacctcctttcttaagtagcattgctggagtcccaaccacagcagcagccacagcaccagtccctgcaacaagcagccctcctaatgacatttccacatcagtaattcagtctgaggttacagtgcccactgaagaggggattgctggagttgccaccagcacaggtgtggtaacttcaggtggtctccccataccacctgtgtctgaatcaccagtactttccagcgtagtttcaagtatcacaatacctgcagttgtctcaatatctactacatccccgtcacttcaagtccccacatccacatctgagatcgttgtttctagtacagcactgtatccttcagtaacagtttcagcaacttcagcctctgcagggggcagtactgctaccccaggtcctaagcctccagctgtagtatctcagcaggcagcaggcagcactactgtgggagccacattaacatcagtttctaccaccacttcattcccaagcacagcttcacagctgtccattcagcttagcagcagtacttctactcctactttagctgaaaccgtggtagttagcgcacactcactagataagacatctcatagcagtacaactggattggctttctccctctctgcaccatcttcctcttcctctcctggagcaggagtgtctagttatatttctcagcctggtgggctgcatcctttggtcattccatcagtgatagcttctactcctattcttccccaagcagcaggacctacttctacacctttattaccccaagtacctagtatcccacccttggtacagcctgttgccaatgtgcctgctgtacagcagacactaattcatagtcagcctcaaccagctttgcttcccaaccagccccatactcattgtcctgaagtagattctgatacacaacccaaagctcctggaattgatgacataaagactctagaagaaaagctgcggtctctgttcagtgaacacagctcatctggagctcagcatgcctctgtctcactggagacctcactagtcatagagagcactgtcacaccaggcatcccaactactgctgttgcaccaagcaaactcctgacttctaccacaagtacttgcttaccaccaaccaatttaccactaggaacagttgctttgccagttacaccagtggtcacacctgggcaagtttctaccccagtcagcactactacatcaggagtgaaacctggaactgctccctccaagccacctctaactaaggctccggtgctgccagtgggtactgaacttccagcaggtactctacccagcgagcagctgccaccttttccaggaccttctctaacccagtcccagcaacctctagaggatcttgatgctcaattgagaagaacacttagtccagagatgatcacagtgacttctgcggttggtcctgtgtccatggcggctccaacagcaatcacagaagcaggaacacagcctcagaagggtgtttctcaagtcaaagaaggccctgtcctagcaactagttcaggagctggtgtttttaagatgggacgatttcaggtttctgttgcagcagacggtgcccagaaagagggtaaaaataagtcagaagatgcaaagtctgttcattttgaatccagcacctcagagtcctcagtgctatcaagtagtagtccagagagtaccttggtgaaaccagagccgaatggcataaccatccctggtatctcttcagatgtgccagagagtgcccacaaaactactgcctcagaggcaaagtcagacactgggcagcctaccaaggttggacgttttcaggtgacaactacagcaaacaaagtgggtcgtttctctgtatcaaaaactgaggacaagatcactgacacaaagaaagaaggaccagtggcatctcctccttttatggatttggaacaagctgttcttcctgctgtgataccaaagaaagagaagcctgaactgtcagagccttcacatctaaatgggccgtcttctgacccggaggccgcttttttaagtagggatgtggatgatggttccggtagtccacactcgccccatcagctgagctcaaagagccttcctagccagaatctaagtcaaagccttagtaattcatttaactcctcttacatgagtagcgacaatgagtcagatatcgaagatgaagacttaaagttagagctgcgacgactacgagataaacatctcaaagagattcaggacctgcagagtcgccagaagcatgaaattgaatctttgtataccaaactgggcaaggtgccccctgctgttattattcccccagctgctcccctttcagggagaagacgacgacccactaaaagcaaaggcagcaaatctagtcgaagcagttccttggggaataaaagcccccagctttcaggtaacctgtctggtcagagtgcagcttcagtcttgcacccccagcagaccctccaccctcctggcaacatcccagagtccgggcagaatcagctgttacagccccttaagccatctccctccagtgacaacctctattcagccttcaccagtgatggtgccatttcagtaccaagcctttctgctccaggtcaaggaaccagcagcacaaacactgttggggcaacagtgaacagccaagccgcccaagctcagcctcctgccatgacgtccagcaggaagggcacattcacagatgacttgcacaagttggtagacaattgggcccgagatgccatgaatctctcaggcaggagaggaagcaaagggcacatgaattatgagggccctggaatggcaaggaagttctctgcacctgggcaactgtgcatctccatgacctcgaacctgggtggctctgcccccatctctgcagcatcagctacctctctaggtcacttcaccaagtctatgtgccccccacagcagtatggctttccagctaccccatttggcgctcaatggagtgggacgggtggcccagcaccacagccacttggccagttccaacctgtgggaactgcctccttgcagaatttcaacatcagcaatttgcagaaatccatcagcaaccccccaggctccaacctgcggaccacttagacctagagacattaactgaatagatctgggggcaggagatggaatgctgagggggtgggtgggggtgggaagtagcctatatactaactactagtgctgcatttaactggttatttcttgccagaggggaatgtttttaatactgcattgagccctcagaatggagagtctcccccgctccagttattggaatgggagaggaaggaaagaacagcttttttgtcaaggggcagcttcagaccatgctttcctgtttatctatactcagtaatgaggatgagggctaggaaagtcttgttcataaggaagctggagaactcaatgtaaaatcaaacccatctgtaatttcgagtgggtggagctcttgcttttggtacatgccctgaatccctcactccctcaagaatccgaaccacaggacaaaaaccacctactgggctctctcctaccctgccctcctcccttttttttacccctctcttttttattttttctttgctctttagaacccagtgaaaaataccagggtactggggtgcaactctttcttatgataggtcattagtgctttaagcaaaagatattagcagctttgactgcagcattagcaattaggaaaaaaaaaaaattaagttccctgcggacatgtaactttgccatcagttttgatgtggaaacactgtgatatataaaatgttgttggacaacagtagttttaagagtaaaatatgaaacgtttaaaaagttccaaaaaaagctagctctgtcctttacttattgagacactttaactttttcctttgtatttccattgtattagataaataaatgtgaatgtaaaattgtataaattactgtacttgaatacttctgtttcccagtgttgcttgctggacattttagtgccttggacttctattgcttctgccattagcatcaacttaccagaccccagatcaataaagggcatgtggaaggaaatcgtaggtccatgtgaccccagcagtccagcagtggttatgccaaagggaaattgaaaaagtatttttttaagtcattcaacaactttgtctagagcaggtgtaagatgagtagggtgggaagttaggttggcatcagtggttaaaaacagaaagttctgtttcgggaatagtgaggagggggtgttgtaacaaaattggacaacttaaaagaatggtgtgtgctgggtgaaagacaaagactaaagaatgaggaaacaaacgtgatgcctggccagtgactgtcatataaacctttcttatttgagctaggcttgaacagacgtgacctagaagaaactgaacataaagagaagggggtggggggctagttttcaagttggggaacctgatagtgaaaagtcacagatggagaaaattgctctcagaaaaactgtttggattgctttcctcttgttgcacatgtaccatgcatttctcagcttggggtactacattttgtggaaagttaatctatcatctatctttccacatctgaattaatcattctaggaaagaatacttattcctactcatttcctttatgatgtccaaatggttgcaggatcataatctattgtgccacctttatttctagaagtacaactaatatgttcacattttcaaataaataatactccccgtaagtaataactgcaaccaatcagtgttattcagtgctatgcctccttgtaatgggtagttattaattattttcagagctttccggaaatactgtcctaactggctatgtttaggatctttgttatctctgaagacaaagaaagaagctaggactcttaattttggggtgcttcttgactcttagttgggaaactgaaaatatttccaaccttttacccacgtcaatggcatattctgggaatcaccaccaccaccaccactaccacagaaagaggctggaggctcctgtaccctgttcattccttaagggccctgcttcccttaataagtaagtaagttggtctacggccctaaatatgcaaatgagagctgaaggtttttaaaaggtagaaaggaaaagggcaagggcttccacccctgctttaaaatgatttatttattctctgcttgtatttcttgtggagagagtaaggatagaaccaacaaggggctgagtagctgagaaaggggccacccaagagtgaaacatactttataccagaggagcagtggagcctcatgcagcacattatcatttgttatttgggtttaataataattttgacatcttttcactcatacacaaaaaaagtcagaactggtgttatttactgttgatttcatcctcctgtgtatgaaataacaagcctagaggaatgaactagtgctactgaactgtttaaattatttttgtgttaatagtacactttgagtatctttttccacattaaaaactttctgaattataaatgttttccttacattatttaacaatgtacactgttaaaaataaaaataaaaattcaaactttgggggtttctcagcagccgttaattgtacattttgcactaactctgggtgttgcgcttcttgtaagattgcgctttgtgcttcagtttgttacctttgtagacttatttaatgaaaccattcaaataaaccaaacttgcttttgttga

SEQ ID NO: 284690 - DNA, 10780 bp, Homo sapiens
ggcgggatccgagcgggctgtgtggaggcttcagactcccggcgccatttagcgcggagagtttcccgggtggacgcggctcctctctcggccactccgcacccccatcttcggtgacagaaggcgcctggtgggggtggctgctcttttctctccctgttccccctcacccagtcctctaggtctcctctcctcttgcctcagagaagcagcggagctcgggccccgcggtgagcggccctcccctccccgccgttccctcctccgtcagcccccggcaccggcccgggaggagacgggtttgccaggcctggggcgggcggggaggcctcggggaagggggggcccgctcctcaggcgccgaggctccgaggctccggcccttcgcctctgggcgatgggcgacctgtgaggccggtccccatcgctgggggcgcgtgtgggaggaggcggccgcccgagtgaccgggagccgggccgcggccttccctcgcccgcctcggcccctcccactcctctgccccggggccgccaccgcccgggcgtcggacctggtcccgtgctcgcggtgccgccgccctctgggcctagcccgcccagctcggcgagcggcggcagtgggagccgcgtccgccgcatccgcctcgactcggtgccggcccctggccctcccctcatgactgcggcgcctctgctgccaccgcccgcccggccgccgctcgccgcaggatggatgcggaccgtgcggcgctaacccccgtggctcagctcccgaatcgcccgccttcgagccctcctcgtgagccgcagcagcctcggtgccagcccccgccgcagctgggcccagcggtccgcctgtccctcgttgcggcttgtcggtgctgagtgaggcgtcgtccgggtcggcgcgaacccgcccggccgcggtgccctgcagacctctgcgcgggcggctcggcccttcacgcccttttcgttcacgaatccgagcccgctcgcctctctccagcgaaccgaccatgtctggcggcgccgcagagaagcagagcagcactcccggttccctgttcctctcgccgccggctcctgcccccaagaatggctccagctccgattcctccgtgggggagaaactgggagccgcggccgccgacgctgtgaccggcaggaccgaggagtacaggcgccgccgccacactatggacaaggacagccgtggggcggccgcgaccactaccaccactgagcaccgcttcttccgccggagcgtcatctgcgactccaatgccactgcactggagcttcccggccttcctctttccctgccccagcccagcatccccgcggctgtcccgcagagtgctccaccggagccccaccgggaagagaccgtgaccgccaccgccacttcccaggtagcccagcagcctccagccgctgccgcccctggggaacaggccgtcgcgggccctgccccctcgactgtccccagcagtaccagcaaagaccgcccagtgtcccagcctagccttgtggggagcaaagaggagccgccgccggcgagaagtggcagcggcggcggcagcgccaaggagccacaggaggaacggagccagcagcaggatgatatcgaagagctggagaccaaggccgtgggaatgtctaacgatggccgctttctcaagtttgacatcgaaatcggcagaggctcctttaagacggtctacaaaggtctggacactgaaaccaccgtggaagtcgcctggtgtgaactgcaggatcgaaaattaacaaagtctgagaggcagagatttaaagaagaagctgaaatgttaaaaggtcttcagcatcccaatattgttagattttatgattcctgggaatccacagtaaaaggaaagaagtgcattgttttggtgactgaacttatgacgtctggaacacttaaaacgtatctgaaaaggtttaaagtgatgaagatcaaagttctaagaagctggtgccgtcagatccttaaaggtcttcagtttcttcatactcgaactccacctatcattcaccgcgatcttaaatgtgacaacatctttatcaccggccctactggctcagtcaagattggagacctcggtctggcaaccctgaagcgggcttcttttgccaagagtgtgataggtaccccagagttcatggcccctgagatgtatgaggagaaatatgatgaatccgttgacgtttatgcttttgggatgtgcatgcttgagatggctacatctgaatatccttactcggagtgccaaaatgctgcgcagatctaccgtcgcgtgaccagtggggtgaagccagccagttttgacaaagtagcaattcctgaagtgaaggaaattattgaaggatgcatacgacaaaacaaagatgaaagatattccatcaaagaccttttgaaccatgccttcttccaagaggaaacaggagtacgggtagaattagcagaagaagatgatggagaaaaaatagccataaaattatggctacgtattgaagatattaagaaattaaagggaaaatacaaagataatgaagctattgagttttcttttgatttagagagagatgtcccagaagatgttgcacaagaaatggtagagtctgggtatgtctgtgaaggtgatcacaagaccatggctaaagctatcaaagacagagtatcattaattaagaggaaacgagagcagcggcagttggtacgggaggagcaagaaaaaaaaaagcaggaagagagcagtctcaaacagcaggtagaacaatccagtgcttcccagacaggaatcaagcagctcccttctgctagcaccggcatacctactgcttctaccacttcagcttcagtttctacacaagtagaacctgaagaacctgaggcagatcaacatcaacaactacagtaccagcaacccagtatatctgtgttatctgatgggacggttgacagtggtcagggatcctctgtcttcacagaatctcgagtgagcagccaacagacagtttcatatggttcccaacatgaacaggcacattctacaggcacagtcccagggcatataccttctactgtccaagcacagtctcagccccatggggtatatccaccctcaagtgtggcacaggggcagagccagggtcagccatcctcaagtagcttaacaggggtttcatcttcccaacccatacaacatcctcagcagcagcagggaatacagcagacagcccctcctcaacagacagtgcagtattcactttcacagacatcaacctccagtgaggccactactgcacagccagtgagtcaacctcaagctccacaagtcttgcctcaagtatcagctggaaaacagcttccagtttcccagccagtaccaactatccaaggcgaacctcagatcccagttgcgacacaaccctcggttgttccagtccactctggtgctcatttccttccagtgggacagccgctccctactcccttgctccctcagtaccctgtctctcagattcccatatcaactcctcatgtgtctacggctcagacaggtttctcatcccttcccatcacaatggcagctggcattactcagcctctgctcacgttggcttcatctgctacaacagctgcgatcccgggggtatcaactgtggttcctagtcagcttccaacccttctgcagcctgtgactcagctgccaagtcaggttcacccacagctcctacaaccagcagttcagtccatgggaataccagctaaccttggacaagctgctgaggttccactttcctctggagatgttctgtaccagggcttcccacctcgactgccaccacagtacccaggagattcaaatattgctccctcttccaacgtggcttctgtttgcatccattctacagtcctatcccctcccatgccgacagaagtactggctacacctgggtactttcccacagtggtgcagccttatgtggaatcaaatcttttagttcctatgggtggtgtaggaggacaggttcaagtgtcccagccaggagggagtttagcacaagcccccactacatcctcccagcaagcagttttggagagtactcagggagtctctcaggttgctcctgcagagccagttgcagtagcacagccccaagctacccagccgaccactttggcttcctctgtagacagtgcacattcagatgttgcttcaggtatgagtgatggcaatgagaacgtcccatcttccagtggaaggcatgaaggaagaactacaaaacggcattaccgaaaatctgtaaggagtcgctctcgacatgaaaaaacttcacgcccaaaattaagaattttgaatgtttcaaataaaggagaccgagtagtagaatgtcaattagagactcataataggaaaatggttacattcaaatttgacctagatggtgacaaccccgaggagatagcaacaattatggtgaacaatgactttattctagcaatagagagagagtcgtttgtggatcaagtgcgagaaattattgaaaaagctgatgaaatgctcagtgaggatgtcagtgtggaaccagagggtgatcagggattggagagtctacaaggaaaggatgactatggcttttcaggttctcagaaattggaaggagagttcaaacaaccaattcctgcgtcttccatgccacagcaaataggcattcctaccagttctttaactcaagttgttcattctgcgggaaggcggtttatagtgagtcctgtgccagaaagccgattacgagaatcaaaagttttccccagtgaaataacagatacagttgctgcctctacagctcagagccctggaatgaacttgtctcactctgcatcatcccttagtctacaacaggccttttctgaacttagacgtgcccaaatgacagaaggacccaacacagcacctccaaactttagtcatacaggaccaacatttccagtagtacctcctttcttaagtagcattgctggagtcccaaccacagcagcagccacagcaccagtccctgcaacaagcagccctcctaatgacatttccacatcagtaattcagtctgaggttacagtgcccactgaagaggggattgctggagttgccaccagcacaggtgtggtaacttcaggtggtctccccataccacctgtgtctgaatcaccagtactttccagcgtagtttcaagtatcacaatacctgcagttgtctcaatatctactacatccccgtcacttcaagtccccacatccacatctgagatcgttgtttctagtacagcactgtatccttcagtaacagtttcagcaacttcagcctctgcagggggcagtactgctaccccaggtcctaagcctccagctgtagtatctcagcaggcagcaggcagcactactgtgggagccacattaacatcagtttctaccaccacttcattcccaagcacagcttcacagctgtccattcagcttagcagcagtacttctactcctactttagctgaaaccgtggtagttagcgcacactcactagataagacatctcatagcagtacaactggattggctttctccctctctgcaccatcttcctcttcctctcctggagcaggagtgtctagttatatttctcagcctggtgggctgcatcctttggtcattccatcagtgatagcttctactcctattcttccccaagcagcaggacctacttctacacctttattaccccaagtacctagtatcccacccttggtacagcctgttgccaatgtgcctgctgtacagcagacactaattcatagtcagcctcaaccagctttgcttcccaaccagccccatactcattgtcctgaagtagattctgatacacaacccaaagctcctggaattgatgacataaagactctagaagaaaagctgcggtctctgttcagtgaacacagctcatctggagctcagcatgcctctgtctcactggagacctcactagtcatagagagcactgtcacaccaggcatcccaactactgctgttgcaccaagcaaactcctgacttctaccacaagtacttgcttaccaccaaccaatttaccactaggaacagttgctttgccagttacaccagtggtcacacctgggcaagtttctaccccagtcagcactactacatcaggagtgaaacctggaactgctccctccaagccacctctaactaaggctccggtgctgccagtgggtactgaacttccagcaggtactctacccagcgagcagctgccaccttttccaggaccttctctaacccagtcccagcaacctctagaggatcttgatgctcaattgagaagaacacttagtccagagatgatcacagtgacttctgcggttggtcctgtgtccatggcggctccaacagcaatcacagaagcaggaacacagcctcagaagggtgtttctcaagtcaaagaaggccctgtcctagcaactagttcaggagctggtgtttttaagatgggacgatttcaggtttctgttgcagcagacggtgcccagaaagagggtaaaaataagtcagaagatgcaaagtctgttcattttgaatccagcacctcagagtcctcagtgctatcaagtagtagtccagagagtaccttggtgaaaccagagccgaatggcataaccatccctggtatctcttcagatgtgccagagagtgcccacaaaactactgcctcagaggcaaagtcagacactgggcagcctaccaaggttggacgttttcaggtgacaactacagcaaacaaagtgggtcgtttctctgtatcaaaaactgaggacaagatcactgacacaaagaaagaaggaccagtggcatctcctccttttatggatttggaacaagctgttcttcctgctgtgataccaaagaaagagaagcctgaactgtcagagccttcacatctaaatgggccgtcttctgacccggaggccgcttttttaagtagggatgtggatgatggttccggtagtccacactcgccccatcagctgagctcaaagagccttcctagccagaatctaagtcaaagccttagtaattcatttaactcctcttacatgagtagcgacaatgagtcagatatcgaagatgaagacttaaagttagagctgcgacgactacgagataaacatctcaaagagattcaggacctgcagagtcgccagaagcatgaaattgaatctttgtataccaaactgggcaaggtgccccctgctgttattattcccccagctgctcccctttcagggagaagacgacgacccactaaaagcaaaggcagcaaatctagtcgaagcagttccttggggaataaaagcccccagctttcaggtaacctgtctggtcagagtgcagcttcagtcttgcacccccagcagaccctccaccctcctggcaacatcccagagtccgggcagaatcagctgttacagccccttaagccatctccctccagtgacaacctctattcagccttcaccagtgatggtgccatttcagtaccaagcctttctgctccaggtcaaggaaccagcagcacaaacactgttggggcaacagtgaacagccaagccgcccaagctcagcctcctgccatgacgtccagcaggaagggcacattcacagatgacttgcacaagttggtagacaattgggcccgagatgccatgaatctctcaggcaggagaggaagcaaagggcacatgaattatgagggccctggaatggcaaggaagttctctgcacctgggcaactgtgcatctccatgacctcgaacctgggtggctctgcccccatctctgcagcatcagctacctctctaggtcacttcaccaagtctatgtgccccccacagcagtatggctttccagctaccccatttggcgctcaatggagtgggacgggtggcccagcaccacagccacttggccagttccaacctgtgggaactgcctccttgcagaatttcaacatcagcaatttgcagaaatccatcagcaaccccccaggctccaacctgcggaccacttagacctagagacattaactgaatagatctgggggcaggagatggaatgctgagggggtgggtgggggtgggaagtagcctatatactaactactagtgctgcatttaactggttatttcttgccagaggggaatgtttttaatactgcattgagccctcagaatggagagtctcccccgctccagttattggaatgggagaggaaggaaagaacagcttttttgtcaaggggcagcttcagaccatgctttcctgtttatctatactcagtaatgaggatgagggctaggaaagtcttgttcataaggaagctggagaactcaatgtaaaatcaaacccatctgtaatttcgagtgggtggagctcttgcttttggtacatgccctgaatccctcactccctcaagaatccgaaccacaggacaaaaaccacctactgggctctctcctaccctgccctcctcccttttttttacccctctcttttttattttttctttgctctttagaacccagtgaaaaataccagggtactggggtgcaactctttcttatgataggtcattagtgctttaagcaaaagatattagcagctttgactgcagcattagcaattaggaaaaaaaaaaaattaagttccctgcggacatgtaactttgccatcagttttgatgtggaaacactgtgatatataaaatgttgttggacaacagtagttttaagagtaaaatatgaaacgtttaaaaagttccaaaaaaagctagctctgtcctttacttattgagacactttaactttttcctttgtatttccattgtattagataaataaatgtgaatgtaaaattgtataaattactgtacttgaatacttctgtttcccagtgttgcttgctggacattttagtgccttggacttctattgcttctgccattagcatcaacttaccagaccccagatcaataaagggcatgtggaaggaaatcgtaggtccatgtgaccccagcagtccagcagtggttatgccaaagggaaattgaaaaagtatttttttaagtcattcaacaactttgtctagagcaggtgtaagatgagtagggtgggaagttaggttggcatcagtggttaaaaacagaaagttctgtttcgggaatagtgaggagggggtgttgtaacaaaattggacaacttaaaagaatggtgtgtgctgggtgaaagacaaagactaaagaatgaggaaacaaacgtgatgcctggccagtgactgtcatataaacctttcttatttgagctaggcttgaacagacgtgacctagaagaaactgaacataaagagaagggggtggggggctagttttcaagttggggaacctgatagtgaaaagtcacagatggagaaaattgctctcagaaacttggggtactacattttgtggaaagttaatctatcatctatctttccacatctgaattaatcattctaggaaagaatacttattcctactcatttcctttatgatgtccaaatggttgcaggatcataatctattgtgccacctttatttctagaagtacaactaatatgttcacattttcaaataaataatactccccgtaagtaataactgcaaccaatcagtgttattcagtgctatgcctccttgtaatgggtagttattaattattttcagagctttccggaaatactgtcctaactggctatgtttaggatctttgttatctctgaagacaaagaaagaagctaggactcttaattttggggtgcttcttgactcttagttgggaaactgaaaatatttccaaccttttacccacgtcaatggcatattctgggaatcaccaccaccaccaccactaccacagaaagaggctggaggctcctgtaccctgttcattccttaagggccctgcttcccttaataagtaagtaagttggtctacggccctaaatatgcaaatgagagctgaaggtttttaaaaggtagaaaggaaaagggcaagggcttccacccctgctttaaaatgatttatttattctctgcttgtatttcttgtggagagagtaaggatagaaccaacaaggggctgagtagctgagaaaggggccacccaagagtgaaacatactttataccagaggagcagtggagcctcatgcagcacattatcatttgttatttgggtttaataataattttgacatcttttcactcatacacaaaaaaagtcagaactggtgttatttactgttgatttcatcctcctgtgtatgaaataacaagcctagaggaatgaactagtgctactgaactgtttaaattatttttgtgttaatagtacactttgagtatctttttccacattaaaaactttctgaattataaatgttttccttacattatttaacaatgtacactgttaaaaataaaaataaaaattcaaactttgggggtttctcagcagccgttaattgtacattttgcactaactctgggtgttgcgcttcttgtaagattgcgctttgtgcttcagtttgttacctttgtagacttatttaatgaaaccattcaaataaaccaaacttgcttttgttga

SEQ ID NO: 284691 - DNA, 10683 bp, Homo sapiens
ggcgggatccgagcgggctgtgtggaggcttcagactcccggcgccatttagcgcggagagtttcccgggtggacgcggctcctctctcggccactccgcacccccatcttcggtgacagaaggcgcctggtgggggtggctgctcttttctctccctgttccccctcacccagtcctctaggtctcctctcctcttgcctcagagaagcagcggagctcgggccccgcggtgagcggccctcccctccccgccgttccctcctccgtcagcccccggcaccggcccgggaggagacgggtttgccaggcctggggcgggcggggaggcctcggggaagggggggcccgctcctcaggcgccgaggctccgaggctccggcccttcgcctctgggcgatgggcgacctgtgaggccggtccccatcgctgggggcgcgtgtgggaggaggcggccgcccgagtgaccgggagccgggccgcggccttccctcgcccgcctcggcccctcccactcctctgccccggggccgccaccgcccgggcgtcggacctggtcccgtgctcgcggtgccgccgccctctgggcctagcccgcccagctcggcgagcggcggcagtgggagccgcgtccgccgcatccgcctcgactcggtgccggcccctggccctcccctcatgactgcggcgcctctgctgccaccgcccgcccggccgccgctcgccgcaggatggatgcggaccgtgcggcgctaacccccgtggctcagctcccgaatcgcccgccttcgagccctcctcgtgagccgcagcagcctcggtgccagcccccgccgcagctgggcccagcggtccgcctgtccctcgttgcggcttgtcggtgctgagtgaggcgtcgtccgggtcggcgcgaacccgcccggccgcggtgccctgcagacctctgcgcgggcggctcggcccttcacgcccttttcgttcacgaatccgagcccgctcgcctctctccagcgaaccgaccatgtctggcggcgccgcagagaagcagagcagcactcccggttccctgttcctctcgccgccggctcctgcccccaagaatggctccagctccgattcctccgtgggggagaaactgggagccgcggccgccgacgctgtgaccggcaggaccgaggagtacaggcgccgccgccacactatggacaaggacagccgtggggcggccgcgaccactaccaccactgagcaccgcttcttccgccggagcgtcatctgcgactccaatgccactgcactggagcttcccggccttcctctttccctgccccagcccagcatccccgcggctgtcccgcagagtgctccaccggagccccaccgggaagagaccgtgaccgccaccgccacttcccaggtagcccagcagcctccagccgctgccgcccctggggaacaggccgtcgcgggccctgccccctcgactgtccccagcagtaccagcaaagaccgcccagtgtcccagcctagccttgtggggagcaaagaggagccgccgccggcgagaagtggcagcggcggcggcagcgccaaggagccacaggaggaacggagccagcagcaggatgatatcgaagagctggagaccaaggccgtgggaatgtctaacgatggccgctttctcaagtttgacatcgaaatcggcagaggctcctttaagacggtctacaaaggtctggacactgaaaccaccgtggaagtcgcctggtgtgaactgcaggatcgaaaattaacaaagtctgagaggcagagatttaaagaagaagctgaaatgttaaaaggtcttcagcatcccaatattgttagattttatgattcctgggaatccacagtaaaaggaaagaagtgcattgttttggtgactgaacttatgacgtctggaacacttaaaacgtatctgaaaaggtttaaagtgatgaagatcaaagttctaagaagctggtgccgtcagatccttaaaggtcttcagtttcttcatactcgaactccacctatcattcaccgcgatcttaaatgtgacaacatctttatcaccggccctactggctcagtcaagattggagacctcggtctggcaaccctgaagcgggcttcttttgccaagagtgtgataggtaccccagagttcatggcccctgagatgtatgaggagaaatatgatgaatccgttgacgtttatgcttttgggatgtgcatgcttgagatggctacatctgaatatccttactcggagtgccaaaatgctgcgcagatctaccgtcgcgtgaccagtggggtgaagccagccagttttgacaaagtagcaattcctgaagtgaaggaaattattgaaggatgcatacgacaaaacaaagatgaaagatattccatcaaagaccttttgaaccatgccttcttccaagaggaaacaggagtacgggtagaattagcagaagaagatgatggagaaaaaatagccataaaattatggctacgtattgaagatattaagaaattaaagggaaaatacaaagataatgaagctattgagttttcttttgatttagagagagatgtcccagaagatgttgcacaagaaatggtagagtctgggtatgtctgtgaaggtgatcacaagaccatggctaaagctatcaaagacagagtatcattaattaagaggaaacgagagcagcggcagttggtacgggaggagcaagaaaaaaaaaagcaggaagagagcagtctcaaacagcaggtagaacaatccagtgcttcccagacaggaatcaagcagctcccttctgctagcaccggcatacctactgcttctaccacttcagcttcagtttctacacaagtagaacctgaagaacctgaggcagatcaacatcaacaactacagtaccagcaacccagtatatctgtgttatctgatgggacggttgacagtggtcagggatcctctgtcttcacagaatctcgagtgagcagccaacagacagtttcatatggttcccaacatgaacaggcacattctacaggcacagtcccagggcatataccttctactgtccaagcacagtctcagccccatggggtatatccaccctcaagtgtggcacaggggcagagccagggtcagccatcctcaagtagcttaacaggggtttcatcttcccaacccatacaacatcctcagcagcagcagggaatacagcagacagcccctcctcaacagacagtgcagtattcactttcacagacatcaacctccagtgaggccactactgcacagccagtgagtcaacctcaagctccacaagtcttgcctcaagtatcagctggaaaacagcttccagtttcccagccagtaccaactatccaaggcgaacctcagatcccagttgcgacacaaccctcggttgttccagtccactctggtgctcatttccttccagtgggacagccgctccctactcccttgctccctcagtaccctgtctctcagattcccatatcaactcctcatgtgtctacggctcagacaggtttctcatcccttcccatcacaatggcagctggcattactcagcctctgctcacgttggcttcatctgctacaacagctgcgatcccgggggtatcaactgtggttcctagtcagcttccaacccttctgcagcctgtgactcagctgccaagtcaggttcacccacagctcctacaaccagcagttcagtccatgggaataccagctaaccttggacaagctgctgaggttccactttcctctggagatgttctgtaccagggcttcccacctcgactgccaccacagtacccaggagattcaaatattgctccctcttccaacgtggcttctgtttgcatccattctacagtcctatcccctcccatgccgacagaagtactggctacacctgggtactttcccacagtggtgcagccttatgtggaatcaaatcttttagttcctatgggtggtgtaggaggacaggttcaagtgtcccagccaggagggagtttagcacaagcccccactacatcctcccagcaagcagttttggagagtactcagggagtctctcaggttgctcctgcagagccagttgcagtagcacagccccaagctacccagccgaccactttggcttcctctgtagacagtgcacattcagatgttgcttcaggtatgagtgatggcaatgagaacgtcccatcttccagtggaaggcatgaaggaagaactacaaaacggcattaccgaaaatctgtaaggagtcgctctcgacatgaaaaaacttcacgcccaaaattaagaattttgaatgtttcaaataaaggagaccgagtagtagaatgtcaattagagactcataataggaaaatggttacattcaaatttgacctagatggtgacaaccccgaggagatagcaacaattatggtgaacaatgactttattctagcaatagagagagagtcgtttgtggatcaagtgcgagaaattattgaaaaagctgatgaaatgctcagtgaggatgtcagtgtggaaccagagggtgatcagggattggagagtctacaaggaaaggatgactatggcttttcaggttctcagaaattggaaggagagttcaaacaaccaattcctgcgtcttccatgccacagcaaataggcattcctaccagttctttaactcaagttgttcattctgcgggaaggcggtttatagtgagtcctgtgccagaaagccgattacgagaatcaaaagttttccccagtgaaataacagatacagttgctgcctctacagctcagagccctggaatgaacttgtctcactctgcatcatcccttagtctacaacaggccttttctgaacttagacgtgcccaaatgacagaaggacccaacacagcacctccaaactttagtcatacaggaccaacatttccagtagtacctcctttcttaagtagcattgctggagtcccaaccacagcagcagccacagcaccagtccctgcaacaagcagccctcctaatgacatttccacatcagtaattcagtctgaggttacagtgcccactgaagaggggattgctggagttgccaccagcacaggtgtggtaacttcaggtggtctccccataccacctgtgtctgaatcaccagtactttccagcgtagtttcaagtatcacaatacctgcagttgtctcaatatctactacatccccgtcacttcaagtccccacatccacatctgagatcgttgtttctagtacagcactgtatccttcagtaacagtttcagcaacttcagcctctgcagggggcagtactgctaccccaggtcctaagcctccagctgtagtatctcagcaggcagcaggcagcactactgtgggagccacattaacatcagtttctaccaccacttcattcccaagcacagcttcacagctgtccattcagcttagcagcagtacttctactcctactttagctgaaaccgtggtagttagcgcacactcactagataagacatctcatagcagtacaactggattggctttctccctctctgcaccatcttcctcttcctctcctggagcaggagtgtctagttatatttctcagcctggtgggctgcatcctttggtcattccatcagtgatagcttctactcctattcttccccaagcagcaggacctacttctacacctttattaccccaagtacctagtatcccacccttggtacagcctgttgccaatgtgcctgctgtacagcagacactaattcatagtcagcctcaaccagctttgcttcccaaccagccccatactcattgtcctgaagtagattctgatacacaacccaaagctcctggaattgatgacataaagactctagaagaaaagctgcggtctctgttcagtgaacacagctcatctggagctcagcatgcctctgtctcactggagacctcactagtcatagagagcactgtcacaccaggcatcccaactactgctgttgcaccaagcaaactcctgacttctaccacaagtacttgcttaccaccaaccaatttaccactaggaacagttgctttgccagttacaccagtggtcacacctgggcaagtttctaccccagtcagcactactacatcaggagtgaaacctggaactgctccctccaagccacctctaactaaggctccggtgctgccagtgggtactgaacttccagcaggtactctacccagcgagcagctgccaccttttccaggaccttctctaacccagtcccagcaacctctagaggatcttgatgctcaattgagaagaacacttagtccagagatgatcacagtgacttctgcggttggtcctgtgtccatggcggctccaacagcaatcacagaagcaggaacacagcctcagaagggtgtttctcaagtcaaagaaggccctgtcctagcaactagttcaggagctggtgtttttaagatgggacgatttcaggtttctgttgcagcagacggtgcccagaaagagggtaaaaataagtcagaagatgcaaagtctgttcattttgaatccagcacctcagagtcctcagtgctatcaagtagtagtccagagagtaccttggtgaaaccagagccgaatggcataaccatccctggtatctcttcagatgtgccagagagtgcccacaaaactactgcctcagaggcaaagtcagacactgggcagcctaccaaggttggacgttttcaggtgacaactacagcaaacaaagtgggtcgtttctctgtatcaaaaactgaggacaagatcactgacacaaagaaagaaggaccagtggcatctcctccttttatggatttggaacaagctgttcttcctgctgtgataccaaagaaagagaagcctgaactgtcagagccttcacatctaaatgggccgtcttctgacccggaggccgcttttttaagtagggatgtggatgatggttccggtagtccacactcgccccatcagctgagctcaaagagccttcctagccagaatctaagtcaaagccttagtaattcatttaactcctcttacatgagtagcgacaatgagtcagatatcgaagatgaagacttaaagttagagctgcgacgactacgagataaacatctcaaagagattcaggacctgcagagtcgccagaagcatgaaattgaatctttgtataccaaactgggcaaggtgccccctgctgttattattcccccagctgctcccctttcagggagaagacgacgacccactaaaagcaaaggcagcaaatctagtcgaagcagttccttggggaataaaagcccccagctttcaggtaacctgtctggtcagagtgcagcttcagtcttgcacccccagcagaccctccaccctcctggcaacatcccagagtccgggcagaatcagctgttacagccccttaagccatctccctccagtgacaacctctattcagccttcaccagtgatggtgccatttcagtaccaagcctttctgctccaggtcaaggaaccagcagcacaaacactgttggggcaacagtgaacagccaagccgcccaagctcagcctcctgccatgacgtccagcaggaagggcacattcacagatgacttgcacaagttggtagacaattgggcccgagatgccatgaatctctcaggcaggagaggaagcaaagggcacatgaattatgagggccctggaatggcaaggaagttctctgcacctgggcaactgtgcatctccatgacctcgaacctgggtggctctgcccccatctctgcagcatcagctacctctctaggtcacttcaccaagtctatgtgccccccacagcagtatggctttccagctaccccatttggcgctcaatggagtgggacgggtggcccagcaccacagccacttggccagttccaacctgtgggaactgcctccttgcagaatttcaacatcagcaatttgcagaaatccatcagcaaccccccaggctccaacctgcggaccacttagacctagagacattaactgaatagatctgggggcaggagatggaatgctgagggggtgggtgggggtgggaagtagcctatatactaactactagtgctgcatttaactggttatttcttgccagaggggaatgtttttaatactgcattgagccctcagaatggagagtctcccccgctccagttattggaatgggagaggaaggaaagaacagcttttttgtcaaggggcagcttcagaccatgctttcctgtttatctatactcagtaatgaggatgagggctaggaaagtcttgttcataaggaagctggagaactcaatgtaaaatcaaacccatctgtaatttcgagtgggtggagctcttgcttttggtacatgccctgaatccctcactccctcaagaatccgaaccacaggacaaaaaccacctactgggctctctcctaccctgccctcctcccttttttttacccctctcttttttattttttctttgctctttagaacccagtgaaaaataccagggtactggggtgcaactctttcttatgataggtcattagtgctttaagcaaaagatattagcagctttgactgcagcattagcaattaggaaaaaaaaaaaattaagttccctgcggacatgtaactttgccatcagttttgatgtggaaacactgtgatatataaaatgttgttggacaacagtagttttaagagtaaaatatgaaacgtttaaaaagttccaaaaaaagctagctctgtcctttacttattgagacactttaactttttcctttgtatttccattgtattagataaataaatgtgaatgtaaaattgtataaattactgtacttgaatacttctgtttcccagtgttgcttgctggacattttagtgccttggacttctattgcttctgccattagcatcaacttaccagaccccagatcaataaagggcatgtggaaggaaatcgtaggtccatgtgaccccagcagtccagcagtggttatgccaaagggaaattgaaaaagtatttttttaagtcattcaacaactttgtctagagcaggtgtaagatgagtagggtgggaagttaggttggcatcagtggttaaaaacagaaagttctgtttcgggaatagtgaggagggggtgttgtaacaaaattggacaacttaaaagaatggtgtgtgctgggtgaaagacaaagactaaagaatgaggaaacaaacgtgatgcctggccagtgactgtcatataaacctttcttatttgagctaggcttgaacagacgtgacctagaagaaactgaacataaagagaagggggtggggggctagttttcaagttggggaacctgatagtgaaaagtcacagatggagaaaattgctctcagaaaaactgtttggattgctttcctcttgttgcacatgtaccatgcatttctcagcttggggtactacattttgtggaaagttaatctatcatctatctttccacatctgaattaatcattctaggaaagaatacttattcctactcatttcctttatgatgtccaaatggttgcaggatcataatctattgtgccacctttatttctagaagtacaactaatatgttcacattttcaaataaataatactccccgtaagtaataactgcaaccaatcagtgttattcagtgctatgcctccttgtaatgggtagttattaattattttcagagctttccggaaatactgtcctaactggctatgtttaggatctttgttatctctgaagacaaagaaagaagctaggactcttaattttggggtgcttcttgactcttagttgggaaactgaaaatatttccaaccttttacccacgtcaatggcatattctgggaatcaccaccaccaccaccactaccacagaaagaggctggaggctcctgtaccctgttcattccttaagggccctgcttcccttaataagtaagtaagttggtctacggccctaaatatgcaaatgagagctgaaggtttttaaaaggtagaaaggaaaagggcaagggcttccacccctgctttaaaatgatttatttattctctgcttgtatttcttgtggagagagtaaggatagaaccaacaaggggctgagtagctgagaaaggggccacccaagagtgaaacatactttataccagaggagcagtggagcctcatgcagcacattatcatttgttatttgggtttaataataattttgacatcttttcactcatacacaaaaaaagtcagaactggtgttatttactgttgatttcatcctcctgtgtatgaaataacaagcctagaggaatgaactagtgctactgaactgtttaaattatttttgtgttaatagtacactttgagtatctttttccacattaaaaactttctgaattataaatgttttccttacattatttaacaatgtacactgttaaaaataaaaataaaaattcaaacttt

SEQ ID NO: 284692 - DNA, 10778 bp, Homo sapiens
ggcgggatccgagcgggctgtgtggaggcttcagactcccggcgccatttagcgcggagagtttcccgggtggacgcggctcctctctcggccactccgcacccccatcttcggtgacagaaggcgcctggtgggggtggctgctcttttctctccctgttccccctcacccagtcctctaggtctcctctcctcttgcctcagagaagcagcggagctcgggccccgcggtgagcggccctcccctccccgccgttccctcctccgtcagcccccggcaccggcccgggaggagacgggtttgccaggcctggggcgggcggggaggcctcggggaagggggggcccgctcctcaggcgccgaggctccgaggctccggcccttcgcctctgggcgatgggcgacctgtgaggccggtccccatcgctgggggcgcgtgtgggaggaggcggccgcccgagtgaccgggagccgggccgcggccttccctcgcccgcctcggcccctcccactcctctgccccggggccgccaccgcccgggcgtcggacctggtcccgtgctcgcggtgccgccgccctctgggcctagcccgcccagctcggcgagcggcggcagtgggagccgcgtccgccgcatccgcctcgactcggtgccggcccctggccctcccctcatgactgcggcgcctctgctgccaccgcccgcccggccgccgctcgccgcaggatggatgcggaccgtgcggcgctaacccccgtggctcagctcccgaatcgcccgccttcgagccctcctcgtgagccgcagcagcctcggtgccagcccccgccgcagctgggcccagcggtccgcctgtccctcgttgcggcttgtcggtgctgagtgaggcgtcgtccgggtcggcgcgaacccgcccggccgcggtgccctgcagacctctgcgcgggcggctcggcccttcacgcccttttcgttcacgaatccgagcccgctcgcctctctccagcgaaccgaccatgtctggcggcgccgcagagaagcagagcagcactcccggttccctgttcctctcgccgccggctcctgcccccaagaatggctccagctccgattcctccgtgggggagaaactgggagccgcggccgccgacgctgtgaccggcaggaccgaggagtacaggcgccgccgccacactatggacaaggacagccgtggggcggccgcgaccactaccaccactgagcaccgcttcttccgccggagcgtcatctgcgactccaatgccactgcactggagcttcccggccttcctctttccctgccccagcccagcatccccgcggctgtcccgcagagtgctccaccggagccccaccgggaagagaccgtgaccgccaccgccacttcccaggtagcccagcagcctccagccgctgccgcccctggggaacaggccgtcgcgggccctgccccctcgactgtccccagcagtaccagcaaagaccgcccagtgtcccagcctagccttgtggggagcaaagaggagccgccgccggcgagaagtggcagcggcggcggcagcgccaaggagccacaggaggaacggagccagcagcaggatgatatcgaagagctggagaccaaggccgtgggaatgtctaacgatggccgctttctcaagtttgacatcgaaatcggcagaggctcctttaagacggtctacaaaggtctggacactgaaaccaccgtggaagtcgcctggtgtgaactgcaggatcgaaaattaacaaagtctgagaggcagagatttaaagaagaagctgaaatgttaaaaggtcttcagcatcccaatattgttagattttatgattcctgggaatccacagtaaaaggaaagaagtgcattgttttggtgactgaacttatgacgtctggaacacttaaaacgtatctgaaaaggtttaaagtgatgaagatcaaagttctaagaagctggtgccgtcagatccttaaaggtcttcagtttcttcatactcgaactccacctatcattcaccgcgatcttaaatgtgacaacatctttatcaccggccctactggctcagtcaagattggagacctcggtctggcaaccctgaagcgggcttcttttgccaagagtgtgataggtaccccagagttcatggcccctgagatgtatgaggagaaatatgatgaatccgttgacgtttatgcttttgggatgtgcatgcttgagatggctacatctgaatatccttactcggagtgccaaaatgctgcgcagatctaccgtcgcgtgaccagtggggtgaagccagccagttttgacaaagtagcaattcctgaagtgaaggaaattattgaaggatgcatacgacaaaacaaagatgaaagatattccatcaaagaccttttgaaccatgccttcttccaagaggaaacaggagtacgggtagaattagcagaagaagatgatggagaaaaaatagccataaaattatggctacgtattgaagatattaagaaattaaagggaaaatacaaagataatgaagctattgagttttcttttgatttagagagagatgtcccagaagatgttgcacaagaaatggtagagtctgggtatgtctgtgaaggtgatcacaagaccatggctaaagctatcaaagacagagtatcattaattaagaggaaacgagagcagcggcagttggtacgggaggagcaagaaaaaaaaaagcaggaagagagcagtctcaaacagcaggtagaacaatccagtgcttcccagacaggaatcaagcagctcccttctgctagcaccggcatacctactgcttctaccacttcagcttcagtttctacacaagtagaacctgaagaacctgaggcagatcaacatcaacaactacagtaccagcaacccagtatatctgtgttatctgatgggacggttgacagtggtcagggatcctctgtcttcacagaatctcgagtgagcagccaacagacagtttcatatggttcccaacatgaacaggcacattctacaggcacagtcccagggcatataccttctactgtccaagcacagtctcagccccatggggtatatccaccctcaagtgtggcacaggggcagagccagggtcagccatcctcaagtagcttaacaggggtttcatcttcccaacccatacaacatcctcagcagcagcagggaatacagcagacagcccctcctcaacagacagtgcagtattcactttcacagacatcaacctccagtgaggccactactgcacagccagtgagtcaacctcaagctccacaagtcttgcctcaagtatcagctggaaaacagcttccagtttcccagccagtaccaactatccaaggcgaacctcagatcccagttgcgacacaaccctcggttgttccagtccactctggtgctcatttccttccagtgggacagccgctccctactcccttgctccctcagtaccctgtctctcagattcccatatcaactcctcatgtgtctacggctcagacaggtttctcatcccttcccatcacaatggcagctggcattactcagcctctgctcacgttggcttcatctgctacaacagctgcgatcccgggggtatcaactgtggttcctagtcagcttccaacccttctgcagcctgtgactcagctgccaagtcaggttcacccacagctcctacaaccagcagttcagtccatgggaataccagctaaccttggacaagctgctgaggttccactttcctctggagatgttctgtaccagggcttcccacctcgactgccaccacagtacccaggagattcaaatattgctccctcttccaacgtggcttctgtttgcatccattctacagtcctatcccctcccatgccgacagaagtactggctacacctgggtactttcccacagtggtgcagccttatgtggaatcaaatcttttagttcctatgggtggtgtaggaggacaggttcaagtgtcccagccaggagggagtttagcacaagcccccactacatcctcccagcaagcagttttggagagtactcagggagtctctcaggttgctcctgcagagccagttgcagtagcacagccccaagctacccagccgaccactttggcttcctctgtagacagtgcacattcagatgttgcttcaggtatgagtgatggcaatgagaacgtcccatcttccagtggaaggcatgaaggaagaactacaaaacggcattaccgaaaatctgtaaggagtcgctctcgacatgaaaaaacttcacgcccaaaattaagaattttgaatgtttcaaataaaggagaccgagtagtagaatgtcaattagagactcataataggaaaatggttacattcaaatttgacctagatggtgacaaccccgaggagatagcaacaattatggtgaacaatgactttattctagcaatagagagagagtcgtttgtggatcaagtgcgagaaattattgaaaaagctgatgaaatgctcagtgaggatgtcagtgtggaaccagagggtgatcagggattggagagtctacaaggaaaggatgactatggcttttcaggttctcagaaattggaaggagagttcaaacaaccaattcctgcgtcttccatgccacagcaaataggcattcctaccagttctttaactcaagttgttcattctgcgggaaggcggtttatagtgagtcctgtgccagaaagccgattacgagaatcaaaagttttccccagtgaaataacagatacagttgctgcctctacagctcagagccctggaatgaacttgtctcactctgcatcatcccttagtctacaacaggccttttctgaacttagacgtgcccaaatgacagaaggacccaacacagcacctccaaactttagtcatacaggaccaacatttccagtagtacctcctttcttaagtagcattgctggagtcccaaccacagcagcagccacagcaccagtccctgcaacaagcagccctcctaatgacatttccacatcagtaattcagtctgaggttacagtgcccactgaagaggggattgctggagttgccaccagcacaggtgtggtaacttcaggtggtctccccataccacctgtgtctgaatcaccagtactttccagcgtagtttcaagtatcacaatacctgcagttgtctcaatatctactacatccccgtcacttcaagtccccacatccacatctgagatcgttgtttctagtacagcactgtatccttcagtaacagtttcagcaacttcagcctctgcagggggcagtactgctaccccaggtcctaagcctccagctgtagtatctcagcaggcagcaggcagcactactgtgggagccacattaacatcagtttctaccaccacttcattcccaagcacagcttcacagctgtccattcagcttagcagcagtacttctactcctactttagctgaaaccgtggtagttagcgcacactcactagataagacatctcatagcagtacaactggattggctttctccctctctgcaccatcttcctcttcctctcctggagcaggagtgtctagttatatttctcagcctggtgggctgcatcctttggtcattccatcagtgatagcttctactcctattcttccccaagcagcaggacctacttctacacctttattaccccaagtacctagtatcccacccttggtacagcctgttgccaatgtgcctgctgtacagcagacactaattcatagtcagcctcaaccagctttgcttcccaaccagccccatactcattgtcctgaagtagattctgatacacaacccaaagctcctggaattgatgacataaagactctagaagaaaagctgcggtctctgttcagtgaacacagctcatctggagctcagcatgcctctgtctcactggagacctcactagtcatagagagcactgtcacaccaggcatcccaactactgctgttgcaccaagcaaactcctgacttctaccacaagtacttgcttaccaccaaccaatttaccactaggaacagttgctttgccagttacaccagtggtcacacctgggcaagtttctaccccagtcagcactactacatcaggagtgaaacctggaactgctccctccaagccacctctaactaaggctccggtgctgccagtgggtactgaacttccagcaggtactctacccagcgagcagctgccaccttttccaggaccttctctaacccagtcccagcaacctctagaggatcttgatgctcaattgagaagaacacttagtccagagatgatcacagtgacttctgcggttggtcctgtgtccatggcggctccaacagcaatcacagaagcaggaacacagcctcagaagggtgtttctcaagtcaaagaaggccctgtcctagcaactagttcaggagctggtgtttttaagatgggacgatttcaggtttctgttgcagcagacggtgcccagaaagagggtaaaaataagtcagaagatgcaaagtctgttcattttgaatccagcacctcagagtcctcagtgctatcaagtagtagtccagagagtaccttggtgaaaccagagccgaatggcataaccatccctggtatctcttcagatgtgccagagagtgcccacaaaactactgcctcagaggcaaagtcagacactgggcagcctaccaaggttggacgttttcaggtgacaactacagcaaacaaagtgggtcgtttctctgtatcaaaaactgaggacaagatcactgacacaaagaaagaaggaccagtggcatctcctccttttatggatttggaacaagctgttcttcctgctgtgataccaaagaaagagaagcctgaactgtcagagccttcacatctaaatgggccgtcttctgacccggaggccgcttttttaagtagggatgtggatgatggttccggtagtccacactcgccccatcagctgagctcaaagagccttcctagccagaatctaagtcaaagccttagtaattcatttaactcctcttacatgagtagcgacaatgagtcagatatcgaagatgaagacttaaagttagagctgcgacgactacgagataaacatctcaaagagattcaggacctgcagagtcgccagaagcatgaaattgaatctttgtataccaaactgggcaaggtgccccctgctgttattattcccccagctgctcccctttcagggagaagacgacgacccactaaaagcaaaggcagcaaatctagtcgaagcagttccttggggaataaaagcccccagctttcaggtaacctgtctggtcagagtgcagcttcagtcttgcacccccagcagaccctccaccctcctggcaacatcccagagtccgggcagaatcagctgttacagccccttaagccatctccctccagtgacaacctctattcagccttcaccagtgatggtgccatttcagtaccaagcctttctgctccaggtcaaggaaccagcagcacaaacactgttggggcaacagtgaacagccaagccgcccaagctcagcctcctgccatgacgtccagcaggaagggcacattcacagatgacttgcacaagttggtagacaattgggcccgagatgccatgaatctctcaggcaggagaggaagcaaagggcacatgaattatgagggccctggaatggcaaggaagttctctgcacctgggcaactgtgcatctccatgacctcgaacctgggtggctctgcccccatctctgcagcatcagctacctctctaggtcacttcaccaagtctatgtgccccccacagcagtatggctttccagctaccccatttggcgctcaatggagtgggacgggtggcccagcaccacagccacttggccagttccaacctgtgggaactgcctccttgcagaatttcaacatcagcaatttgcagaaatccatcagcaaccccccaggctccaacctgcggaccacttagacctagagacattaactgaatagatctgggggcaggagatggaatgctgagggggtgggtgggggtgggaagtagcctatatactaactactagtgctgcatttaactggttatttcttgccagaggggaatgtttttaatactgcattgagccctcagaatggagagtctcccccgctccagttattggaatgggagaggaaggaaagaacagcttttttgtcaaggggcagcttcagaccatgctttcctgtttatctatactcagtaatgaggatgagggctaggaaagtcttgttcataaggaagctggagaactcaatgtaaaatcaaacccatctgtaatttcgagtgggtggagctcttgcttttggtacatgccctgaatccctcactccctcaagaatccgaaccacaggacaaaaaccacctactgggctctctcctaccctgccctcctcccttttttttacccctctcttttttattttttctttgctctttagaacccagtgaaaaataccagggtactggggtgcaactctttcttatgataggtcattagtgctttaagcaaaagatattagcagctttgactgcagcattagcaattaggaaaaaaaaaaaattaagttccctgcggacatgtaactttgccatcagttttgatgtggaaacactgtgatatataaaatgttgttggacaacagtagttttaagagtaaaatatgaaacgtttaaaaagttccaaaaaaagctagctctgtcctttacttattgagacactttaactttttcctttgtatttccattgtattagataaataaatgtgaatgtaaaattgtataaattactgtacttgaatacttctgtttcccagtgttgcttgctggacattttagtgccttggacttctattgcttctgccattagcatcaacttaccagaccccagatcaataaagggcatgtggaaggaaatcgtaggtccatgtgaccccagcagtccagcagtggttatgccaaagggaaattgaaaaagtatttttttaagtcattcaacaactttgtctagagcaggtgtaagatgagtagggtgggaagttaggttggcatcagtggttaaaaacagaaagttctgtttcgggaatagtgaggagggggtgttgtaacaaaattggacaacttaaaagaatggtgtgtgctgggtgaaagacaaagactaaagaatgaggaaacaaacgtgatgcctggccagtgactgtcatataaacctttcttatttgagctaggcttgaacagacgtgacctagaagaaactgaacataaagagaagggggtggggggctagttttcaagttggggaacctgatagtgaaaagtcacagatggagaaaattgctctcagaaaaactgtttggattgctttcctcttgttgcacatgtaccatgcatttctcagcttggggtactacattttgtggaaagttaatctatcatctatctttccacatctgaattaatcattctaggaaagaatacttattcctactcatttcctttatgatgtccaaatggttgcaggatcataatctattgtgccacctttatttctagaagtacaactaatatgttcacattttcaaataaataatactccccgtaagtaataactgcaaccaatcagtgttattcagtgctatgcctccttgtaatgggtagttattaattattttcagagctttccggaaatactgtcctaactggctatgtttaggatctttgttatctctgaagacaaagaaagaagctaggactcttaattttggggtgcttcttgactcttagttgggaaactgcaccaccaccactaccacagaaagaggctggaggctcctgtaccctgttcattccttaagggccctgcttcccttaataagtaagtaagttggtctacggccctaaatatgcaaatgagagctgaaggtttttaaaaggtagaaaggaaaagggcaagggcttccacccctgctttaaaatgatttatttattctctgcttgtatttcttgtggagagagtaaggatagaaccaacaaggggctgagtagctgagaaaggggccacccaagagtgaaacatactttataccagaggagcagtggagcctcatgcagcacattatcatttgttatttgggtttaataataattttgacatcttttcactcatacacaaaaaaagtcagaactggtgttatttactgttgatttcatcctcctgtgtatgaaataacaagcctagaggaatgaactagtgctactgaactgtttaaattatttttgtgttaatagtacactttgagtatctttttccacattaaaaactttctgaattataaatgttttccttacattatttaacaatgtacactgttaaaaataaaaataaaaattcaaactttgggggtttctcagcagccgttaattgtacattttgcactaactctgggtgttgcgcttcttgtaagattgcgctttgtgcttcagtttgttacctttgtagacttatttaatgaaaccattcaaataaaccaaacttgcttttgttga

SEQ ID NO: 284693 - DNA, 11104 bp, Homo sapiens
ggcgggatccgagcgggctgtgtggaggcttcagactcccggcgccatttagcgcggagagtttcccgggtggacgcggctcctctctcggccactccgcacccccatcttcggtgacagaaggcgcctggtgggggtggctgctcttttctctccctgttccccctcacccagtcctctaggtctcctctcctcttgcctcagagaagcagcggagctcgggccccgcggtgagcggccctcccctccccgccgttccctcctccgtcagcccccggcaccggcccgggaggagacgggtttgccaggcctggggcgggcggggaggcctcggggaagggggggcccgctcctcaggcgccgaggctccgaggctccggcccttcgcctctgggcgatgggcgacctgtgaggccggtccccatcgctgggggcgcgtgtgggaggaggcggccgcccgagtgaccgggagccgggccgcggccttccctcgcccgcctcggcccctcccactcctctgccccggggccgccaccgcccgggcgtcggacctggtcccgtgctcgcggtgccgccgccctctgggcctagcccgcccagctcggcgagcggcggcagtgggagccgcgtccgccgcatccgcctcgactcggtgccggcccctggccctcccctcatgactgcggcgcctctgctgccaccgcccgcccggccgccgctcgccgcaggatggatgcggaccgtgcggcgctaacccccgtggctcagctcccgaatcgcccgccttcgagccctcctcgtgagccgcagcagcctcggtgccagcccccgccgcagctgggcccagcggtccgcctgtccctcgttgcggcttgtcggtgctgagtgaggcgtcgtccgggtcggcgcgaacccgcccggccgcggtgccctgcagacctctgcgcgggcggctcggcccttcacgcccttttcgttcacgaatccgagcccgctcgcctctctccagcgaaccgaccatgtctggcggcgccgcagagaagcagagcagcactcccggttccctgttcctctcgccgccggctcctgcccccaagaatggctccagctccgattcctccgtgggggagaaactgggagccgcggccgccgacgctgtgaccggcaggaccgaggagtacaggcgccgccgccacactatggacaaggacagccgtggggcggccgcgaccactaccaccactgagcaccgcttcttccgccggagcgtcatctgcgactccaatgccactgcactggagcttcccggccttcctctttccctgccccagcccagcatccccgcggctgtcccgcagagtgctccaccggagccccaccgggaagagaccgtgaccgccaccgccacttcccaggtagcccagcagcctccagccgctgccgcccctggggaacaggccgtcgcgggccctgccccctcgactgtccccagcagtaccagcaaagaccgcccagtgtcccagcctagccttgtggggagcaaagaggagccgccgccggcgagaagtggcagcggcggcggcagcgccaaggagccacaggaggaacggagccagcagcaggatgatatcgaagagctggagaccaaggccgtgggaatgtctaacgatggccgctttctcaagtttgacatcgaaatcggcagaggctcctttaagacggtctacaaaggtctggacactgaaaccaccgtggaagtcgcctggtgtgaactgcaggatcgaaaattaacaaagtctgagaggcagagatttaaagaagaagctgaaatgttaaaaggtcttcagcatcccaatattgttagattttatgattcctgggaatccacagtaaaaggaaagaagtgcattgttttggtgactgaacttatgacgtctggaacacttaaaacgtatctgaaaaggtttaaagtgatgaagatcaaagttctaagaagctggtgccgtcagatccttaaaggtcttcagtttcttcatactcgaactccacctatcattcaccgcgatcttaaatgtgacaacatctttatcaccggccctactggctcagtcaagattggagacctcggtctggcaaccctgaagcgggcttcttttgccaagagtgtgataggtaccccagagttcatggcccctgagatgtatgaggagaaatatgatgaatccgttgacgtttatgcttttgggatgtgcatgcttgagatggctacatctgaatatccttactcggagtgccaaaatgctgcgcagatctaccgtcgcgtgaccagtggggtgaagccagccagttttgacaaagtagcaattcctgaagtgaaggaaattattgaaggatgcatacgacaaaacaaagatgaaagatattccatcaaagaccttttgaaccatgccttcttccaagaggaaacaggagtacgggtagaattagcagaagaagatgatggagaaaaaatagccataaaattatggctacgtattgaagatattaagaaattaaagggaaaatacaaagataatgaagctattgagttttcttttgatttagagagagatgtcccagaagatgttgcacaagaaatggtagagtctgggtatgtctgtgaaggtgatcacaagaccatggctaaagctatcaaagacagagtatcattaattaagaggaaacgagagcagcggcagttggtacgggaggagcaagaaaaaaaaaagcaggaagagagcagtctcaaacagcaggtagaacaatccagtgcttcccagacaggaatcaagcagctcccttctgctagcaccggcatacctactgcttctaccacttcagcttcagtttctacacaagtagaacctgaagaacctgaggcagatcaacatcaacaactacagtaccagcaacccagtatatctgtgttatctgatgggacggttgacagtggtcagggatcctctgtcttcacagaatctcgagtgagcagccaacagacagtttcatatggttcccaacatgaacaggcacattctacaggcacagtcccagggcatataccttctactgtccaagcacagtctcagccccatggggtatatccaccctcaagtgtggcacaggggcagagccagggtcagccatcctcaagtagcttaacaggggtttcatcttcccaacccatacaacatcctcagcagcagcagggaatacagcagacagcccctcctcaacagacagtgcagtattcactttcacagacatcaacctccagtgaggccactactgcacagccagtgagtcaacctcaagctccacaagtcttgcctcaagtatcagctggaaaacagcttccagtttcccagccagtaccaactatccaaggcgaacctcagatcccagttgcgacacaaccctcggttgttccagtccactctggtgctcatttccttccagtgggacagccgctccctactcccttgctccctcagtaccctgtctctcagattcccatatcaactcctcatgtgtctacggctcagacaggtttctcatcccttcccatcacaatggcagctggcattactcagcctctgctcacgttggcttcatctgctacaacagctgcgatcccgggggtatcaactgtggttcctagtcagcttccaacccttctgcagcctgtgactcagctgccaagtcaggttcacccacagctcctacaaccagcagttcagtccatgggaataccagctaaccttggacaagctgctgaggttccactttcctctggagatgttctgtaccagggcttcccacctcgactgccaccacagtacccaggagattcaaatattgctccctcttccaacgtggcttctgtttgcatccattctacagtcctatcccctcccatgccgacagaagtactggctacacctgggtactttcccacagtggtgcagccttatgtggaatcaaatcttttagttcctatgggtggtgtaggaggacaggttcaagtgtcccagccaggagggagtttagcacaagcccccactacatcctcccagcaagcagttttggagagtactcagggagtctctcaggttgctcctgcagagccagttgcagtagcacagccccaagctacccagccgaccactttggcttcctctgtagacagtgcacattcagatgttgcttcaggtatgagtgatggcaatgagaacgtcccatcttccagtggaaggcatgaaggaagaactacaaaacggcattaccgaaaatctgtaaggagtcgctctcgacatgaaaaaacttcacgcccaaaattaagaattttgaatgtttcaaataaaggagaccgagtagtagaatgtcaattagagactcataataggaaaatggttacattcaaatttgacctagatggtgacaaccccgaggagatagcaacaattatggtgaacaatgactttattctagcaatagagagagagtcgtttgtggatcaagtgcgagaaattattgaaaaagctgatgaaatgctcagtgaggatgtcagtgtggaaccagagggtgatcagggattggagagtctacaaggaaaggatgactatggcttttcaggttctcagaaattggaaggagagttcaaacaaccaattcctgcgtcttccatgccacagcaaataggcattcctaccagttctttaactcaagttgttcattctgcgggaaggcggtttatagtgagtcctgtgccagaaagccgattacgagaatcaaaagttttccccagtgaaataacagatacagttgctgcctctacagctcagagccctggaatgaacttgtctcactctgcatcatcccttagtctacaacaggccttttctgaacttagacgtgcccaaatgacagaaggacccaacacagcacctccaaactttagtcatacaggaccaacatttccagtagtacctcctttcttaagtagcattgctggagtcccaaccacagcagcagccacagcaccagtccctgcaacaagcagccctcctaatgacatttccacatcagtaattcagtctgaggttacagtgcccactgaagaggggattgctggagttgccaccagcacaggtgtggtaacttcaggtggtctccccataccacctgtgtctgaatcaccagtactttccagcgtagtttcaagtatcacaatacctgcagttgtctcaatatctactacatccccgtcacttcaagtccccacatccacatctgagatcgttgtttctagtacagcactgtatccttcagtaacagtttcagcaacttcagcctctgcagggggcagtactgctaccccaggtcctaagcctccagctgtagtatctcagcaggcagcaggcagcactactgtgggagccacattaacatcagtttctaccaccacttcattcccaagcacagcttcacagctgtccattcagcttagcagcagtacttctactcctactttagctgaaaccgtggtagttagcgcacactcactagataagacatctcatagcagtacaactggattggctttctccctctctgcaccatcttcctcttcctctcctggagcaggagtgtctagttatatttctcagcctggtgggctgcatcctttggtcattccatcagtgatagcttctactcctattcttccccaagcagcaggacctacttctacacctttattaccccaagtacctagtatcccacccttggtacagcctgttgccaatgtgcctgctgtacagcagacactaattcatagtcagcctcaaccagctttgcttcccaaccagccccatactcattgtcctgaagtagattctgatacacaacccaaagctcctggaattgatgacataaagactctagaagaaaagctgcggtctctgttcagtgaacacagctcatctggagctcagcatgcctctgtctcactggagacctcactagtcatagagagcactgtcacaccaggcatcccaactactgctgttgcaccaagcaaactcctgacttctaccacaagtacttgcttaccaccaaccaatttaccactaggaacagttgctttgccagttacaccagtggtcacacctgggcaagtttctaccccagtcagcactactacatcaggagtgaaacctggaactgctccctccaagccacctctaactaaggctccggtgctgccagtgggtactgaacttccagcaggtactctacccagcgagcagctgccaccttttccaggaccttctctaacccagtcccagcaacctctagaggatcttgatgctcaattgagaagaacacttagtccagagatgatcacagtgacttctgcggttggtcctgtgtccatggcggctccaacagcaatcacagaagcaggaacacagcctcagaagggtgtttctcaagtcaaagaaggccctgtcctagcaactagttcaggagctggtgtttttaagatgggacgatttcaggtttctgttgcagcagacggtgcccagaaagagggtaaaaataagtcagaagatgcaaagtctgttcattttgaatccagcacctcagagtcctcagtgctatcaagtagtagtccagagagtaccttggtgaaaccagagccgaatggcataaccatccctggtatctcttcagatgtgccagagagtgcccacaaaactactgcctcagaggcaaagtcagacactgggcagcctaccaaggttggacgttttcaggtgacaactacagcaaacaaagtgggtcgtttctctgtatcaaaaactgaggacaagatcactgacacaaagaaagaaggaccagtggcatctcctccttttatggatttggaacaagctgttcttcctgctgtgataccaaagaaagagaagcctgaactgtcagagccttcacatctaaatgggccgtcttctgacccggaggccgcttttttaagtagggatgtggatgatggttccggtagtccacactcgccccatcagctgagctcaaagagccttcctagccagaatctaagtcaaagccttagtaattcatttaactcctcttacatgagtagcgacaatgagtcagatatcgaagatgaagacttaaagttagagctgcgacgactacgagataaacatctcaaagagattcaggacctgcagagtcgccagaagcatgaaattgaatctttgtataccaaactgggcaaggtgccccctgctgttattattcccccagctgctcccctttcagggagaagacgacgacccactaaaagcaaaggcagcaaatctagtcgaagcagttccttggggaataaaagcccccagctttcaggtaacctgtctggtcagagtgcagcttcagtcttgcacccccagcagaccctccaccctcctggcaacatcccagagtccgggcagaatcagctgttacagccccttaagccatctccctccagtgacaacctctattcagccttcaccagtgatggtgccatttcagtaccaagcctttctgctccaggtcaaggaaccagcagcacaaacactgttggggcaacagtgaacagccaagccgcccaagctcagcctcctgccatgacgtccagcaggaagggcacattcacagatgacttgcacaagttggtagacaattgggcccgagatgccatgaatctctcaggcaggagaggaagcaaagggcacatgaattatgagggccctggaatggcaaggaagttctctgcacctgggcaactgtgcatctccatgacctcgaacctgggtggctctgcccccatctctgcagcatcagctacctctctaggtcacttcaccaagtctatgtgccccccacagcagtatggctttccagctaccccatttggcgctcaatggagtgggacgggtggcccagcaccacagccacttggccagttccaacctgtgggaactgcctccttgcagaatttcaacatcagcaatttgcagaaatccatcagcaaccccccaggctccaacctgcggaccacttagacctagagacattaactgaatagatctgggggcaggagatggaatgctgagggggtgggtgggggtgggaagtagcctatatactaactactagtgctgcatttaactggttatttcttgccagaggggaatgtttttaatactgcattgagccctcagaatggagagtctcccccgctccagttattggaatgggagaggaaggaaagaacagcttttttgtcaaggggcagcttcagaccatgctttcctgtttatctatactcagtaatgaggatgagggctaggaaagtcttgttcataaggaagctggagaactcaatgtaaaatcaaacccatctgtaatttcgagtgggtggagctcttgcttttggtacatgccctgaatccctcactccctcaagaatccgaaccacaggacaaaaaccacctactgggctctctcctaccctgccctcctcccttttttttacccctctcttttttattttttctttgctctttagaacccagtgaaaaataccagggtactggggtgcaactctttcttatgataggtcattagtgctttaagcaaaagatattagcagctttgactgcagcattagcaattaggaaaaaaaaaaaattaagttccctgcggacatgtaactttgccatcagttttgatgtggaaacactgtgatatataaaatgttgttggacaacagtagttttaagagtaaaatatgaaacgtttaaaaagttccaaaaaaagctagctctgtcctttacttattgagacactttaactttttcctttgtatttccattgtattagataaataaatgtgaatgtaaaattgtataaattactgtacttgaatacttctgtttcccagtgttgcttgctggacattttagtgccttggacttctattgcttctgccattagcatcaacttaccagaccccagatcaataaagggcatgtggaaggaaatcgtaggtccatgtgaccccagcagtccagcagtggttatgccaaagggaaattgaaaaagtatttttttaagtcattcaacaactttgtctagagcaggtgtaagatgagtagggtgggaagttaggttggcatcagtggttaaaaacagaaagttctgtttcgggaatagtgaggagggggtgttgtaacaaaattggacaacttaaaagaatggtgtgtgctgggtgaaagacaaagactaaagaatgaggaaacaaacgtgatgcctggccagtgactgtcatataaacctttcttatttgagctaggcttgaacagacgtgacctagaagaaactgaacataaagagaagggggtggggggctagttttcaagttggggaacctgatagtgaaaagtcacagatggagaaaattgctctcagaaaaactgtttggattgctttcctcttgttgcacatgtaccatgcatttctcagcttggggtactacattttgtggaaagttaatctatcatctatctttccacatctgaattaatcattctaggaaagaatacttattcctactcatttcctttatgatgtccaaatggttgcaggatcataatctattgtgccacctttatttctagaagtacaactaatatgttcacattttcaaataaataatactccccgtaagtaataactgcaaccaatcagtgttattcagtgctatgcctccttgtaatgggtagttattaattattttcagagctttccggaaatactgtcctaactggctatgtttaggatctttgttatctctgaagacaaagaaagaagctaggactcttaattttggggtgcttcttgactcttagttgggaaactgaaaatatttccaaccttttacccacgtcaatggcatattctgggaatcaccaccaccaccaccactaccacagaaagaggctggaggctcctgtaccctgttcattccttaagggccctgcttcccttaataagtaagtaagttggtctacggccctaaatatgcaaatgagagctgaaggtttttaaaaggtagaaaggaaaagggcaagggcttccacccctgctttaaaatgatttatttattctctgcttgtatttcttgtggagagagtaaggatagaaccaacaaggggctgagtagctgagaaaggggccacccaagagtgaaacatactttataccagaggagcagtggagcctcatgcagcacattatcatttgttatttgggtttaataataattttgacatcttttcactcatacacaaaaaaagtcagaactggtgttatttactgttgatttcatcctcctgtgtatgaaataacaagcctagaggaatgaactagtgctactgaactgtttaaattatttttgtgttaatagtacactttgagtatctttttccacattaaaaactttctgaattataaatgttttccttacattatttaacaatgtacactgttaaaaataaaaataaaaattcaaactttgggggtttctcagcagccgttaattgtacattttgcactaactctgggtgttgcgcttcttgtaagattgcgctttgtgcttcagtttgttacctttgtagacttatttaatgaaaccattcaaataaaccaaacttgcttttgttgagctgtggggtttcatttccagaagattccttcacattctcattggcactattttgagttaagtgcaatttataactggatccctaattcctgggagctcctttgctgtctccttaacttcgaaaggaatagaaacggtcggctgccggctagtactttcagacttccttatctcaggttcacagcttcccaaatgggtctgagccaaaaaataggaagtcactgcttcaagattagccacagcccagcccaaaataatacgtctaaaaaaatt

SEQ ID NO: 284694 - DNA, 10883 bp, Homo sapiens
ggcgggatccgagcgggctgtgtggaggcttcagactcccggcgccatttagcgcggagagtttcccgggtggacgcggctcctctctcggccactccgcacccccatcttcggtgacagaaggcgcctggtgggggtggctgctcttttctctccctgttccccctcacccagtcctctaggtctcctctcctcttgcctcagagaagcagcggagctcgggccccgcggtgagcggccctcccctccccgccgttccctcctccgtcagcccccggcaccggcccgggaggagacgggtttgccaggcctggggcgggcggggaggcctcggggaagggggggcccgctcctcaggcgccgaggctccgaggctccggcccttcgcctctgggcgatgggcgacctgtgaggccggtccccatcgctgggggcgcgtgtgggaggaggcggccgcccgagtgaccgggagccgggccgcggccttccctcgcccgcctcggcccctcccactcctctgccccggggccgccaccgcccgggcgtcggacctggtcccgtgctcgcggtgccgccgccctctgggcctagcccgcccagctcggcgagcggcggcagtgggagccgcgtccgccgcatccgcctcgactcggtgccggcccctggccctcccctcatgactgcggcgcctctgctgccaccgcccgcccggccgccgctcgccgcaggatggatgcggaccgtgcggcgctaacccccgtggctcagctcccgaatcgcccgccttcgagccctcctcgtgagccgcagcagcctcggtgccagcccccgccgcagctgggcccagcggtccgcctgtccctcgttgcggcttgtcggtgctgagtgaggcgtcgtccgggtcggcgcgaacccgcccggccgcggtgccctgcagacctctgcgcgggcggctcggcccttcacgcccttttcgttcacgaatccgagcccgctcgcctctctccagcgaaccgaccatgtctggcggcgccgcagagaagcagagcagcactcccggttccctgttcctctcgccgccggctcctgcccccaagaatggctccagctccgattcctccgtgggggagaaactgggagccgcggccgccgacgctgtgaccggcaggaccgaggagtacaggcgccgccgccacactatggacaaggacagccgtggggcggccgcgaccactaccaccactgagcaccgcttcttccgccggagcgtcatctgcgactccaatgccactgcactggagcttcccggccttcctctttccctgccccagcccagcatccccgcggctgtcccgcagagtgctccaccggagccccaccgggaagagaccgtgaccgccaccgccacttcccaggtagcccagcagcctccagccgctgccgcccctggggaacaggccgtcgcgggccctgccccctcgactgtccccagcagtaccagcaaagaccgcccagtgtcccagcctagccttgtggggagcaaagaggagccgccgccggcgagaagtggcagcggcggcggcagcgccaaggagccacaggaggaacggagccagcagcaggatgatatcgaagagctggagaccaaggccgtgggaatgtctaacgatggccgctttctcaagtttgacatcgaaatcggcagaggctcctttaagacggtctacaaaggtctggacactgaaaccaccgtggaagtcgcctggtgtgaactgcaggatcgaaaattaacaaagtctgagaggcagagatttaaagaagaagctgaaatgttaaaaggtcttcagcatcccaatattgttagattttatgattcctgggaatccacagtaaaaggaaagaagtgcattgttttggtgactgaacttatgacgtctggaacacttaaaacgtatctgaaaaggtttaaagtgatgaagatcaaagttctaagaagctggtgccgtcagatccttaaaggtcttcagtttcttcatactcgaactccacctatcattcaccgcgatcttaaatgtgacaacatctttatcaccggccctactggctcagtcaagattggagacctcggtctggcaaccctgaagcgggcttcttttgccaagagtgtgataggtaccccagagttcatggcccctgagatgtatgaggagaaatatgatgaatccgttgacgtttatgcttttgggatgtgcatgcttgagatggctacatctgaatatccttactcggagtgccaaaatgctgcgcagatctaccgtcgcgtgaccagtggggtgaagccagccagttttgacaaagtagcaattcctgaagtgaaggaaattattgaaggatgcatacgacaaaacaaagatgaaagatattccatcaaagaccttttgaaccatgccttcttccaagaggaaacaggagtacgggtagaattagcagaagaagatgatggagaaaaaatagccataaaattatggctacgtattgaagatattaagaaattaaagggaaaatacaaagataatgaagctattgagttttcttttgatttagagagagatgtcccagaagatgttgcacaagaaatggtagagtctgggtatgtctgtgaaggtgatcacaagaccatggctaaagctatcaaagacagagtatcattaattaagaggaaacgagagcagcggcagttggtacgggaggagcaagaaaaaaaaaagcaggaagagagcagtctcaaacagcaggtagaacaatccagtgcttcccagacaggaatcaagcagctcccttctgctagcaccggcatacctactgcttctaccacttcagcttcagtttctacacaagtagaacctgaagaacctgaggcagatcaacatcaacaactacagtaccagcaacccagtatatctgtgttatctgatgggacggttgacagtggtcagggatcctctgtcttcacagaatctcgagtgagcagccaacagacagtttcatatggttcccaacatgaacaggcacattctacaggcacagtcccagggcatataccttctactgtccaagcacagtctcagccccatggggtatatccaccctcaagtgtggcacaggggcagagccagggtcagccatcctcaagtagcttaacaggggtttcatcttcccaacccatacaacatcctcagcagcagcagggaatacagcagacagcccctcctcaacagacagtgcagtattcactttcacagacatcaacctccagtgaggccactactgcacagccagtgagtcaacctcaagctccacaagtcttgcctcaagtatcagctggaaaacagcttccagtttcccagccagtaccaactatccaaggcgaacctcagatcccagttgcgacacaaccctcggttgttccagtccactctggtgctcatttccttccagtgggacagccgctccctactcccttgctccctcagtaccctgtctctcagattcccatatcaactcctcatgtgtctacggctcagacaggtttctcatcccttcccatcacaatggcagctggcattactcagcctctgctcacgttggcttcatctgctacaacagctgcgatcccgggggtatcaactgtggttcctagtcagcttccaacccttctgcagcctgtgactcagctgccaagtcaggttcacccacagctcctacaaccagcagttcagtccatgggaataccagctaaccttggacaagctgctgaggttccactttcctctggagatgttctgtaccagggcttcccacctcgactgccaccacagtacccaggagattcaaatattgctccctcttccaacgtggcttctgtttgcatccattctacagtcctatcccctcccatgccgacagaagtactggctacacctgggtactttcccacagtggtgcagccttatgtggaatcaaatcttttagttcctatgggtggtgtaggaggacaggttcaagtgtcccagccaggagggagtttagcacaagcccccactacatcctcccagcaagcagttttggagagtactcagggagtctctcaggttgctcctgcagagccagttgcagtagcacagccccaagctacccagccgaccactttggcttcctctgtagacagtgcacattcagatgttgcttcaggtatgagtgatggcaatgagaacgtcccatcttccagtggaaggcatgaaggaagaactacaaaacggcattaccgaaaatctgtaaggagtcgctctcgacatgaaaaaacttcacgcccaaaattaagaattttgaatgtttcaaataaaggagaccgagtagtagaatgtcaattagagactcataataggaaaatggttacattcaaatttgacctagatggtgacaaccccgaggagatagcaacaattatggtgaacaatgactttattctagcaatagagagagagtcgtttgtggatcaagtgcgagaaattattgaaaaagctgatgaaatgctcagtgaggatgtcagtgtggaaccagagggtgatcagggattggagagtctacaaggaaaggatgactatggcttttcaggttctcagaaattggaaggagagttcaaacaaccaattcctgcgtcttccatgccacagcaaataggcattcctaccagttctttaactcaagttgttcattctgcgggaaggcggtttatagtgagtcctgtgccagaaagccgattacgagaatcaaaagttttccccagtgaaataacagatacagttgctgcctctacagctcagagccctggaatgaacttgtctcactctgcatcatcccttagtctacaacaggccttttctgaacttagacgtgcccaaatgacagaaggacccaacacagcacctccaaactttagtcatacaggaccaacatttccagtagtacctcctttcttaagtagcattgctggagtcccaaccacagcagcagccacagcaccagtccctgcaacaagcagccctcctaatgacatttccacatcagtaattcagtctgaggttacagtgcccactgaagaggggattgctggagttgccaccagcacaggtgtggtaacttcaggtggtctccccataccacctgtgtctgaatcaccagtactttccagcgtagtttcaagtatcacaatacctgcagttgtctcaatatctactacatccccgtcacttcaagtccccacatccacatctgagatcgttgtttctagtacagcactgtatccttcagtaacagtttcagcaacttcagcctctgcagggggcagtactgctaccccaggtcctaagcctccagctgtagtatctcagcaggcagcaggcagcactactgtgggagccacattaacatcagtttctaccaccacttcattcccaagcacagcttcacagctgtccattcagcttagcagcagtacttctactcctactttagctgaaaccgtggtagttagcgcacactcactagataagacatctcatagcagtacaactggattggctttctccctctctgcaccatcttcctcttcctctcctggagcaggagtgtctagttatatttctcagcctggtgggctgcatcctttggtcattccatcagtgatagcttctactcctattcttccccaagcagcaggacctacttctacacctttattaccccaagtacctagtatcccacccttggtacagcctgttgccaatgtgcctgctgtacagcagacactaattcatagtcagcctcaaccagctttgcttcccaaccagccccatactcattgtcctgaagtagattctgatacacaacccaaagctcctggaattgatgacataaagactctagaagaaaagctgcggtctctgttcagtgaacacagctcatctggagctcagcatgcctctgtctcactggagacctcactagtcatagagagcactgtcacaccaggcatcccaactactgctgttgcaccaagcaaactcctgacttctaccacaagtacttgcttaccaccaaccaatttaccactaggaacagttgctttgccagttacaccagtggtcacacctgggcaagtttctaccccagtcagcactactacatcaggagtgaaacctggaactgctccctccaagccacctctaactaaggctccggtgctgccagtgggtactgaacttccagcaggtactctacccagcgagcagctgccaccttttccaggaccttctctaacccagtcccagcaacctctagaggatcttgatgctcaattgagaagaacacttagtccagagatgatcacagtgacttctgcggttggtcctgtgtccatggcggctccaacagcaatcacagaagcaggaacacagcctcagaagggtgtttctcaagtcaaagaaggccctgtcctagcaactagttcaggagctggtgtttttaagatgggacgatttcaggtttctgttgcagcagacggtgcccagaaagagggtaaaaataagtcagaagatgcaaagtctgttcattttgaatccagcacctcagagtcctcagtgctatcaagtagtagtccagagagtaccttggtgaaaccagagccgaatggcataaccatccctggtatctcttcagatgtgccagagagtgcccacaaaactactgcctcagaggcaaagtcagacactgggcagcctaccaaggttggacgttttcaggtgacaactacagcaaacaaagtgggtcgtttctctgtatcaaaaactgaggacaagatcactgacacaaagaaagaaggaccagtggcatctcctccttttatggatttggaacaagctgttcttcctgctgtgataccaaagaaagagaagcctgaactgtcagagccttcacatctaaatgggccgtcttctgacccggaggccgcttttttaagtagggatgtggatgatggttccggtagtccacactcgccccatcagctgagctcaaagagccttcctagccagaatctaagtcaaagccttagtaattcatttaactcctcttacatgagtagcgacaatgagtcagatatcgaagatgaagacttaaagttagagctgcgacgactacgagataaacatctcaaagagattcaggacctgcagagtcgccagaagcatgaaattgaatctttgtataccaaactgggcaaggtgccccctgctgttattattcccccagctgctcccctttcagggagaagacgacgacccactaaaagcaaaggcagcaaatctagtcgaagcagttccttggggaataaaagcccccagctttcaggtaacctgtctggtcagagtgcagcttcagtcttgcacccccagcagaccctccaccctcctggcaacatcccagagtccgggcagaatcagctgttacagccccttaagccatctccctccagtgacaacctctattcagccttcaccagtgatggtgccatttcagtaccaagcctttctgctccaggtcaaggaaccagcagcacaaacactgttggggcaacagtgaacagccaagccgcccaagctcagcctcctgccatgacgtccagcaggaagggcacattcacagatgacttgcacaagttggtagacaattgggcccgagatgccatgaatctctcaggcaggagaggaagcaaagggcacatgaattatgagggccctggaatggcaaggaagttctctgcacctgggcaactgtgcatctccatgacctcgaacctgggtggctctgcccccatctctgcagcatcagctacctctctaggtcacttcaccaagtctatgtgccccccacagcagtatggctttccagctaccccatttggcgctcaatggagtgggacgggtggcccagcaccacagccacttggccagttccaacctgtgggaactgcctccttgcagaatttcaacatcagcaatttgcagaaatccatcagcaaccccccaggctccaacctgcggaccacttagacctagagacattaactgaatagatctgggggcaggagatggaatgctgagggggtgggtgggggtgggaagtagcctatatactaactactagtgctgcatttaactggttatttcttgccagaggggaatgtttttaatactgcattgagccctcagaatggagagtctcccccgctccagttattggaatgggagaggaaggaaagaacagcttttttgtcaaggggcagcttcagaccatgctttcctgtttatctatactcagtaatgaggatgagggctaggaaagtcttgttcataaggaagctggagaactcaatgtaaaatcaaacccatctgtaatttcgagtgggtggagctcttgcttttggtacatgccctgaatccctcactccctcaagaatccgaaccacaggacaaaaaccacctactgggctctctcctaccctgccctcctcccttttttttacccctctcttttttattttttctttgctctttagaacccagtgaaaaataccagggtactggggtgcaactctttcttatgataggtcattagtgctttaagcaaaagatattagcagctttgactgcagcattagcaattaggaaaaaaaaaaaattaagttccctgcggacatgtaactttgccatcagttttgatgtggaaacactgtgatatataaaatgttgttggacaacagtagttttaaacgtttcatattttactcttaaaactactgtgtccaacaacattagttttaagagtaaaatatgaaacgtttaaaaagttccaaaaaaagctagctctgtcctttacttattgagacactttaactttttcctttgtatttccattgtattagataaataaatgtgaatgtaaaattgtataaattactgtacttgaatacttctgtttcccagtgttgcttgctggacattttagtgccttggacttctattgcttctgccattagcatcaacttaccagaccccagatcaataaagggcatgtggaaggaaatcgtaggtccatgtgaccccagcagtccagcagtggttatgccaaagggaaattgaaaaagtatttttttaagtcattcaacaactttgtctagagcaggtgtaagatgagtagggtgggaagttaggttggcatcagtggttaaaaacagaaagttctgtttcgggaatagtgaggagggggtgttgtaacaaaattggacaacttaaaagaatggtgtgtgctgggtgaaagacaaagactaaagaatgaggaaacaaacgtgatgcctggccagtgactgtcatataaacctttcttatttgagctaggcttgaacagacgtgacctagaagaaactgaacataaagagaagggggtggggggctagttttcaagttggggaacctgatagtgaaaagtcacagatggagaaaattgctctcagaaaaactgtttggattgctttcctcttgttgcacatgtaccatgcatttctcagcttggggtactacattttgtggaaagttaatctatcatctatctttccacatctgaattaatcattctaggaaagaatacttattcctactcatttcctttatgatgtccaaatggttgcaggatcataatctattgtgccacctttatttctagaagtacaactaatatgttcacattttcaaataaataatactccccgtaagtaataactgcaaccaatcagtgttattcagtgctatgcctccttgtaatgggtagttattaattattttcagagctttccggaaatactgtcctaactggctatgtttaggatctttgttatctctgaagacaaagaaagaagctaggactcttaattttggggtgcttcttgactcttagttgggaaactgaaaatatttccaaccttttacccacgtcaatggcatattctgggaatcaccaccaccaccaccactaccacagaaagaggctggaggctcctgtaccctgttcattccttaagggccctgcttcccttaataagtaagtaagttggtctacggccctaaatatgcaaatgagagctgaaggtttttaaaaggtagaaaggaaaagggcaagggcttccacccctgctttaaaatgatttatttattctctgcttgtatttcttgtggagagagtaaggatagaaccaacaaggggctgagtagctgagaaaggggccacccaagagtgaaacatactttataccagaggagcagtggagcctcatgcagcacattatcatttgttatttgggtttaataataattttgacatcttttcactcatacacaaaaaaagtcagaactggtgttatttactgttgatttcatcctcctgtgtatgaaataacaagcctagaggaatgaactagtgctactgaactgtttaaattatttttgtgttaatagtacactttgagtatctttttccacattaaaaactttctgaattataaatgttttccttacattatttaacaatgtacactgttaaaaataaaaataaaaattcaaactttgggggtttctcagcagccgttaattgtacattttgcactaactctgggtgttgcgcttcttgtaagattgcgctttgtgcttcagtttgttacctttgtagacttatttaatgaaaccattcaaataaaccaaacttgcttttgttga

SEQ ID NO: 284695 - DNA, 10009 bp, Homo sapiens
ggcgggatccgagcgggctgtgtggaggcttcagactcccggcgccatttagcgcggagagtttcccgggtggacgcggctcctctctcggccactccgcacccccatcttcggtgacagaaggcgcctggtgggggtggctgctcttttctctccctgttccccctcacccagtcctctaggtctcctctcctcttgcctcagagaagcagcggagctcgggccccgcggtgagcggccctcccctccccgccgttccctcctccgtcagcccccggcaccggcccgggaggagacgggtttgccaggcctggggcgggcggggaggcctcggggaagggggggcccgctcctcaggcgccgaggctccgaggctccggcccttcgcctctgggcgatgggcgacctgtgaggccggtccccatcgctgggggcgcgtgtgggaggaggcggccgcccgagtgaccgggagccgggccgcggccttccctcgcccgcctcggcccctcccactcctctgccccggggccgccaccgcccgggcgtcggacctggtcccgtgctcgcggtgccgccgccctctgggcctagcccgcccagctcggcgagcggcggcagtgggagccgcgtccgccgcatccgcctcgactcggtgccggcccctggccctcccctcatgactgcggcgcctctgctgccaccgcccgcccggccgccgctcgccgcaggatggatgcggaccgtgcggcgctaacccccgtggctcagctcccgaatcgcccgccttcgagccctcctcgtgagccgcagcagcctcggtgccagcccccgccgcagctgggcccagcggtccgcctgtccctcgttgcggcttgtcggtgctgagtgaggcgtcgtccgggtcggcgcgaacccgcccggccgcggtgccctgcagacctctgcgcgggcggctcggcccttcacgcccttttcgttcacgaatccgagcccgctcgcctctctccagcgaaccgaccatgtctggcggcgccgcagagaagcagagcagcactcccggttccctgttcctctcgccgccggctcctgcccccaagaatggctccagctccgattcctccgtgggggagaaactgggagccgcggccgccgacgctgtgaccggcaggaccgaggagtacaggcgccgccgccacactatggacaaggacagccgtggggcggccgcgaccactaccaccactgagcaccgcttcttccgccggagcgtcatctgcgactccaatgccactgcactggagcttcccggccttcctctttccctgccccagcccagcatccccgcggctgtcccgcagagtgctccaccggagccccaccgggaagagaccgtgaccgccaccgccacttcccaggtagcccagcagcctccagccgctgccgcccctggggaacaggccgtcgcgggccctgccccctcgactgtccccagcagtaccagcaaagaccgcccagtgtcccagcctagccttgtggggagcaaagaggagccgccgccggcgagaagtggcagcggcggcggcagcgccaaggagccacaggaggaacggagccagcagcaggatgatatcgaagagctggagaccaaggccgtgggaatgtctaacgatggccgctttctcaagtttgacatcgaaatcggcagaggctcctttaagacggtctacaaaggtctggacactgaaaccaccgtggaagtcgcctggtgtgaactgcaggatcgaaaattaacaaagtctgagaggcagagatttaaagaagaagctgaaatgttaaaaggtcttcagcatcccaatattgttagattttatgattcctgggaatccacagtaaaaggaaagaagtgcattgttttggtgactgaacttatgacgtctggaacacttaaaacgtatctgaaaaggtttaaagtgatgaagatcaaagttctaagaagctggtgccgtcagatccttaaaggtcttcagtttcttcatactcgaactccacctatcattcaccgcgatcttaaatgtgacaacatctttatcaccggccctactggctcagtcaagattggagacctcggtctggcaaccctgaagcgggcttcttttgccaagagtgtgataggtaccccagagttcatggcccctgagatgtatgaggagaaatatgatgaatccgttgacgtttatgcttttgggatgtgcatgcttgagatggctacatctgaatatccttactcggagtgccaaaatgctgcgcagatctaccgtcgcgtgaccagtggggtgaagccagccagttttgacaaagtagcaattcctgaagtgaaggaaattattgaaggatgcatacgacaaaacaaagatgaaagatattccatcaaagaccttttgaaccatgccttcttccaagaggaaacaggagtacgggtagaattagcagaagaagatgatggagaaaaaatagccataaaattatggctacgtattgaagatattaagaaattaaagggaaaatacaaagataatgaagctattgagttttcttttgatttagagagagatgtcccagaagatgttgcacaagaaatggtagagtctgggtatgtctgtgaaggtgatcacaagaccatggctaaagctatcaaagacagagtatcattaattaagaggaaacgagagcagcggcagttggtacgggaggagcaagaaaaaaaaaagcaggaagagagcagtctcaaacagcaggtagaacaatccagtgcttcccagacaggaatcaagcagctcccttctgctagcaccggcatacctactgcttctaccacttcagcttcagtttctacacaagtagaacctgaagaacctgaggcagatcaacatcaacaactacagtaccagcaacccagtatatctgtgttatctgatgggacggttgacagtggtcagggatcctctgtcttcacagaatctcgagtgagcagccaacagacagtttcatatggttcccaacatgaacaggcacattctacaggcacagtcccagggcatataccttctactgtccaagcacagtctcagccccatggggtatatccaccctcaagtgtgcagcagggaatacagcagacagcccctcctcaacagacagtgcagtattcactttcacagacatcaacctccagtgaggccactactgcacagccagtgagtcaacctcaagctccacaagtcttgcctcaagtatcagctggaaaacagagtactcagggagtctctcaggttgctcctgcagagccagttgcagtagcacagccccaagctacccagccgaccactttggcttcctctgtagacagtgcacattcagatgttgcttcaggtatgagtgatggcaatgagaacgtcccatcttccagtggaaggcatgaaggaagaactacaaaacggcattaccgaaaatctgtaaggagtcgctctcgacatgaaaaaacttcacgcccaaaattaagaattttgaatgtttcaaataaaggagaccgagtagtagaatgtcaattagagactcataataggaaaatggttacattcaaatttgacctagatggtgacaaccccgaggagatagcaacaattatggtgaacaatgactttattctagcaatagagagagagtcgtttgtggatcaagtgcgagaaattattgaaaaagctgatgaaatgctcagtgaggatgtcagtgtggaaccagagggtgatcagggattggagagtctacaaggaaaggatgactatggcttttcaggttctcagaaattggaaggagagttcaaacaaccaattcctgcgtcttccatgccacagcaaataggcattcctaccagttctttaactcaagttgttcattctgcgggaaggcggtttatagtgagtcctgtgccagaaagccgattacgagaatcaaaagttttccccagtgaaataacagatacagttgctgcctctacagctcagagccctggaatgaacttgtctcactctgcatcatcccttagtctacaacaggccttttctgaacttagacgtgcccaaatgacagaaggacccaacacagcacctccaaactttagtcatacaggaccaacatttccagtagtacctcctttcttaagtagcattgctggagtcccaaccacagcagcagccacagcaccagtccctgcaacaagcagccctcctaatgacatttccacatcagtaattcagtctgaggttacagtgcccactgaagaggggattgctggagttgccaccagcacaggtgtggtaacttcaggtggtctccccataccacctgtgtctgaatcaccagtactttccagcgtagtttcaagtatcacaatacctgcagttgtctcaatatctactacatccccgtcacttcaagtccccacatccacatctgagatcgttgtttctagtacagcactgtatccttcagtaacagtttcagcaacttcagcctctgcagggggcagtactgctaccccaggtcctaagcctccagctgtagtatctcagcaggcagcaggcagcactactgtgggagccacattaacatcagtttctaccaccacttcattcccaagcacagcttcacagctgtccattcagcttagcagcagtacttctactcctactttagctgaaaccgtggtagttagcgcacactcactagataagacatctcatagcagtacaactggattggctttctccctctctgcaccatcttcctcttcctctcctggagcaggagtgtctagttatatttctcagcctggtgggctgcatcctttggtcattccatcagtgatagcttctactcctattcttccccaagcagcaggacctacttctacacctttattaccccaagtacctagtatcccacccttggtacagcctgttgccaatgtgcctgctgtacagcagacactaattcatagtcagcctcaaccagctttgcttcccaaccagccccatactcattgtcctgaagtagattctgatacacaacccaaagctcctggaattgatgacataaagactctagaagaaaagctgcggtctctgttcagtgaacacagctcatctggagctcagcatgcctctgtctcactggagacctcactagtcatagagagcactgtcacaccaggcatcccaactactgctgttgcaccaagcaaactcctgacttctaccacaagtacttgcttaccaccaaccaatttaccactaggaacagttgctttgccagttacaccagtggtcacacctgggcaagtttctaccccagtcagcactactacatcaggagtgaaacctggaactgctccctccaagccacctctaactaaggctccggtgctgccagtgggtactgaacttccagcaggtactctacccagcgagcagctgccaccttttccaggaccttctctaacccagtcccagcaacctctagaggatcttgatgctcaattgagaagaacacttagtccagagatgatcacagtgacttctgcggttggtcctgtgtccatggcggctccaacagcaatcacagaagcaggaacacagcctcagaagggtgtttctcaagtcaaagaaggccctgtcctagcaactagttcaggagctggtgtttttaagatgggacgatttcaggtttctgttgcagcagacggtgcccagaaagagggtaaaaataagtcagaagatgcaaagtctgttcattttgaatccagcacctcagagtcctcagtgctatcaagtagtagtccagagagtaccttggtgaaaccagagccgaatggcataaccatccctggtatctcttcagatgtgccagagagtgcccacaaaactactgcctcagaggcaaagtcagacactgggcagcctaccaaggttggacgttttcaggtgacaactacagcaaacaaagtgggtcgtttctctgtatcaaaaactgaggacaagatcactgacacaaagaaagaaggaccagtggcatctcctccttttatggatttggaacaagctgttcttcctgctgtgataccaaagaaagagaagcctgaactgtcagagccttcacatctaaatgggccgtcttctgacccggaggccgcttttttaagtagggatgtggatgatggttccggtagtccacactcgccccatcagctgagctcaaagagccttcctagccagaatctaagtcaaagccttagtaattcatttaactcctcttacatgagtagcgacaatgagtcagatatcgaagatgaagacttaaagttagagctgcgacgactacgagataaacatctcaaagagattcaggacctgcagagtcgccagaagcatgaaattgaatctttgtataccaaactgggcaaggtgccccctgctgttattattcccccagctgctcccctttcagggagaagacgacgacccactaaaagcaaaggcagcaaatctagtcgaagcagttccttggggaataaaagcccccagctttcaggtaacctgtctggtcagagtgcagcttcagtcttgcacccccagcagaccctccaccctcctggcaacatcccagagtccgggcagaatcagctgttacagccccttaagccatctccctccagtgacaacctctattcagccttcaccagtgatggtgccatttcagtaccaagcctttctgctccaggtcaaggaaccagcagcacaaacactgttggggcaacagtgaacagccaagccgcccaagctcagcctcctgccatgacgtccagcaggaagggcacattcacagatgacttgcacaagttggtagacaattgggcccgagatgccatgaatctctcaggcaggagaggaagcaaagggcacatgaattatgagggccctggaatggcaaggaagttctctgcacctgggcaactgtgcatctccatgacctcgaacctgggtggctctgcccccatctctgcagcatcagctacctctctaggtcacttcaccaagtctatgtgccccccacagcagtatggctttccagctaccccatttggcgctcaatggagtgggacgggtggcccagcaccacagccacttggccagttccaacctgtgggaactgcctccttgcagaatttcaacatcagcaatttgcagaaatccatcagcaaccccccaggctccaacctgcggaccacttagacctagagacattaactgaatagatctgggggcaggagatggaatgctgagggggtgggtgggggtgggaagtagcctatatactaactactagtgctgcatttaactggttatttcttgccagaggggaatgtttttaatactgcattgagccctcagaatggagagtctcccccgctccagttattggaatgggagaggaaggaaagaacagcttttttgtcaaggggcagcttcagaccatgctttcctgtttatctatactcagtaatgaggatgagggctaggaaagtcttgttcataaggaagctggagaactcaatgtaaaatcaaacccatctgtaatttcgagtgggtggagctcttgcttttggtacatgccctgaatccctcactccctcaagaatccgaaccacaggacaaaaaccacctactgggctctctcctaccctgccctcctcccttttttttacccctctcttttttattttttctttgctctttagaacccagtgaaaaataccagggtactggggtgcaactctttcttatgataggtcattagtgctttaagcaaaagatattagcagctttgactgcagcattagcaattaggaaaaaaaaaaaattaagttccctgcggacatgtaactttgccatcagttttgatgtggaaacactgtgatatataaaatgttgttggacaacagtagttttaagagtaaaatatgaaacgtttaaaaagttccaaaaaaagctagctctgtcctttacttattgagacactttaactttttcctttgtatttccattgtattagataaataaatgtgaatgtaaaattgtataaattactgtacttgaatacttctgtttcccagtgttgcttgctggacattttagtgccttggacttctattgcttctgccattagcatcaacttaccagaccccagatcaataaagggcatgtggaaggaaatcgtaggtccatgtgaccccagcagtccagcagtggttatgccaaagggaaattgaaaaagtatttttttaagtcattcaacaactttgtctagagcaggtgtaagatgagtagggtgggaagttaggttggcatcagtggttaaaaacagaaagttctgtttcgggaatagtgaggagggggtgttgtaacaaaattggacaacttaaaagaatggtgtgtgctgggtgaaagacaaagactaaagaatgaggaaacaaacgtgatgcctggccagtgactgtcatataaacctttcttatttgagctaggcttgaacagacgtgacctagaagaaactgaacataaagagaagggggtggggggctagttttcaagttggggaacctgatagtgaaaagtcacagatggagaaaattgctctcagaaaaactgtttggattgctttcctcttgttgcacatgtaccatgcatttctcagcttggggtactacattttgtggaaagttaatctatcatctatctttccacatctgaattaatcattctaggaaagaatacttattcctactcatttcctttatgatgtccaaatggttgcaggatcataatctattgtgccacctttatttctagaagtacaactaatatgttcacattttcaaataaataatactccccgtaagtaataactgcaaccaatcagtgttattcagtgctatgcctccttgtaatgggtagttattaattattttcagagctttccggaaatactgtcctaactggctatgtttaggatctttgttatctctgaagacaaagaaagaagctaggactcttaattttggggtgcttcttgactcttagttgggaaactgaaaatatttccaaccttttacccacgtcaatggcatattctgggaatcaccaccaccaccaccactaccacagaaagaggctggaggctcctgtaccctgttcattccttaagggccctgcttcccttaataagtaagtaagttggtctacggccctaaatatgcaaatgagagctgaaggtttttaaaaggtagaaaggaaaagggcaagggcttccacccctgctttaaaatgatttatttattctctgcttgtatttcttgtggagagagtaaggatagaaccaacaaggggctgagtagctgagaaaggggccacccaagagtgaaacatactttataccagaggagcagtggagcctcatgcagcacattatcatttgttatttgggtttaataataattttgacatcttttcactcatacacaaaaaaagtcagaactggtgttatttactgttgatttcatcctcctgtgtatgaaataacaagcctagaggaatgaactagtgctactgaactgtttaaattatttttgtgttaatagtacactttgagtatctttttccacattaaaaactttctgaattataaatgttttccttacattatttaacaatgtacactgttaaaaataaaaataaaaattcaaactttgggggtttctcagcagccgttaattgtacattttgcactaactctgggtgttgcgcttcttgtaagattgcgctttgtgcttcagtttgttacctttgtagacttatttaatgaaaccattcaaataaaccaaacttgcttttgttga

SEQ ID NO: 284696 - DNA, 9845 bp, Homo sapiens
ggcgggatccgagcgggctgtgtggaggcttcagactcccggcgccatttagcgcggagagtttcccgggtggacgcggctcctctctcggccactccgcacccccatcttcggtgacagaaggcgcctggtgggggtggctgctcttttctctccctgttccccctcacccagtcctctaggtctcctctcctcttgcctcagagaagcagcggagctcgggccccgcggtgagcggccctcccctccccgccgttccctcctccgtcagcccccggcaccggcccgggaggagacgggtttgccaggcctggggcgggcggggaggcctcggggaagggggggcccgctcctcaggcgccgaggctccgaggctccggcccttcgcctctgggcgatgggcgacctgtgaggccggtccccatcgctgggggcgcgtgtgggaggaggcggccgcccgagtgaccgggagccgggccgcggccttccctcgcccgcctcggcccctcccactcctctgccccggggccgccaccgcccgggcgtcggacctggtcccgtgctcgcggtgccgccgccctctgggcctagcccgcccagctcggcgagcggcggcagtgggagccgcgtccgccgcatccgcctcgactcggtgccggcccctggccctcccctcatgactgcggcgcctctgctgccaccgcccgcccggccgccgctcgccgcaggatggatgcggaccgtgcggcgctaacccccgtggctcagctcccgaatcgcccgccttcgagccctcctcgtgagccgcagcagcctcggtgccagcccccgccgcagctgggcccagcggtccgcctgtccctcgttgcggcttgtcggtgctgagtgaggcgtcgtccgggtcggcgcgaacccgcccggccgcggtgccctgcagacctctgcgcgggcggctcggcccttcacgcccttttcgttcacgaatccgagcccgctcgcctctctccagcgaaccgaccatgtctggcggcgccgcagagaagcagagcagcactcccggttccctgttcctctcgccgccggctcctgcccccaagaatggctccagctccgattcctccgtgggggagaaactgggagccgcggccgccgacgctgtgaccggcaggaccgaggagtacaggcgccgccgccacactatggacaaggacagccgtggggcggccgcgaccactaccaccactgagcaccgcttcttccgccggagcgtcatctgcgactccaatgccactgcactggagcttcccggccttcctctttccctgccccagcccagcatccccgcggctgtcccgcagagtgctccaccggagccccaccgggaagagaccgtgaccgccaccgccacttcccaggtagcccagcagcctccagccgctgccgcccctggggaacaggccgtcgcgggccctgccccctcgactgtccccagcagtaccagcaaagaccgcccagtgtcccagcctagccttgtggggagcaaagaggagccgccgccggcgagaagtggcagcggcggcggcagcgccaaggagccacaggaggaacggagccagcagcaggatgatatcgaagagctggagaccaaggccgtgggaatgtctaacgatggccgctttctcaagtttgacatcgaaatcggcagaggctcctttaagacggtctacaaaggtctggacactgaaaccaccgtggaagtcgcctggtgtgaactgcaggatcgaaaattaacaaagtctgagaggcagagatttaaagaagaagctgaaatgttaaaaggtcttcagcatcccaatattgttagattttatgattcctgggaatccacagtaaaaggaaagaagtgcattgttttggtgactgaacttatgacgtctggaacacttaaaacgtatctgaaaaggtttaaagtgatgaagatcaaagttctaagaagctggtgccgtcagatccttaaaggtcttcagtttcttcatactcgaactccacctatcattcaccgcgatcttaaatgtgacaacatctttatcaccggccctactggctcagtcaagattggagacctcggtctggcaaccctgaagcgggcttcttttgccaagagtgtgataggtaccccagagttcatggcccctgagatgtatgaggagaaatatgatgaatccgttgacgtttatgcttttgggatgtgcatgcttgagatggctacatctgaatatccttactcggagtgccaaaatgctgcgcagatctaccgtcgcgtgaccagtggggtgaagccagccagttttgacaaagtagcaattcctgaagtgaaggaaattattgaaggatgcatacgacaaaacaaagatgaaagatattccatcaaagaccttttgaaccatgccttcttccaagaggaaacaggagtacgggtagaattagcagaagaagatgatggagaaaaaatagccataaaattatggctacgtattgaagatattaagaaattaaagggaaaatacaaagataatgaagctattgagttttcttttgatttagagagagatgtcccagaagatgttgcacaagaaatggtagagtctgggtatgtctgtgaaggtgatcacaagaccatggctaaagctatcaaagacagagtatcattaattaagaggaaacgagagcagcggcagttggtacgggaggagcaagaaaaaaaaaagcaggaagagagcagtctcaaacagcaggtagaacaatccagtgcttcccagacaggaatcaagcagctcccttctgctagcaccggcatacctactgcttctaccacttcagcttcagtttctacacaagtagaacctgaagaacctgaggcagatcaacatcaacaactacagtaccagcaacccagtatatctgtgttatctgatgggacggttgacagtggtcagggatcctctgtcttcacagaatctcgagtgagcagccaacagacagtttcatatggttcccaacatgaacaggcacattctacaggcacagtcccagggcatataccttctactgtccaagcacagtctcagccccatggggtatatccaccctcaagtgtggcacaggggcagagccagggtcagccatcctcaagtagcttaacaggggtttcatcttcccaacccatacaacatcctcagcagcagcagggaatacagcagacagcccctcctcaacagacagtgcagtattcactttcacagacatcaacctccagtgaggccactactgcacagccagtgagtcaacctcaagctccacaagtcttgcctcaagtatcagctggaaaacagcttccagtttcccagccagtaccaactatccaaggcgaacctcagatcccagttgcgacacaaccctcggttgttccagtccactctggtgctcatttccttccagtgggacagccgctccctactcccttgctccctcagtaccctgtctctcagattcccatatcaactcctcatgtgtctacggctcagacaggtttctcatcccttcccatcacaatggcagctggcattactcagcctctgctcacgttggcttcatctgctacaacagctgcgatcccgggggtatcaactgtggttcctagtcagcttccaacccttctgcagcctgtgactcagctgccaagtcaggttcacccacagctcctacaaccagcagttcagtccatgggaataccagctaaccttggacaagctgctgaggttccactttcctctggagatgttctgtaccagggcttcccacctcgactgccaccacagtacccaggagattcaaatattgctccctcttccaacgtggcttctgtttgcatccattctacagtcctatcccctcccatgccgacagaagtactggctacacctgggtactttcccacagtggtgcagccttatgtggaatcaaatcttttagttcctatgggtggtgtaggaggacaggttcaagtgtcccagccaggagggagtttagcacaagcccccactacatcctcccagcaagcagttttggagagtactcagggagtctctcaggttgctcctgcagagccagttgcagtagcacagccccaagctacccagccgaccactttggcttcctctgtagacagtgcacattcagatgttgcttcaggtatgagtgatggcaatgagaacgtcccatcttccagtggaaggcatgaaggaagaactacaaaacggcattaccgaaaatctgtaaggagtcgctctcgacatgaaaaaacttcacgcccaaaattaagaattttgaatgtttcaaataaaggagaccgagtagtagaatgtcaattagagactcataataggaaaatggttacattcaaatttgacctagatggtgacaaccccgaggagatagcaacaattatggtgaacaatgactttattctagcaatagagagagagtcgtttgtggatcaagtgcgagaaattattgaaaaagctgatgaaatgctcagtgaggatgtcagtgtggaaccagagggtgatcagggattggagagtctacaaggaaaggatgactatggcttttcaggttctcagaaattggaaggagagttcaaacaaccaattcctgcgtcttccatgccacagcaaataggcattcctaccagttctttaactcaagttgttcattctgcgggaaggcggtttatagtgagtcctgtgccagaaagccgattacgagaatcaaaagttttccccagtgaaataacagatacagttgctgcctctacagctcagagccctggaatgaacttgtctcactctgcatcatcccttagtctacaacaggccttttctgaacttagacgtgcccaaatgacagaaggacccaacacagcacctccaaactttagtcatacaggaccaacatttccagtagtacctcctttcttaagtagcattgctggagtcccaaccacagcagcagccacagcaccagtccctgcaacaagcagccctcctaatgacatttccacatcagtaattcagtctgaggttacagtgcccactgaagaggggattgctggagttgccaccagcacaggtgtggtaacttcaggtggtctccccataccacctgtgtctgaatcaccagtactttccagcgtagtttcaagtatcacaatacctgcagttgtctcaatatctactacatccccgtcacttcaagtccccacatccacatctgagatcgttgtttctagtacagcactgtatccttcagtaacagtttcagcaacttcagcctctgcagggggcagtactgctaccccaggtcctaagcctccagctgtagtatctcagcaggcagcaggcagcactactgtgggagccacattaacatcagtttctaccaccacttcattcccaagcacagcttcacagctgtccattcagcttagcagcagtacttctactcctactttagctgaaaccgtggtagttagcgcacactcactagataagacatctcatagcagtacaactggattggctttctccctctctgcaccatcttcctcttcctctcctggagcaggagtgtctagttatatttctcagcctggtgggctgcatcctttggtcattccatcagtgatagcttctactcctattcttccccaagcagcaggacctacttctacacctttattaccccaagtacctagtatcccacccttggtacagcctgttgccaatgtgcctgctgtacagcagacactaattcatagtcagcctcaaccagctttgcttcccaaccagccccatactcattgtcctgaagtagattctgatacacaacccaaagctcctggaattgatgacataaagactctagaagaaaagctgcggtctctgttcagtgaacacagctcatctggagctcagcatgcctctgtctcactggagacctcactagtcatagagagcactgtcacaccaggcatcccaactactgctgttgcaccaagcaaactcctgacttctaccacaagtacttgcttaccaccaaccaatttaccactaggaacagttgctttgccagttacaccagtggtcacacctgggcaagtttctaccccagtcagcactactacatcaggagtgaaacctggaactgctccctccaagccacctctaactaaggctccggtgctgccagtgggtactgaacttccagcaggtactctacccagcgagcagctgccaccttttccaggaccttctctaacccagtcccagcaacctctagaggatcttgatgctcaattgagaagaacacttagtccagagatgatcacagtgacttctgcggttggtcctgtgtccatggcggctccaacagcaatcacagaagcaggaacacagcctcagaagggtgtttctcaagtcaaagaaggccctgtcctagcaactagttcaggagctggtgtttttaagatgggacgatttcaggtttctgttgcagcagacggtgcccagaaagagggtaaaaataagtcagaagatgcaaagtctgttcattttgaatccagcacctcagagtcctcagtgctatcaagtagtagtccagagagtaccttggtgaaaccagagccgaatggcataaccatccctggtatctcttcagatgtgccagagagtgcccacaaaactactgcctcagaggcaaagtcagacactgggcagcctaccaaggttggacgttttcaggtgacaactacagcaaacaaagtgggtcgtttctctgtatcaaaaactgaggacaagatcactgacacaaagaaagaaggaccagtggcatctcctccttttatggatttggaacaagctgttcttcctgctgtgataccaaagaaagagaagcctgaactgtcagagccttcacatctaaatgggccgtcttctgacccggaggccgcttttttaagtagggatgtggatgatggttccggtagtccacactcgccccatcagctgagctcaaagagccttcctagccagaatctaagtcaaagccttagtaattcatttaactcctcttacatgagtagcgacaatgagtcagatatcgaagatgaagacttaaagttagagctgcgacgactacgagataaacatctcaaagagattcaggacctgcagagtcgccagaagcatgaaattgaatctttgtataccaaactgggcaaggtgccccctgctgttattattcccccagctgctcccctttcagggagaagacgacgacccactaaaagcaaaggcagcaaatctagtcgaagcagttccttggggaataaaagcccccagctttcaggtaacctgtctggtcagagtgcagcttcagtcttgcacccccagcagaccctccaccctcctggcaacatcccagagtccgggcagaatcagctgttacagccccttaagccatctccctccagtgacaacctctattcagccttcaccagtgatggtgccatttcagtaccaagcctttctgctccaggtcaaggaaccagcagcacaaacactgttggggcaacagtgaacagccaagccgcccaagctcagcctcctgccatgacgtccagcaggaagggcacattcacagatgacttgcacaagttggtagacaattgggcccgagatgccatgaatctctcaggcaggagaggaagcaaagggcacatgaattatgagggccctggaatggcaaggaagttctctgcacctgggcaactgtgcatctccatgacctcgaacctgggtggctctgcccccatctctgcagcatcagctacctctctaggtcacttcaccaagtctatgtgccccccacagcagtatggctttccagctaccccatttggcgctcaatggagtgggacgggtggcccagcaccacagccacttggccagttccaacctgtgggaactgcctccttgcagaatttcaacatcagcaatttgcagaaatccatcagcaaccccccaggctccaacctgcggaccacttagacctagagacattaactgaatagatctgggggcaggagatggaatgctgagggggtgggtgggggtgggaagtagcctatatactaactactagtgctgcatttaactggttatttcttgccagaggggaatgtttttaatactgcattgagccctcagaatggagagtctcccccgctccagttattggaatgggagaggaaggaaagaacagcttttttgtcaaggggcagcttcagaccatgctttcctgtttatctatactcagtaatgaggatgagggctaggaaagtcttgttcataaggaagctggagaactcaatgtaaaatcaaacccatctgtaatttcgagtgggtggagctcttgcttttggtacatgccctgaatccctcactccctcaagaatccgaaccacaggacaaaaaccacctactgggctctctcctaccctgccctcctcccttttttttacccctctcttttttattttttctttgctctttagaacccagtgaaaaataccagggtactggggtgcaactctttcttatgataggtcattagtgctttaagcaaaagatattagcagctttgactgcagcattagcaattaggaaaaaaaaaaaattaagttccctgcggacatgtaactttgccatcagttttgatgtggaaacactgtgatatataaaatgttgttggacaacagtagttttaagagtaaaatatgaaacgtttaaaaagttccaaaaaaagctagctctgtcctttacttattgagacactttaactttttcctttgtatttccattgtattagataaataaatgtgaatgtaaaattgtataaattactgtacttgaatacttctgtttcccagtgttgcttgctggacattttagtgccttggacttctattgcttctgccattagcatcaacttaccagaccccagatcaataaagggcatgtggaaggaaatcgtaggtccatgtgaccccagcagtccagcagtggttatgccaaagggaaattgaaaaagtatttttttaagtcattcaacaactttgtctagagcaggtgtaagatgagtagggtgggaagttaggttggcatcagtggttaaaaacagaaagttctgtttcgggaatagtgaggagggggtgttgtaacaaaattggacaacttaaaagaatggtgtgtgctgggtgaaagacaaagactaaagaatgaggaaacaaacgtgatgcctggccagtgactgtcatataaacctttcttatttgagctaggcttgaacagacgtgacctagaagaaactgaacataaagagaagggggtggggggctagttttcaagttggggaacctgatagtgaaaagtcacagatggagaaaattgctctcagaaaaactgtttggattgctttcctcttgttgcacatgtaccatgcatttctcagcctcccgagtagctgggactacaggcgcccaccacctcgcccggctaattttttgtatttttagtagagacagggtttcaccgtgttagccaggatggtctcgatctcctgaccttgtgatccacctgcctccacctcccaaagtgctgggattccaggcgtgggcaaccgcacccagcttaaggttttttttttggttttgagacggacatcgt

SEQ ID NO: 284697 - DNA, 10372 bp, Homo sapiens
ggcgggatccgagcgggctgtgtggaggcttcagactcccggcgccatttagcgcggagagtttcccgggtggacgcggctcctctctcggccactccgcacccccatcttcggtgacagaaggcgcctggtgggggtggctgctcttttctctccctgttccccctcacccagtcctctaggtctcctctcctcttgcctcagagaagcagcggagctcgggccccgcggtgagcggccctcccctccccgccgttccctcctccgtcagcccccggcaccggcccgggaggagacgggtttgccaggcctggggcgggcggggaggcctcggggaagggggggcccgctcctcaggcgccgaggctccgaggctccggcccttcgcctctgggcgatgggcgacctgtgaggccggtccccatcgctgggggcgcgtgtgggaggaggcggccgcccgagtgaccgggagccgggccgcggccttccctcgcccgcctcggcccctcccactcctctgccccggggccgccaccgcccgggcgtcggacctggtcccgtgctcgcggtgccgccgccctctgggcctagcccgcccagctcggcgagcggcggcagtgggagccgcgtccgccgcatccgcctcgactcggtgccggcccctggccctcccctcatgactgcggcgcctctgctgccaccgcccgcccggccgccgctcgccgcaggatggatgcggaccgtgcggcgctaacccccgtggctcagctcccgaatcgcccgccttcgagccctcctcgtgagccgcagcagcctcggtgccagcccccgccgcagctgggcccagcggtccgcctgtccctcgttgcggcttgtcggtgctgagtgaggcgtcgtccgggtcggcgcgaacccgcccggccgcggtgccctgcagacctctgcgcgggcggctcggcccttcacgcccttttcgttcacgaatccgagcccgctcgcctctctccagcgaaccgaccatgtctggcggcgccgcagagaagcagagcagcactcccggttccctgttcctctcgccgccggctcctgcccccaagaatggctccagctccgattcctccgtgggggagaaactgggagccgcggccgccgacgctgtgaccggcaggaccgaggagtacaggcgccgccgccacactatggacaaggacagccgtggggcggccgcgaccactaccaccactgagcaccgcttcttccgccggagcgtcatctgcgactccaatgccactgcactggagcttcccggccttcctctttccctgccccagcccagcatccccgcggctgtcccgcagagtgctccaccggagccccaccgggaagagaccgtgaccgccaccgccacttcccaggtagcccagcagcctccagccgctgccgcccctggggaacaggccgtcgcgggccctgccccctcgactgtccccagcagtaccagcaaagaccgcccagtgtcccagcctagccttgtggggagcaaagaggagccgccgccggcgagaagtggcagcggcggcggcagcgccaaggagccacaggaggaacggagccagcagcaggatgatatcgaagagctggagaccaaggccgtgggaatgtctaacgatggccgctttctcaagtttgacatcgaaatcggcagaggctcctttaagacggtctacaaaggtctggacactgaaaccaccgtggaagtcgcctggtgtgaactgcaggatcgaaaattaacaaagtctgagaggcagagatttaaagaagaagctgaaatgttaaaaggtcttcagcatcccaatattgttagattttatgattcctgggaatccacagtaaaaggaaagaagtgcattgttttggtgactgaacttatgacgtctggaacacttaaaacgtatctgaaaaggtttaaagtgatgaagatcaaagttctaagaagctggtgccgtcagatccttaaaggtcttcagtttcttcatactcgaactccacctatcattcaccgcgatcttaaatgtgacaacatctttatcaccggccctactggctcagtcaagattggagacctcggtctggcaaccctgaagcgggcttcttttgccaagagtgtgataggtaccccagagttcatggcccctgagatgtatgaggagaaatatgatgaatccgttgacgtttatgcttttgggatgtgcatgcttgagatggctacatctgaatatccttactcggagtgccaaaatgctgcgcagatctaccgtcgcgtgaccagtggggtgaagccagccagttttgacaaagtagcaattcctgaagtgaaggaaattattgaaggatgcatacgacaaaacaaagatgaaagatattccatcaaagaccttttgaaccatgccttcttccaagaggaaacaggagtacgggtagaattagcagaagaagatgatggagaaaaaatagccataaaattatggctacgtattgaagatattaagaaattaaagggaaaatacaaagataatgaagctattgagttttcttttgatttagagagagatgtcccagaagatgttgcacaagaaatggtagagtctgggtatgtctgtgaaggtgatcacaagaccatggctaaagctatcaaagacagagtatcattaattaagaggaaacgagagcagcggcagttggtacgggaggagcaagaaaaaaaaaagcaggaagagagcagtctcaaacagcaggtagaacaatccagtgcttcccagacaggaatcaagcagctcccttctgctagcaccggcatacctactgcttctaccacttcagcttcagtttctacacaagtagaacctgaagaacctgaggcagatcaacatcaacaactacagtaccagcaacccagtatatctgtgttatctgatgggacggttgacagtggtcagggatcctctgtcttcacagaatctcgagtgagcagccaacagacagtttcatatggttcccaacatgaacaggcacattctacaggcacagtcccagggcatataccttctactgtccaagcacagtctcagccccatggggtatatccaccctcaagtgtggcacaggggcagagccagggtcagccatcctcaagtagcttaacaggggtttcatcttcccaacccatacaacatcctcagcagcagcagggaatacagcagacagcccctcctcaacagacagtgcagtattcactttcacagacatcaacctccagtgaggccactactgcacagccagtgagtcaacctcaagctccacaagtcttgcctcaagtatcagctggaaaacagggcttcccacctcgactgccaccacagtacccaggagattcaaatattgctccctcttccaacgtggcttctgtttgcatccattctacagtcctatcccctcccatgccgacagaagtactggctacacctgggtactttcccacagtggtgcagccttatgtggaatcaaatcttttagttcctatgggtggtgtaggaggacaggttcaagtgtcccagccaggagggagtttagcacaagcccccactacatcctcccagcaagcagttttggagagtactcagggagtctctcaggttgctcctgcagagccagttgcagtagcacagccccaagctacccagccgaccactttggcttcctctgtagacagtgcacattcagatgttgcttcaggtatgagtgatggcaatgagaacgtcccatcttccagtggaaggcatgaaggaagaactacaaaacggcattaccgaaaatctgtaaggagtcgctctcgacatgaaaaaacttcacgcccaaaattaagaattttgaatgtttcaaataaaggagaccgagtagtagaatgtcaattagagactcataataggaaaatggttacattcaaatttgacctagatggtgacaaccccgaggagatagcaacaattatggtgaacaatgactttattctagcaatagagagagagtcgtttgtggatcaagtgcgagaaattattgaaaaagctgatgaaatgctcagtgaggatgtcagtgtggaaccagagggtgatcagggattggagagtctacaaggaaaggatgactatggcttttcaggttctcagaaattggaaggagagttcaaacaaccaattcctgcgtcttccatgccacagcaaataggcattcctaccagttctttaactcaagttgttcattctgcgggaaggcggtttatagtgagtcctgtgccagaaagccgattacgagaatcaaaagttttccccagtgaaataacagatacagttgctgcctctacagctcagagccctggaatgaacttgtctcactctgcatcatcccttagtctacaacaggccttttctgaacttagacgtgcccaaatgacagaaggacccaacacagcacctccaaactttagtcatacaggaccaacatttccagtagtacctcctttcttaagtagcattgctggagtcccaaccacagcagcagccacagcaccagtccctgcaacaagcagccctcctaatgacatttccacatcagtaattcagtctgaggttacagtgcccactgaagaggggattgctggagttgccaccagcacaggtgtggtaacttcaggtggtctccccataccacctgtgtctgaatcaccagtactttccagcgtagtttcaagtatcacaatacctgcagttgtctcaatatctactacatccccgtcacttcaagtccccacatccacatctgagatcgttgtttctagtacagcactgtatccttcagtaacagtttcagcaacttcagcctctgcagggggcagtactgctaccccaggtcctaagcctccagctgtagtatctcagcaggcagcaggcagcactactgtgggagccacattaacatcagtttctaccaccacttcattcccaagcacagcttcacagctgtccattcagcttagcagcagtacttctactcctactttagctgaaaccgtggtagttagcgcacactcactagataagacatctcatagcagtacaactggattggctttctccctctctgcaccatcttcctcttcctctcctggagcaggagtgtctagttatatttctcagcctggtgggctgcatcctttggtcattccatcagtgatagcttctactcctattcttccccaagcagcaggacctacttctacacctttattaccccaagtacctagtatcccacccttggtacagcctgttgccaatgtgcctgctgtacagcagacactaattcatagtcagcctcaaccagctttgcttcccaaccagccccatactcattgtcctgaagtagattctgatacacaacccaaagctcctggaattgatgacataaagactctagaagaaaagctgcggtctctgttcagtgaacacagctcatctggagctcagcatgcctctgtctcactggagacctcactagtcatagagagcactgtcacaccaggcatcccaactactgctgttgcaccaagcaaactcctgacttctaccacaagtacttgcttaccaccaaccaatttaccactaggaacagttgctttgccagttacaccagtggtcacacctgggcaagtttctaccccagtcagcactactacatcaggagtgaaacctggaactgctccctccaagccacctctaactaaggctccggtgctgccagtgggtactgaacttccagcaggtactctacccagcgagcagctgccaccttttccaggaccttctctaacccagtcccagcaacctctagaggatcttgatgctcaattgagaagaacacttagtccagagatgatcacagtgacttctgcggttggtcctgtgtccatggcggctccaacagcaatcacagaagcaggaacacagcctcagaagggtgtttctcaagtcaaagaaggccctgtcctagcaactagttcaggagctggtgtttttaagatgggacgatttcaggtttctgttgcagcagacggtgcccagaaagagggtaaaaataagtcagaagatgcaaagtctgttcattttgaatccagcacctcagagtcctcagtgctatcaagtagtagtccagagagtaccttggtgaaaccagagccgaatggcataaccatccctggtatctcttcagatgtgccagagagtgcccacaaaactactgcctcagaggcaaagtcagacactgggcagcctaccaaggttggacgttttcaggtgacaactacagcaaacaaagtgggtcgtttctctgtatcaaaaactgaggacaagatcactgacacaaagaaagaaggaccagtggcatctcctccttttatggatttggaacaagctgttcttcctgctgtgataccaaagaaagagaagcctgaactgtcagagccttcacatctaaatgggccgtcttctgacccggaggccgcttttttaagtagggatgtggatgatggttccggtagtccacactcgccccatcagctgagctcaaagagccttcctagccagaatctaagtcaaagccttagtaattcatttaactcctcttacatgagtagcgacaatgagtcagatatcgaagatgaagacttaaagttagagctgcgacgactacgagataaacatctcaaagagattcaggacctgcagagtcgccagaagcatgaaattgaatctttgtataccaaactgggcaaggtgccccctgctgttattattcccccagctgctcccctttcagggagaagacgacgacccactaaaagcaaaggcagcaaatctagtcgaagcagttccttggggaataaaagcccccagctttcaggtaacctgtctggtcagagtgcagcttcagtcttgcacccccagcagaccctccaccctcctggcaacatcccagagtccgggcagaatcagctgttacagccccttaagccatctccctccagtgacaacctctattcagccttcaccagtgatggtgccatttcagtaccaagcctttctgctccaggtcaaggaaccagcagcacaaacactgttggggcaacagtgaacagccaagccgcccaagctcagcctcctgccatgacgtccagcaggaagggcacattcacagatgacttgcacaagttggtagacaattgggcccgagatgccatgaatctctcaggcaggagaggaagcaaagggcacatgaattatgagggccctggaatggcaaggaagttctctgcacctgggcaactgtgcatctccatgacctcgaacctgggtggctctgcccccatctctgcagcatcagctacctctctaggtcacttcaccaagtctatgtgccccccacagcagtatggctttccagctaccccatttggcgctcaatggagtgggacgggtggcccagcaccacagccacttggccagttccaacctgtgggaactgcctccttgcagaatttcaacatcagcaatttgcagaaatccatcagcaaccccccaggctccaacctgcggaccacttagacctagagacattaactgaatagatctgggggcaggagatggaatgctgagggggtgggtgggggtgggaagtagcctatatactaactactagtgctgcatttaactggttatttcttgccagaggggaatgtttttaatactgcattgagccctcagaatggagagtctcccccgctccagttattggaatgggagaggaaggaaagaacagcttttttgtcaaggggcagcttcagaccatgctttcctgtttatctatactcagtaatgaggatgagggctaggaaagtcttgttcataaggaagctggagaactcaatgtaaaatcaaacccatctgtaatttcgagtgggtggagctcttgcttttggtacatgccctgaatccctcactccctcaagaatccgaaccacaggacaaaaaccacctactgggctctctcctaccctgccctcctcccttttttttacccctctcttttttattttttctttgctctttagaacccagtgaaaaataccagggtactggggtgcaactctttcttatgataggtcattagtgctttaagcaaaagatattagcagctttgactgcagcattagcaattaggaaaaaaaaaaaattaagttccctgcggacatgtaactttgccatcagttttgatgtggaaacactgtgatatataaaatgttgttggacaacagtagttttaagagtaaaatatgaaacgtttaaaaagttccaaaaaaagctagctctgtcctttacttattgagacactttaactttttcctttgtatttccattgtattagataaataaatgtgaatgtaaaattgtataaattactgtacttgaatacttctgtttcccagtgttgcttgctggacattttagtgccttggacttctattgcttctgccattagcatcaacttaccagaccccagatcaataaagggcatgtggaaggaaatcgtaggtccatgtgaccccagcagtccagcagtggttatgccaaagggaaattgaaaaagtatttttttaagtcattcaacaactttgtctagagcaggtgtaagatgagtagggtgggaagttaggttggcatcagtggttaaaaacagaaagttctgtttcgggaatagtgaggagggggtgttgtaacaaaattggacaacttaaaagaatggtgtgtgctgggtgaaagacaaagactaaagaatgaggaaacaaacgtgatgcctggccagtgactgtcatataaacctttcttatttgagctaggcttgaacagacgtgacctagaagaaactgaacataaagagaagggggtggggggctagttttcaagttggggaacctgatagtgaaaagtcacagatggagaaaattgctctcagaaaaactgtttggattgctttcctcttgttgcacatgtaccatgcatttctcagcttggggtactacattttgtggaaagttaatctatcatctatctttccacatctgaattaatcattctaggaaagaatacttattcctactcatttcctttatgatgtccaaatggttgcaggatcataatctattgtgccacctttatttctagaagtacaactaatatgttcacattttcaaataaataatactccccgtaagtaataactgcaaccaatcagtgttattcagtgctatgcctccttgtaatgggtagttattaattattttcagagctttccggaaatactgtcctaactggctatgtttaggatctttgttatctctgaagacaaagaaagaagctaggactcttaattttggggtgcttcttgactcttagttgggaaactgaaaatatttccaaccttttacccacgtcaatggcatattctgggaatcaccaccaccaccaccactaccacagaaagaggctggaggctcctgtaccctgttcattccttaagggccctgcttcccttaataagtaagtaagttggtctacggccctaaatatgcaaatgagagctgaaggtttttaaaaggtagaaaggaaaagggcaagggcttccacccctgctttaaaatgatttatttattctctgcttgtatttcttgtggagagagtaaggatagaaccaacaaggggctgagtagctgagaaaggggccacccaagagtgaaacatactttataccagaggagcagtggagcctcatgcagcacattatcatttgttatttgggtttaataataattttgacatcttttcactcatacacaaaaaaagtcagaactggtgttatttactgttgatttcatcctcctgtgtatgaaataacaagcctagaggaatgaactagtgctactgaactgtttaaattatttttgtgttaatagtacactttgagtatctttttccacattaaaaactttctgaattataaatgttttccttacattatttaacaatgtacactgttaaaaataaaaataaaaattcaaactttgggggtttctcagcagccgttaattgtacattttgcactaactctgggtgttgcgcttcttgtaagattgcgctttgtgcttcagtttgttacctttgtagacttatttaatgaaaccattcaaataaaccaaacttgcttttgttga

SEQ ID NO: 284698 - DNA, 10747 bp, Homo sapiens
ggcgggatccgagcgggctgtgtggaggcttcagactcccggcgccatttagcgcggagagtttcccgggtggacgcggctcctctctcggccactccgcacccccatcttcggtgacagaaggcgcctggtgggggtggctgctcttttctctccctgttccccctcacccagtcctctaggtctcctctcctcttgcctcagagaagcagcggagctcgggccccgcggtgagcggccctcccctccccgccgttccctcctccgtcagcccccggcaccggcccgggaggagacgggtttgccaggcctggggcgggcggggaggcctcggggaagggggggcccgctcctcaggcgccgaggctccgaggctccggcccttcgcctctgggcgatgggcgacctgtgaggccggtccccatcgctgggggcgcgtgtgggaggaggcggccgcccgagtgaccgggagccgggccgcggccttccctcgcccgcctcggcccctcccactcctctgccccggggccgccaccgcccgggcgtcggacctggtcccgtgctcgcggtgccgccgccctctgggcctagcccgcccagctcggcgagcggcggcagtgggagccgcgtccgccgcatccgcctcgactcggtgccggcccctggccctcccctcatgactgcggcgcctctgctgccaccgcccgcccggccgccgctcgccgcaggatggatgcggaccgtgcggcgctaacccccgtggctcagctcccgaatcgcccgccttcgagccctcctcgtgagccgcagcagcctcggtgccagcccccgccgcagctgggcccagcggtccgcctgtccctcgttgcggcttgtcggtgctgagtgaggcgtcgtccgggtcggcgcgaacccgcccggccgcggtgccctgcagacctctgcgcgggcggctcggcccttcacgcccttttcgttcacgaatccgagcccgctcgcctctctccagcgaaccgaccatgtctggcggcgccgcagagaagcagagcagcactcccggttccctgttcctctcgccgccggctcctgcccccaagaatggctccagctccgattcctccgtgggggagaaactgggagccgcggccgccgacgctgtgaccggcaggaccgaggagtacaggcgccgccgccacactatggacaaggacagccgtggggcggccgcgaccactaccaccactgagcaccgcttcttccgccggagcgtcatctgcgactccaatgccactgcactggagcttcccggccttcctctttccctgccccagcccagcatccccgcggctgtcccgcagagtgctccaccggagccccaccgggaagagaccgtgaccgccaccgccacttcccaggtagcccagcagcctccagccgctgccgcccctggggaacaggccgtcgcgggccctgccccctcgactgtccccagcagtaccagcaaagaccgcccagtgtcccagcctagccttgtggggagcaaagaggagccgccgccggcgagaagtggcagcggcggcggcagcgccaaggagccacaggaggaacggagccagcagcaggatgatatcgaagagctggagaccaaggccgtgggaatgtctaacgatggccgctttctcaagtttgacatcgaaatcggcagaggctcctttaagacggtctacaaaggtctggacactgaaaccaccgtggaagtcgcctggtgtgaactgcaggatcgaaaattaacaaagtctgagaggcagagatttaaagaagaagctgaaatgttaaaaggtcttcagcatcccaatattgttagattttatgattcctgggaatccacagtaaaaggaaagaagtgcattgttttggtgactgaacttatgacgtctggaacacttaaaacgtatctgaaaaggtttaaagtgatgaagatcaaagttctaagaagctggtgccgtcagatccttaaaggtcttcagtttcttcatactcgaactccacctatcattcaccgcgatcttaaatgtgacaacatctttatcaccggccctactggctcagtcaagattggagacctcggtctggcaaccctgaagcgggcttcttttgccaagagtgtgataggtaccccagagttcatggcccctgagatgtatgaggagaaatatgatgaatccgttgacgtttatgcttttgggatgtgcatgcttgagatggctacatctgaatatccttactcggagtgccaaaatgctgcgcagatctaccgtcgcgtgaccagtggggtgaagccagccagttttgacaaagtagcaattcctgaagtgaaggaaattattgaaggatgcatacgacaaaacaaagatgaaagatattccatcaaagaccttttgaaccatgccttcttccaagaggaaacaggagtacgggtagaattagcagaagaagatgatggagaaaaaatagccataaaattatggctacgtattgaagatattaagaaattaaagggaaaatacaaagataatgaagctattgagttttcttttgatttagagagagatgtcccagaagatgttgcacaagaaatggtagagtctgggtatgtctgtgaaggtgatcacaagaccatggctaaagctatcaaagacagagtatcattaattaagaggaaacgagagcagcggcagttggtacgggaggagcaagaaaaaaaaaagcaggaagagagcagtctcaaacagcaggtagaacaatccagtgcttcccagacaggaatcaagcagctcccttctgctagcaccggcatacctactgcttctaccacttcagcttcagtttctacacaagtagaacctgaagaacctgaggcagatcaacatcaacaactacagtaccagcaacccagtatatctgtgttatctgatgggacggttgacagtggtcagggatcctctgtcttcacagaatctcgagtgagcagccaacagacagtttcatatggttcccaacatgaacaggcacattctacaggcacagtcccagggcatataccttctactgtccaagcacagtctcagccccatggggtatatccaccctcaagtgtgcagcagggaatacagcagacagcccctcctcaacagacagtgcagtattcactttcacagacatcaacctccagtgaggccactactgcacagccagtgagtcaacctcaagctccacaagtcttgcctcaagtatcagctggaaaacagcttccagtttcccagccagtaccaactatccaaggcgaacctcagatcccagttgcgacacaaccctcggttgttccagtccactctggtgctcatttccttccagtgggacagccgctccctactcccttgctccctcagtaccctgtctctcagattcccatatcaactcctcatgtgtctacggctcagacaggtttctcatcccttcccatcacaatggcagctggcattactcagcctctgctcacgttggcttcatctgctacaacagctgcgatcccgggggtatcaactgtggttcctagtcagcttccaacccttctgcagcctgtgactcagctgccaagtcaggttcacccacagctcctacaaccagcagttcagtccatgggaataccagctaaccttggacaagctgctgaggttccactttcctctggagatgttctgtaccagggcttcccacctcgactgccaccacagtacccaggagattcaaatattgctccctcttccaacgtggcttctgtttgcatccattctacagtcctatcccctcccatgccgacagaagtactggctacacctgggtactttcccacagtggtgcagccttatgtggaatcaaatcttttagttcctatgggtggtgtaggaggacaggttcaagtgtcccagccaggagggagtttagcacaagcccccactacatcctcccagcaagcagttttggagagtactcagggagtctctcaggttgctcctgcagagccagttgcagtagcacagccccaagctacccagccgaccactttggcttcctctgtagacagtgcacattcagatgttgcttcaggtatgagtgatggcaatgagaacgtcccatcttccagtggaaggcatgaaggaagaactacaaaacggcattaccgaaaatctgtaaggagtcgctctcgacatgaaaaaacttcacgcccaaaattaagaattttgaatgtttcaaataaaggagaccgagtagtagaatgtcaattagagactcataataggaaaatggttacattcaaatttgacctagatggtgacaaccccgaggagatagcaacaattatggtgaacaatgactttattctagcaatagagagagagtcgtttgtggatcaagtgcgagaaattattgaaaaagctgatgaaatgctcagtgaggatgtcagtgtggaaccagagggtgatcagggattggagagtctacaaggaaaggatgactatggcttttcaggttctcagaaattggaaggagagttcaaacaaccaattcctgcgtcttccatgccacagcaaataggcattcctaccagttctttaactcaagttgttcattctgcgggaaggcggtttatagtgagtcctgtgccagaaagccgattacgagaatcaaaagttttccccagtgaaataacagatacagttgctgcctctacagctcagagccctggaatgaacttgtctcactctgcatcatcccttagtctacaacaggccttttctgaacttagacgtgcccaaatgacagaaggacccaacacagcacctccaaactttagtcatacaggaccaacatttccagtagtacctcctttcttaagtagcattgctggagtcccaaccacagcagcagccacagcaccagtccctgcaacaagcagccctcctaatgacatttccacatcagtaattcagtctgaggttacagtgcccactgaagaggggattgctggagttgccaccagcacaggtgtggtaacttcaggtggtctccccataccacctgtgtctgaatcaccagtactttccagcgtagtttcaagtatcacaatacctgcagttgtctcaatatctactacatccccgtcacttcaagtccccacatccacatctgagatcgttgtttctagtacagcactgtatccttcagtaacagtttcagcaacttcagcctctgcagggggcagtactgctaccccaggtcctaagcctccagctgtagtatctcagcaggcagcaggcagcactactgtgggagccacattaacatcagtttctaccaccacttcattcccaagcacagcttcacagctgtccattcagcttagcagcagtacttctactcctactttagctgaaaccgtggtagttagcgcacactcactagataagacatctcatagcagtacaactggattggctttctccctctctgcaccatcttcctcttcctctcctggagcaggagtgtctagttatatttctcagcctggtgggctgcatcctttggtcattccatcagtgatagcttctactcctattcttccccaagcagcaggacctacttctacacctttattaccccaagtacctagtatcccacccttggtacagcctgttgccaatgtgcctgctgtacagcagacactaattcatagtcagcctcaaccagctttgcttcccaaccagccccatactcattgtcctgaagtagattctgatacacaacccaaagctcctggaattgatgacataaagactctagaagaaaagctgcggtctctgttcagtgaacacagctcatctggagctcagcatgcctctgtctcactggagacctcactagtcatagagagcactgtcacaccaggcatcccaactactgctgttgcaccaagcaaactcctgacttctaccacaagtacttgcttaccaccaaccaatttaccactaggaacagttgctttgccagttacaccagtggtcacacctgggcaagtttctaccccagtcagcactactacatcaggagtgaaacctggaactgctccctccaagccacctctaactaaggctccggtgctgccagtgggtactgaacttccagcaggtactctacccagcgagcagctgccaccttttccaggaccttctctaacccagtcccagcaacctctagaggatcttgatgctcaattgagaagaacacttagtccagagatgatcacagtgacttctgcggttggtcctgtgtccatggcggctccaacagcaatcacagaagcaggaacacagcctcagaagggtgtttctcaagtcaaagaaggccctgtcctagcaactagttcaggagctggtgtttttaagatgggacgatttcaggtttctgttgcagcagacggtgcccagaaagagggtaaaaataagtcagaagatgcaaagtctgttcattttgaatccagcacctcagagtcctcagtgctatcaagtagtagtccagagagtaccttggtgaaaccagagccgaatggcataaccatccctggtatctcttcagatgtgccagagagtgcccacaaaactactgcctcagaggcaaagtcagacactgggcagcctaccaaggttggacgttttcaggtgacaactacagcaaacaaagtgggtcgtttctctgtatcaaaaactgaggacaagatcactgacacaaagaaagaaggaccagtggcatctcctccttttatggatttggaacaagctgttcttcctgctgtgataccaaagaaagagaagcctgaactgtcagagccttcacatctaaatgggccgtcttctgacccggaggccgcttttttaagtagggatgtggatgatggttccggtagtccacactcgccccatcagctgagctcaaagagccttcctagccagaatctaagtcaaagccttagtaattcatttaactcctcttacatgagtagcgacaatgagtcagatatcgaagatgaagacttaaagttagagctgcgacgactacgagataaacatctcaaagagattcaggacctgcagagtcgccagaagcatgaaattgaatctttgtataccaaactgggcaaggtgccccctgctgttattattcccccagctgctcccctttcagggagaagacgacgacccactaaaagcaaaggcagcaaatctagtcgaagcagttccttggggaataaaagcccccagctttcaggtaacctgtctggtcagagtgcagcttcagtcttgcacccccagcagaccctccaccctcctggcaacatcccagagtccgggcagaatcagctgttacagccccttaagccatctccctccagtgacaacctctattcagccttcaccagtgatggtgccatttcagtaccaagcctttctgctccaggtcaaggaaccagcagcacaaacactgttggggcaacagtgaacagccaagccgcccaagctcagcctcctgccatgacgtccagcaggaagggcacattcacagatgacttgcacaagttggtagacaattgggcccgagatgccatgaatctctcaggcaggagaggaagcaaagggcacatgaattatgagggccctggaatggcaaggaagttctctgcacctgggcaactgtgcatctccatgacctcgaacctgggtggctctgcccccatctctgcagcatcagctacctctctaggtcacttcaccaagtctatgtgccccccacagcagtatggctttccagctaccccatttggcgctcaatggagtgggacgggtggcccagcaccacagccacttggccagttccaacctgtgggaactgcctccttgcagaatttcaacatcagcaatttgcagaaatccatcagcaaccccccaggctccaacctgcggaccacttagacctagagacattaactgaatagatctgggggcaggagatggaatgctgagggggtgggtgggggtgggaagtagcctatatactaactactagtgctgcatttaactggttatttcttgccagaggggaatgtttttaatactgcattgagccctcagaatggagagtctcccccgctccagttattggaatgggagaggaaggaaagaacagcttttttgtcaaggggcagcttcagaccatgctttcctgtttatctatactcagtaatgaggatgagggctaggaaagtcttgttcataaggaagctggagaactcaatgtaaaatcaaacccatctgtaatttcgagtgggtggagctcttgcttttggtacatgccctgaatccctcactccctcaagaatccgaaccacaggacaaaaaccacctactgggctctctcctaccctgccctcctcccttttttttacccctctcttttttattttttctttgctctttagaacccagtgaaaaataccagggtactggggtgcaactctttcttatgataggtcattagtgctttaagcaaaagatattagcagctttgactgcagcattagcaattaggaaaaaaaaaaaattaagttccctgcggacatgtaactttgccatcagttttgatgtggaaacactgtgatatataaaatgttgttggacaacagtagttttaagagtaaaatatgaaacgtttaaaaagttccaaaaaaagctagctctgtcctttacttattgagacactttaactttttcctttgtatttccattgtattagataaataaatgtgaatgtaaaattgtataaattactgtacttgaatacttctgtttcccagtgttgcttgctggacattttagtgccttggacttctattgcttctgccattagcatcaacttaccagaccccagatcaataaagggcatgtggaaggaaatcgtaggtccatgtgaccccagcagtccagcagtggttatgccaaagggaaattgaaaaagtatttttttaagtcattcaacaactttgtctagagcaggtgtaagatgagtagggtgggaagttaggttggcatcagtggttaaaaacagaaagttctgtttcgggaatagtgaggagggggtgttgtaacaaaattggacaacttaaaagaatggtgtgtgctgggtgaaagacaaagactaaagaatgaggaaacaaacgtgatgcctggccagtgactgtcatataaacctttcttatttgagctaggcttgaacagacgtgacctagaagaaactgaacataaagagaagggggtggggggctagttttcaagttggggaacctgatagtgaaaagtcacagatggagaaaattgctctcagaaaaactgtttggattgctttcctcttgttgcacatgtaccatgcatttctcagcttggggtactacattttgtggaaagttaatctatcatctatctttccacatctgaattaatcattctaggaaagaatacttattcctactcatttcctttatgatgtccaaatggttgcaggatcataatctattgtgccacctttatttctagaagtacaactaatatgttcacattttcaaataaataatactccccgtaagtaataactgcaaccaatcagtgttattcagtgctatgcctccttgtaatgggtagttattaattattttcagagctttccggaaatactgtcctaactggctatgtttaggatctttgttatctctgaagacaaagaaagaagctaggactcttaattttggggtgcttcttgactcttagttgggaaactgaaaatatttccaaccttttacccacgtcaatggcatattctgggaatcaccaccaccaccaccactaccacagaaagaggctggaggctcctgtaccctgttcattccttaagggccctgcttcccttaataagtaagtaagttggtctacggccctaaatatgcaaatgagagctgaaggtttttaaaaggtagaaaggaaaagggcaagggcttccacccctgctttaaaatgatttatttattctctgcttgtatttcttgtggagagagtaaggatagaaccaacaaggggctgagtagctgagaaaggggccacccaagagtgaaacatactttataccagaggagcagtggagcctcatgcagcacattatcatttgttatttgggtttaataataattttgacatcttttcactcatacacaaaaaaagtcagaactggtgttatttactgttgatttcatcctcctgtgtatgaaataacaagcctagaggaatgaactagtgctactgaactgtttaaattatttttgtgttaatagtacactttgagtatctttttccacattaaaaactttctgaattataaatgttttccttacattatttaacaatgtacactgttaaaaataaaaataaaaattcaaactttgggggtttctcagcagccgttaattgtacattttgcactaactctgggtgttgcgcttcttgtaagattgcgctttgtgcttcagtttgttacctttgtagacttatttaatgaaaccattcaaataaaccaaacttgcttttgttga

SEQ ID NO: 284699 - DNA, 9589 bp, Homo sapiens
ggcgggatccgagcgggctgtgtggaggcttcagactcccggcgccatttagcgcggagagtttcccgggtggacgcggctcctctctcggccactccgcacccccatcttcggtgacagaaggcgcctggtgggggtggctgctcttttctctccctgttccccctcacccagtcctctaggtctcctctcctcttgcctcagagaagcagcggagctcgggccccgcggtgagcggccctcccctccccgccgttccctcctccgtcagcccccggcaccggcccgggaggagacgggtttgccaggcctggggcgggcggggaggcctcggggaagggggggcccgctcctcaggcgccgaggctccgaggctccggcccttcgcctctgggcgatgggcgacctgtgaggccggtccccatcgctgggggcgcgtgtgggaggaggcggccgcccgagtgaccgggagccgggccgcggccttccctcgcccgcctcggcccctcccactcctctgccccggggccgccaccgcccgggcgtcggacctggtcccgtgctcgcggtgccgccgccctctgggcctagcccgcccagctcggcgagcggcggcagtgggagccgcgtccgccgcatccgcctcgactcggtgccggcccctggccctcccctcatgactgcggcgcctctgctgccaccgcccgcccggccgccgctcgccgcaggatggatgcggaccgtgcggcgctaacccccgtggctcagctcccgaatcgcccgccttcgagccctcctcgtgagccgcagcagcctcggtgccagcccccgccgcagctgggcccagcggtccgcctgtccctcgttgcggcttgtcggtgctgagtgaggcgtcgtccgggtcggcgcgaacccgcccggccgcggtgccctgcagacctctgcgcgggcggctcggcccttcacgcccttttcgttcacgaatccgagcccgctcgcctctctccagcgaaccgaccatgtctggcggcgccgcagagaagcagagcagcactcccggttccctgttcctctcgccgccggctcctgcccccaagaatggctccagctccgattcctccgtgggggagaaactgggagccgcggccgccgacgctgtgaccggcaggaccgaggagtacaggcgccgccgccacactatggacaaggacagccgtggggcggccgcgaccactaccaccactgagcaccgcttcttccgccggagcgtcatctgcgactccaatgccactgcactggagcttcccggccttcctctttccctgccccagcccagcatccccgcggctgtcccgcagagtgctccaccggagccccaccgggaagagaccgtgaccgccaccgccacttcccaggtagcccagcagcctccagccgctgccgcccctggggaacaggccgtcgcgggccctgccccctcgactgtccccagcagtaccagcaaagaccgcccagtgtcccagcctagccttgtggggagcaaagaggagccgccgccggcgagaagtggcagcggcggcggcagcgccaaggagccacaggaggaacggagccagcagcaggatgatatcgaagagctggagaccaaggccgtgggaatgtctaacgatggccgctttctcaagtttgacatcgaaatcggcagaggctcctttaagacggtctacaaaggtctggacactgaaaccaccgtggaagtcgcctggtgtgaactgcaggatcgaaaattaacaaagtctgagaggcagagatttaaagaagaagctgaaatgttaaaaggtcttcagcatcccaatattgttagattttatgattcctgggaatccacagtaaaaggaaagaagtgcattgttttggtgactgaacttatgacgtctggaacacttaaaacgtatctgaaaaggtttaaagtgatgaagatcaaagttctaagaagctggtgccgtcagatccttaaaggtcttcagtttcttcatactcgaactccacctatcattcaccgcgatcttaaatgtgacaacatctttatcaccggccctactggctcagtcaagattggagacctcggtctggcaaccctgaagcgggcttcttttgccaagagtgtgataggtaccccagagttcatggcccctgagatgtatgaggagaaatatgatgaatccgttgacgtttatgcttttgggatgtgcatgcttgagatggctacatctgaatatccttactcggagtgccaaaatgctgcgcagatctaccgtcgcgtgaccagtggggtgaagccagccagttttgacaaagtagcaattcctgaagtgaaggaaattattgaaggatgcatacgacaaaacaaagatgaaagatattccatcaaagaccttttgaaccatgccttcttccaagaggaaacaggagtacgggtagaattagcagaagaagatgatggagaaaaaatagccataaaattatggctacgtattgaagatattaagaaattaaagggaaaatacaaagataatgaagctattgagttttcttttgatttagagagagatgtcccagaagatgttgcacaagaaatggtagagtctgggtatgtctgtgaaggtgatcacaagaccatggctaaagctatcaaagacagagtatcattaattaagaggaaacgagagcagcggcagttggtacgggaggagcaagaaaaaaaaaagcaggaagagagcagtctcaaacagcaggtagaacaatccagtgcttcccagacaggaatcaagcagctcccttctgctagcaccggcatacctactgcttctaccacttcagcttcagtttctacacaagtagaacctgaagaacctgaggcagatcaacatcaacaactacagtaccagcaacccagtatatctgtgttatctgatgggacggttgacagtggtcagggatcctctgtcttcacagaatctcgagtgagcagccaacagacagtttcatatggttcccaacatgaacaggcacattctacaggcacagtcccagggcatataccttctactgtccaagcacagtctcagccccatggggtatatccaccctcaagtgtggcacaggggcagagccagggtcagccatcctcaagtagcttaacaggggtttcatcttcccaacccatacaacatcctcagcagcagcagggaatacagcagacagcccctcctcaacagacagtgcagtattcactttcacagacatcaacctccagtgaggccactactgcacagccagtgagtcaacctcaagctccacaagtcttgcctcaagtatcagctggaaaacagcttccagtttcccagccagtaccaactatccaaggcgaacctcagatcccagttgcgacacaaccctcggttgttccagtccactctggtgctcatttccttccagtgggacagccgctccctactcccttgctccctcagtaccctgtctctcagattcccatatcaactcctcatgtgtctacggctcagacaggtttctcatcccttcccatcacaatggcagctggcattactcagcctctgctcacgttggcttcatctgctacaacagctgcgatcccgggggtatcaactgtggttcctagtcagcttccaacccttctgcagcctgtgactcagctgccaagtcaggttcacccacagctcctacaaccagcagttcagtccatgggaataccagctaaccttggacaagctgctgaggttccactttcctctggagatgttctgtaccagggcttcccacctcgactgccaccacagtacccaggagattcaaatattgctccctcttccaacgtggcttctgtttgcatccattctacagtcctatcccctcccatgccgacagaagtactggctacacctgggtactttcccacagtggtgcagccttatgtggaatcaaatcttttagttcctatgggtggtgtaggaggacaggttcaagtgtcccagccaggagggagtttagcacaagcccccactacatcctcccagcaagcagttttggagagtactcagggagtctctcaggttgctcctgcagagccagttgcagtagcacagccccaagctacccagccgaccactttggcttcctctgtagacagtgcacattcagatgttgcttcaggtatgagtgatggcaatgagaacgtcccatcttccagtggaaggcatgaaggaagaactacaaaacggcattaccgaaaatctgtaaggagtcgctctcgacatgaaaaaacttcacgcccaaaattaagaattttgaatgtttcaaataaaggagaccgagtagtagaatgtcaattagagactcataataggaaaatggttacattcaaatttgacctagatggtgacaaccccgaggagatagcaacaattatggtgaacaatgactttattctagcaatagagagagagtcgtttgtggatcaagtgcgagaaattattgaaaaagctgatgaaatgctcagtgaggatgtcagtgtggaaccagagggtgatcagggattggagagtctacaaggaaaggatgactatggcttttcaggttctcagaaattggaaggagagttcaaacaaccaattcctgcgtcttccatgccacagcaaataggcattcctaccagttctttaactcaagttgttcattctgcgggaaggcggtttatagtgagtcctgtgccagaaagccgattacgagaatcaaaagttttccccagtgaaataacagatacagttgctgcctctacagctcagagccctggaatgaacttgtctcactctgcatcatcccttagtctacaacaggccttttctgaacttagacgtgcccaaatgacagaaggacccaacacagcacctccaaactttagtcatacaggaccaacatttccagtagtacctcctttcttaagtagcattgctggagtcccaaccacagcagcagccacagcaccagtccctgcaacaagcagccctcctaatgacatttccacatcagtaattcagtctgaggttacagtgcccactgaagaggggattgctggagttgccaccagcacaggtgtggtaacttcaggtggtctccccataccacctgtgtctgaatcaccagtactttccagcgtagtttcaagtatcacaatacctgcagttgtctcaatatctactacatccccgtcacttcaagtccccacatccacatctgagatcgttgtttctagtacagcactgtatccttcagtaacagtttcagcaacttcagcctctgcagggggcagtactgctaccccaggtcctaagcctccagctgtagtatctcagcaggcagcaggcagcactactgtgggagccacattaacatcagtttctaccaccacttcattcccaagcacagcttcacagctgtccattcagcttagcagcagtacttctactcctactttagctgaaaccgtggtagttagcgcacactcactagataagacatctcatagcagtacaactggattggctttctccctctctgcaccatcttcctcttcctctcctggagcaggagtgtctagttatatttctcagcctggtgggctgcatcctttggtcattccatcagtgatagcttctactcctattcttccccaagcagcaggacctacttctacacctttattaccccaagtacctagtatcccacccttggtacagcctgttgccaatgtgcctgctgtacagcagacactaattcatagtcagcctcaaccagctttgcttcccaaccagccccatactcattgtcctgaagtagattctgatacacaacccaaagctcctggaattgatgacataaagactctagaagaaaagctgcggtctctgttcagtgaacacagctcatctggagctcagcatgcctctgtctcactggagacctcactagtcatagagagcactgtcacaccaggcatcccaactactgctgttgcaccaagcaaactcctgacttctaccacaagtacttgcttaccaccaaccaatttaccactaggaacagttgctttgccagttacaccagtggtcacacctgggcaagtttctaccccagtcagcactactacatcaggagtgaaacctggaactgctccctccaagccacctctaactaaggctccggtgctgccagtgggtactgaacttccagcaggtactctacccagcgagcagctgccaccttttccaggaccttctctaacccagtcccagcaacctctagaggatcttgatgctcaattgagaagaacacttagtccagagatgatcacagtgacttctgcggttggtcctgtgtccatggcggctccaacagcaatcacagaagcaggaacacagcctcagaagggtgtttctcaagtcaaagaaggccctgtcctagcaactagttcaggagctggtgtttttaagatgggacgatttcaggtttctgttgcagcagacggtgcccagaaagagggtaaaaataagtcagaagatgcaaagtctgttcattttgaatccagcacctcagagtcctcagtgctatcaagtagtagtccagagagtaccttggtgaaaccagagccgaatggcataaccatccctggtatctcttcagatgtgccagagagtgcccacaaaactactgcctcagaggcaaagtcagacactgggcagcctaccaaggttggacgttttcaggtgacaactacagcaaacaaagtgggtcgtttctctgtatcaaaaactgaggacaagatcactgacacaaagaaagaaggaccagtggcatctcctccttttatggatttggaacaagctgttcttcctgctgtgataccaaagaaagagaagcctgaactgtcagagccttcacatctaaatgggccgtcttctgacccggaggccgcttttttaagtagggatgtggatgatggttccggtagtccacactcgccccatcagctgagctcaaagagccttcctagccagaatctaagtcaaagccttagtaattcatttaactcctcttacatgagtagcgacaatgagtcagatatcgaagatgaagacttaaagttagagctgcgacgactacgagataaacatctcaaagagattcaggacctgcagagtcgccagaagcatgaaattgaatctttgtataccaaactgggcaaggtgccccctgctgttattattcccccagctgctcccctttcagggagaagacgacgacccactaaaagcaaaggcagcaaatctagtcgaagcagttccttggggaataaaagcccccagctttcaggtaacctgtctggtcagagtgcagcttcagtcttgcacccccagcagaccctccaccctcctggcaacatcccagagtccgggcagaatcagctgttacagccccttaagccatctccctccagtgacaacctctattcagccttcaccagtgatggtgccatttcagtaccaagcctttctgctccaggtcaaggaaccagcagcacaaacactgttggggcaacagtgaacagccaagccgcccaagctcagcctcctgccatgacgtccagcaggaagggcacattcacagatgacttgcacaagttggtagacaattgggcccgagatgccatgaatctctcaggcaggagaggaagcaaagggcacatgaattatgagggccctggaatggcaaggaagttctctgcacctgggcaactgtgcatctccatgacctcgaacctgggtggctctgcccccatctctgcagcatcagctacctctctaggtcacttcaccaagtctatgtgccccccacagcagtatggctttccagctaccccatttggcgctcaatggagtgggacgggtggcccagcaccacagccacttggccagttccaacctgtgggaactgcctccttgcagaatttcaacatcagcaatttgcagaaatccatcagcaaccccccaggctccaacctgcggaccacttagacctagagacattaactgaatagatctgggggcaggagatggaatgctgagggggtgggtgggggtgggaagtagcctatatactaactactagtgctgcatttaactggttatttcttgccagaggggaatgtttttaatactgcattgagccctcagaatggagagtaactgtttggattgctttcctcttgttgcacatgtaccatgcatttctcagcttggggtactacattttgtggaaagttaatctatcatctatctttccacatctgaattaatcattctaggaaagaatacttattcctactcatttcctttatgatgtccaaatggttgcaggatcataatctattgtgccacctttatttctagaagtacaactaatatgttcacattttcaaataaataatactccccgtaagtaataactgcaaccaatcagtgttattcagtgctatgcctccttgtaatgggtagttattaattattttcagagctttccggaaatactgtcctaactggctatgtttaggatctttgttatctctgaagacaaagaaagaagctaggactcttaattttggggtgcttcttgactcttagttgggaaactgaaaatatttccaaccttttacccacgtcaatggcatattctgggaatcaccaccaccaccaccactaccacagaaagaggctggaggctcctgtaccctgttcattccttaagggccctgcttcccttaataagtaagtaagttggtctacggccctaaatatgcaaatgagagctgaaggtttttaaaaggtagaaaggaaaagggcaagggcttccacccctgctttaaaatgatttatttattctctgcttgtatttcttgtggagagagtaaggatagaaccaacaaggggctgagtagctgagaaaggggccacccaagagtgaaacatactttataccagaggagcagtggagcctcatgcagcacattatcatttgttatttgggtttaataataattttgacatcttttcactcatacacaaaaaaagtcagaactggtgttatttactgttgatttcatcctcctgtgtatgaaataacaagcctagaggaatgaactagtgctactgaactgtttaaattatttttgtgttaatagtacactttgagtatctttttccacattaaaaactttctgaattataaatgttttccttacattatttaacaatgtacactgttaaaaataaaaataaaaattcaaactttgggggtttctcagcagccgttaattgtacattttgcactaactctgggtgttgcgcttcttgtaagattgcgctttgtgcttcagtttgttacctttgtagacttatttaatgaaaccattcaaataaaccaaacttgcttttgttga

SEQ ID NO: 284700 - DNA, 9049 bp, Homo sapiens
ggcgggatccgagcgggctgtgtggaggcttcagactcccggcgccatttagcgcggagagtttcccgggtggacgcggctcctctctcggccactccgcacccccatcttcggtgacagaaggcgcctggtgggggtggctgctcttttctctccctgttccccctcacccagtcctctaggtctcctctcctcttgcctcagagaagcagcggagctcgggccccgcggtgagcggccctcccctccccgccgttccctcctccgtcagcccccggcaccggcccgggaggagacgggtttgccaggcctggggcgggcggggaggcctcggggaagggggggcccgctcctcaggcgccgaggctccgaggctccggcccttcgcctctgggcgatgggcgacctgtgaggccggtccccatcgctgggggcgcgtgtgggaggaggcggccgcccgagtgaccgggagccgggccgcggccttccctcgcccgcctcggcccctcccactcctctgccccggggccgccaccgcccgggcgtcggacctggtcccgtgctcgcggtgccgccgccctctgggcctagcccgcccagctcggcgagcggcggcagtgggagccgcgtccgccgcatccgcctcgactcggtgccggcccctggccctcccctcatgactgcggcgcctctgctgccaccgcccgcccggccgccgctcgccgcaggatggatgcggaccgtgcggcgctaacccccgtggctcagctcccgaatcgcccgccttcgagccctcctcgtgagccgcagcagcctcggtgccagcccccgccgcagctgggcccagcggtccgcctgtccctcgttgcggcttgtcggtgctgagtgaggcgtcgtccgggtcggcgcgaacccgcccggccgcggtgccctgcagacctctgcgcgggcggctcggcccttcacgcccttttcgttcacgaatccgagcccgctcgcctctctccagcgaaccgaccatgtctggcggcgccgcagagaagcagagcagcactcccggttccctgttcctctcgccgccggctcctgcccccaagaatggctccagctccgattcctccgtgggggagaaactgggagccgcggccgccgacgctgtgaccggcaggaccgaggagtacaggcgccgccgccacactatggacaaggacagccgtggggcggccgcgaccactaccaccactgagcaccgcttcttccgccggagcgtcatctgcgactccaatgccactgcactggagcttcccggccttcctctttccctgccccagcccagcatccccgcggctgtcccgcagagtgctccaccggagccccaccgggaagagaccgtgaccgccaccgccacttcccaggtagcccagcagcctccagccgctgccgcccctggggaacaggccgtcgcgggccctgccccctcgactgtccccagcagtaccagcaaagaccgcccagtgtcccagcctagccttgtggggagcaaagaggagccgccgccggcgagaagtggcagcggcggcggcagcgccaaggagccacaggaggaacggagccagcagcaggatgatatcgaagagctggagaccaaggccgtgggaatgtctaacgatggccgctttctcaagtttgacatcgaaatcggcagaggctcctttaagacggtctacaaaggtctggacactgaaaccaccgtggaagtcgcctggtgtgaactgcaggatcgaaaattaacaaagtctgagaggcagagatttaaagaagaagctgaaatgttaaaaggtcttcagcatcccaatattgttagattttatgattcctgggaatccacagtaaaaggaaagaagtgcattgttttggtgactgaacttatgacgtctggaacacttaaaacgtatctgaaaaggtttaaagtgatgaagatcaaagttctaagaagctggtgccgtcagatccttaaaggtcttcagtttcttcatactcgaactccacctatcattcaccgcgatcttaaatgtgacaacatctttatcaccggccctactggctcagtcaagattggagacctcggtctggcaaccctgaagcgggcttcttttgccaagagtgtgataggtaccccagagttcatggcccctgagatgtatgaggagaaatatgatgaatccgttgacgtttatgcttttgggatgtgcatgcttgagatggctacatctgaatatccttactcggagtgccaaaatgctgcgcagatctaccgtcgcgtgaccagtggggtgaagccagccagttttgacaaagtagcaattcctgaagtgaaggaaattattgaaggatgcatacgacaaaacaaagatgaaagatattccatcaaagaccttttgaaccatgccttcttccaagaggaaacaggagtacgggtagaattagcagaagaagatgatggagaaaaaatagccataaaattatggctacgtattgaagatattaagaaattaaagggaaaatacaaagataatgaagctattgagttttcttttgatttagagagagatgtcccagaagatgttgcacaagaaatggtagagtctgggtatgtctgtgaaggtgatcacaagaccatggctaaagctatcaaagacagagtatcattaattaagaggaaacgagagcagcggcagttggtacgggaggagcaagaaaaaaaaaagcaggaagagagcagtctcaaacagcaggtagaacaatccagtgcttcccagacaggaatcaagcagctcccttctgctagcaccggcatacctactgcttctaccacttcagcttcagtttctacacaagtagaacctgaagaacctgaggcagatcaacatcaacaactacagtaccagcaacccagtatatctgtgttatctgatgggacggttgacagtggtcagggatcctctgtcttcacagaatctcgagtgagcagccaacagacagtttcatatggttcccaacatgaacaggcacattctacaggcacagtcccagggcatataccttctactgtccaagcacagtctcagccccatggggtatatccaccctcaagtgtggcacaggggcagagccagggtcagccatcctcaagtagcttaacaggggtttcatcttcccaacccatacaacatcctcagcagcagcagggaatacagcagacagcccctcctcaacagacagtgcagtattcactttcacagacatcaacctccagtgaggccactactgcacagccagtgagtcaacctcaagctccacaagtcttgcctcaagtatcagctggaaaacagcttccagtttcccagccagtaccaactatccaaggcgaacctcagatcccagttgcgacacaaccctcggttgttccagtccactctggtgctcatttccttccagtgggacagccgctccctactcccttgctccctcagtaccctgtctctcagattcccatatcaactcctcatgtgtctacggctcagacaggtttctcatcccttcccatcacaatggcagctggcattactcagcctctgctcacgttggcttcatctgctacaacagctgcgatcccgggggtatcaactgtggttcctagtcagcttccaacccttctgcagcctgtgactcagctgccaagtcaggttcacccacagctcctacaaccagcagttcagtccatgggaataccagctaaccttggacaagctgctgaggttccactttcctctggagatgttctgtaccagggcttcccacctcgactgccaccacagtacccaggagattcaaatattgctccctcttccaacgtggcttctgtttgcatccattctacagtcctatcccctcccatgccgacagaagtactggctacacctgggtactttcccacagtggtgcagccttatgtggaatcaaatcttttagttcctatgggtggtgtaggaggacaggttcaagtgtcccagccaggagggagtttagcacaagcccccactacatcctcccagcaagcagttttggagagtactcagggagtctctcaggttgctcctgcagagccagttgcagtagcacagccccaagctacccagccgaccactttggcttcctctgtagacagtgcacattcagatgttgcttcaggtatgagtgatggcaatgagaacgtcccatcttccagtggaaggcatgaaggaagaactacaaaacggcattaccgaaaatctgtaaggagtcgctctcgacatgaaaaaacttcacgcccaaaattaagaattttgaatgtttcaaataaaggagaccgagtagtagaatgtcaattagagactcataataggaaaatggttacattcaaatttgacctagatggtgacaaccccgaggagatagcaacaattatggtgaacaatgactttattctagcaatagagagagagtcgtttgtggatcaagtgcgagaaattattgaaaaagctgatgaaatgctcagtgaggatgtcagtgtggaaccagagggtgatcagggattggagagtctacaaggaaaggatgactatggcttttcaggttctcagaaattggaaggagagttcaaacaaccaattcctgcgtcttccatgccacagcaaataggcattcctaccagttctttaactcaagttgttcattctgcgggaaggcggtttatagtgagtcctgtgccagaaagccgattacgagaatcaaaagttttccccagtgaaataacagatacagttgctgcctctacagctcagagccctggaatgaacttgtctcactctgcatcatcccttagtctacaacaggccttttctgaacttagacgtgcccaaatgacagaaggacccaacacagcacctccaaactttagtcatacaggaccaacatttccagtagtacctcctttcttaagtagcattgctggagtcccaaccacagcagcagccacagcaccagtccctgcaacaagcagccctcctaatgacatttccacatcagtaattcagtctgaggttacagtgcccactgaagaggggattgctggagttgccaccagcacaggtgtggtaacttcaggtggtctccccataccacctgtgtctgaatcaccagtactttccagcgtagtttcaagtatcacaatacctgcagttgtctcaatatctactacatccccgtcacttcaagtccccacatccacatctgagatcgttgtttctagtacagcactgtatccttcagtaacagtttcagcaacttcagcctctgcagggggcagtactgctaccccaggtcctaagcctccagctgtagtatctcagcaggcagcaggcagcactactgtgggagccacattaacatcagtttctaccaccacttcattcccaagcacagcttcacagctgtccattcagcttagcagcagtacttctactcctactttagctgaaaccgtggtagttagcgcacactcactagataagacatctcatagcagtacaactggattggctttctccctctctgcaccatcttcctcttcctctcctggagcaggagtgtctagttatatttctcagcctggtgggctgcatcctttggtcattccatcagtgatagcttctactcctattcttccccaagcagcaggacctacttctacacctttattaccccaagtacctagtatcccacccttggtacagcctgttgccaatgtgcctgctgtacagcagacactaattcatagtcagcctcaaccagctttgcttcccaaccagccccatactcattgtcctgaagtagattctgatacacaacccaaagctcctggaattgatgacataaagactctagaagaaaagctgcggtctctgttcagtgaacacagctcatctggagctcagcatgcctctgtctcactggagacctcactagtcatagagagcactgtcacaccaggcatcccaactactgctgttgcaccaagcaaactcctgacttctaccacaagtacttgcttaccaccaaccaatttaccactaggaacagttgctttgccagttacaccagtggtcacacctgggcaagtttctaccccagtcagcactactacatcaggagtgaaacctggaactgctccctccaagccacctctaactaaggctccggtgctgccagtgggtactgaacttccagcaggtactctacccagcgagcagctgccaccttttccaggaccttctctaacccagtcccagcaacctctagaggatcttgatgctcaattgagaagaacacttagtccagagatgatcacagtgacttctgcggttggtcctgtgtccatggcggctccaacagcaatcacagaagcaggaacacagcctcagaagggtgtttctcaagtcaaagaaggccctgtcctagcaactagttcaggagctggtgtttttaagatgggacgatttcaggtttctgttgcagcagacggtgcccagaaagagggtaaaaataagtcagaagatgcaaagtctgttcattttgaatccagcacctcagagtcctcagtgctatcaagtagtagtccagagagtaccttggtgaaaccagagccgaatggcataaccatccctggtatctcttcagatgtgccagagagtgcccacaaaactactgcctcagaggcaaagtcagacactgggcagcctaccaaggttggacgttttcaggtgacaactacagcaaacaaagtgggtcgtttctctgtatcaaaaactgaggacaagatcactgacacaaagaaagaaggaccagtggcatctcctccttttatggatttggaacaagctgttcttcctgctgtgataccaaagaaagagaagcctgaactgtcagagccttcacatctaaatgggccgtcttctgacccggaggccgcttttttaagtagggatgtggatgatggttccggtagtccacactcgccccatcagctgagctcaaagagccttcctagccagaatctaagtcaaagccttagtaattcatttaactcctcttacatgagtagcgacaatgagtcagatatcgaagatgaagacttaaagttagagctgcgacgactacgagataaacatctcaaagagattcaggacctgcagagtcgccagaagcatgaaattgaatctttgtataccaaactgggcaaggtgccccctgctgttattattcccccagctgctcccctttcagggagaagacgacgacccactaaaagcaaaggcagcaaatctagtcgaagcagttccttggggaataaaagcccccagctttcaggtaacctgtctggtcagagtgcagcttcagtcttgcacccccagcagaccctccaccctcctggcaacatcccagagtccgggcagaatcagctgttacagccccttaagccatctccctccagtgacaacctctattcagccttcaccagtgatggtgccatttcagtaccaagcctttctgctccaggtcaaggaaccagcagcacaaacactgttggggcaacagtgaacagccaagccgcccaagctcagcctcctgccatgacgtccagcaggaagggcacattcacagatgacttgcacaagttggtagacaattgggcccgagatgccatgaatctctcaggcaggagaggaagcaaagggcacatgaattatgagggccctggaatggcaaggaagttctctgcacctgggcaactgtgcatctccatgacctcgaacctgggtggctctgcccccatctctgcagcatcagctacctctctaggtcacttcaccaagtctatgtgccccccacagcagtatggctttccagctaccccatttggcgctcaatggagtgggacgggtggcccagcaccacagccacttggccagttccaacctgtgggaactgcctccttgcagaatttcaacatcagcaatttgcagaaatccatcagcaaccccccaggctccaacctgcggaccacttagacctagagacattaactgaatagatctgggggcaggagatggaatgctgagggggtgggtgggggtgggaagtagcctatatactaactactagtgctgcatttaactggttatttcttgccagaggggaatgtttttaatactgcattgagccctcagaatggagagtctcccccgctccagttattggaatgggagaggaaggaaagaacagcttttttgtcaaggggcagcttcagaccatgctttcctgtttatctatactcagtaatgaggatgagggctaggaaagtcttgttcataaggaagctggagaactcaatgtaaaatcaaacccatctgtaatttcgagtgggtggagctcttgcttttggtacatgccctgaatccctcactccctcaagaatccgaaccacaggacaaaaaccacctactgggctctctcctaccctgccctcctcccttttttttacccctctcttttttattttttctttgctctttagaacccagtgaaaaataccagggtactggggtgcaactctttcttatgataggtcattagtgctttaagcaaaagatattagcagctttgactgcagcattagcaattaggaaaaaaaaaaaattaagttccctgcggacatgtaactttgccatcagttttgatgtggaaacactgtgatatataaaatgttgttggacaacagtagttttaagagtaaaatatgaaacgtttaaaaagttccaaaaaaagctagctctgtcctttacttattgagacactttaactttttcctttgtatttccattgtattagataaataaatgtgaatgtaaaattgtataaaaataagaacactataaacataaaaacatgt

SEQ ID NO: 284701 - DNA, 9814 bp, Homo sapiens
ggcgggatccgagcgggctgtgtggaggcttcagactcccggcgccatttagcgcggagagtttcccgggtggacgcggctcctctctcggccactccgcacccccatcttcggtgacagaaggcgcctggtgggggtggctgctcttttctctccctgttccccctcacccagtcctctaggtctcctctcctcttgcctcagagaagcagcggagctcgggccccgcggtgagcggccctcccctccccgccgttccctcctccgtcagcccccggcaccggcccgggaggagacgggtttgccaggcctggggcgggcggggaggcctcggggaagggggggcccgctcctcaggcgccgaggctccgaggctccggcccttcgcctctgggcgatgggcgacctgtgaggccggtccccatcgctgggggcgcgtgtgggaggaggcggccgcccgagtgaccgggagccgggccgcggccttccctcgcccgcctcggcccctcccactcctctgccccggggccgccaccgcccgggcgtcggacctggtcccgtgctcgcggtgccgccgccctctgggcctagcccgcccagctcggcgagcggcggcagtgggagccgcgtccgccgcatccgcctcgactcggtgccggcccctggccctcccctcatgactgcggcgcctctgctgccaccgcccgcccggccgccgctcgccgcaggatggatgcggaccgtgcggcgctaacccccgtggctcagctcccgaatcgcccgccttcgagccctcctcgtgagccgcagcagcctcggtgccagcccccgccgcagctgggcccagcggtccgcctgtccctcgttgcggcttgtcggtgctgagtgaggcgtcgtccgggtcggcgcgaacccgcccggccgcggtgccctgcagacctctgcgcgggcggctcggcccttcacgcccttttcgttcacgaatccgagcccgctcgcctctctccagcgaaccgaccatgtctggcggcgccgcagagaagcagagcagcactcccggttccctgttcctctcgccgccggctcctgcccccaagaatggctccagctccgattcctccgtgggggagaaactgggagccgcggccgccgacgctgtgaccggcaggaccgaggagtacaggcgccgccgccacactatggacaaggacagccgtggggcggccgcgaccactaccaccactgagcaccgcttcttccgccggagcgtcatctgcgactccaatgccactgcactggagcttcccggccttcctctttccctgccccagcccagcatccccgcggctgtcccgcagagtgctccaccggagccccaccgggaagagaccgtgaccgccaccgccacttcccaggtagcccagcagcctccagccgctgccgcccctggggaacaggccgtcgcgggccctgccccctcgactgtccccagcagtaccagcaaagaccgcccagtgtcccagcctagccttgtggggagcaaagaggagccgccgccggcgagaagtggcagcggcggcggcagcgccaaggagccacaggaggaacggagccagcagcaggatgatatcgaagagctggagaccaaggccgtgggaatgtctaacgatggccgctttctcaagtttgacatcgaaatcggcagaggctcctttaagacggtctacaaaggtctggacactgaaaccaccgtggaagtcgcctggtgtgaactgcaggatcgaaaattaacaaagtctgagaggcagagatttaaagaagaagctgaaatgttaaaaggtcttcagcatcccaatattgttagattttatgattcctgggaatccacagtaaaaggaaagaagtgcattgttttggtgactgaacttatgacgtctggaacacttaaaacgtatctgaaaaggtttaaagtgatgaagatcaaagttctaagaagctggtgccgtcagatccttaaaggtcttcagtttcttcatactcgaactccacctatcattcaccgcgatcttaaatgtgacaacatctttatcaccggccctactggctcagtcaagattggagacctcggtctggcaaccctgaagcgggcttcttttgccaagagtgtgataggtaccccagagttcatggcccctgagatgtatgaggagaaatatgatgaatccgttgacgtttatgcttttgggatgtgcatgcttgagatggctacatctgaatatccttactcggagtgccaaaatgctgcgcagatctaccgtcgcgtgaccagtggggtgaagccagccagttttgacaaagtagcaattcctgaagtgaaggaaattattgaaggatgcatacgacaaaacaaagatgaaagatattccatcaaagaccttttgaaccatgccttcttccaagaggaaacaggagtacgggtagaattagcagaagaagatgatggagaaaaaatagccataaaattatggctacgtattgaagatattaagaaattaaagggaaaatacaaagataatgaagctattgagttttcttttgatttagagagagatgtcccagaagatgttgcacaagaaatggtagagtctgggtatgtctgtgaaggtgatcacaagaccatggctaaagctatcaaagacagagtatcattaattaagaggaaacgagagcagcggcagttggtacgggaggagcaagaaaaaaaaaagcaggaagagagcagtctcaaacagcaggtagaacaatccagtgcttcccagacaggaatcaagcagctcccttctgctagcaccggcatacctactgcttctaccacttcagcttcagtttctacacaagtagaacctgaagaacctgaggcagatcaacatcaacaactacagtaccagcaacccagtatatctgtgttatctgatgggacggttgacagtggtcagggatcctctgtcttcacagaatctcgagtgagcagccaacagacagtttcatatggttcccaacatgaacaggcacattctacaggcacagtcccagggcatataccttctactgtccaagcacagtctcagccccatggggtatatccaccctcaagtgtgcagcagggaatacagcagacagcccctcctcaacagacagtgcagtattcactttcacagacatcaacctccagtgaggccactactgcacagccagtgagtcaacctcaagctccacaagtcttgcctcaagtatcagctggaaaacagagtactcagggagtctctcaggttgctcctgcagagccagttgcagtagcacagccccaagctacccagccgaccactttggcttcctctgtagacagtgcacattcagatgttgcttcaggtatgagtgatggcaatgagaacgtcccatcttccagtggaaggcatgaaggaagaactacaaaacggcattaccgaaaatctgtaaggagtcgctctcgacatgaaaaaacttcacgcccaaaattaagaattttgaatgtttcaaataaaggagaccgagtagtagaatgtcaattagagactcataataggaaaatggttacattcaaatttgacctagatggtgacaaccccgaggagatagcaacaattatggtgaacaatgactttattctagcaatagagagagagtcgtttgtggatcaagtgcgagaaattattgaaaaagctgatgaaatgctcagtgaggatgtcagtgtggaaccagagggtgatcagggattggagagtctacaaggaaaggatgactatggcttttcaggttctcagaaattggaaggagagttcaaacaaccaattcctgcgtcttccatgccacagcaaataggcattcctaccagttctttaactcaagttgttcattctgcgggaaggcggtttatagtgagtcctgtgccagaaagccgattacgagaatcaaaagttttccccagtgaaataacagatacagttgctgcctctacagctcagagccctggaatgaacttgtctcactctgcatcatcccttagtctacaacaggccttttctgaacttagacgtgcccaaatgacagaaggacccaacacagcacctccaaactttagtcatacaggaccaacatttccagtagtacctcctttcttaagtagcattgctggagtcccaaccacagcagcagccacagcaccagtccctgcaacaagcagccctcctaatgacatttccacatcagtaattcagtctgaggttacagtgcccactgaagaggggattgctggagttgccaccagcacaggtgtggtaacttcaggtggtctccccataccacctgtgtctgaatcaccagtactttccagcgtagtttcaagtatcacaatacctgcagttgtctcaatatctactacatccccgtcacttcaagtccccacatccacatctgagatcgttgtttctagtacagcactgtatccttcagtaacagtttcagcaacttcagcctctgcagggggcagtactgctaccccaggtcctaagcctccagctgtagtatctcagcaggcagcaggcagcactactgtgggagccacattaacatcagtttctaccaccacttcattcccaagcacagcttcacagctgtccattcagcttagcagcagtacttctactcctactttagctgaaaccgtggtagttagcgcacactcactagataagacatctcatagcagtacaactggattggctttctccctctctgcaccatcttcctcttcctctcctggagcaggagtgtctagttatatttctcagcctggtgggctgcatcctttggtcattccatcagtgatagcttctactcctattcttccccaagcagcaggacctacttctacacctttattaccccaagtacctagtatcccacccttggtacagcctgttgccaatgtgcctgctgtacagcagacactaattcatagtcagcctcaaccagctttgcttcccaaccagccccatactcattgtcctgaagtagattctgatacacaacccaaagctcctggaattgatgacataaagactctagaagaaaagctgcggtctctgttcagtgaacacagctcatctggagctcagcatgcctctgtctcactggagacctcactagtcatagagagcactgtcacaccaggcatcccaactactgctgttgcaccaagcaaactcctgacttctaccacaagtacttgcttaccaccaaccaatttaccactaggaacagttgctttgccagttacaccagtggtcacacctgggcaagtttctaccccagtcagcactactacatcaggagtgaaacctggaactgctccctccaagccacctctaactaaggctccggtgctgccagtgggtactgaacttccagcaggtactctacccagcgagcagctgccaccttttccaggaccttctctaacccagtcccagcaacctctagaggatcttgatgctcaattgagaagaacacttagtccagagatgatcacagtgacttctgcggttggtcctgtgtccatggcggctccaacagcaatcacagaagcaggaacacagcctcagaagggtgtttctcaagtcaaagaaggccctgtcctagcaactagttcaggagctggtgtttttaagatgggacgatttcaggtttctgttgcagcagacggtgcccagaaagagggtaaaaataagtcagaagatgcaaagtctgttcattttgaatccagcacctcagagtcctcagtgctatcaagtagtagtccagagagtaccttggtgaaaccagagccgaatggcataaccatccctggtatctcttcagatgtgccagagagtgcccacaaaactactgcctcagaggcaaagtcagacactgggcagcctaccaaggttggacgttttcaggtgacaactacagcaaacaaagtgggtcgtttctctgtatcaaaaactgaggacaagatcactgacacaaagaaagaaggaccagtggcatctcctccttttatggatttggaacaagctgttcttcctgctgtgataccaaagaaagagaagcctgaactgtcagagccttcacatctaaatgggccgtcttctgacccggaggccgcttttttaagtagggatgtggatgatggttccggtagtccacactcgccccatcagctgagctcaaagagccttcctagccagaatctaagtcaaagccttagtaattcatttaactcctcttacatgagtagcgacaatgagtcagatatcgaagatgaagacttaaagttagagctgcgacgactacgagataaacatctcaaagagattcaggacctgcagagtcgccagaagcatgaaattgaatctttgtataccaaactgggcaaggtgccccctgctgttattattcccccagctgctcccctttcagggagaagacgacgacccactaaaagcaaaggcagcaaatctagtcgaagcagttccttggggaataaaagcccccagctttcaggaaccagcagcacaaacactgttggggcaacagtgaacagccaagccgcccaagctcagcctcctgccatgacgtccagcaggaagggcacattcacagatgacttgcacaagttggtagacaattgggcccgagatgccatgaatctctcaggcaggagaggaagcaaagggcacatgaattatgagggccctggaatggcaaggaagttctctgcacctgggcaactgtgcatctccatgacctcgaacctgggtggctctgcccccatctctgcagcatcagctacctctctaggtcacttcaccaagtctatgtgccccccacagcagtatggctttccagctaccccatttggcgctcaatggagtgggacgggtggcccagcaccacagccacttggccagttccaacctgtgggaactgcctccttgcagaatttcaacatcagcaatttgcagaaatccatcagcaaccccccaggctccaacctgcggaccacttagacctagagacattaactgaatagatctgggggcaggagatggaatgctgagggggtgggtgggggtgggaagtagcctatatactaactactagtgctgcatttaactggttatttcttgccagaggggaatgtttttaatactgcattgagccctcagaatggagagtctcccccgctccagttattggaatgggagaggaaggaaagaacagcttttttgtcaaggggcagcttcagaccatgctttcctgtttatctatactcagtaatgaggatgagggctaggaaagtcttgttcataaggaagctggagaactcaatgtaaaatcaaacccatctgtaatttcgagtgggtggagctcttgcttttggtacatgccctgaatccctcactccctcaagaatccgaaccacaggacaaaaaccacctactgggctctctcctaccctgccctcctcccttttttttacccctctcttttttattttttctttgctctttagaacccagtgaaaaataccagggtactggggtgcaactctttcttatgataggtcattagtgctttaagcaaaagatattagcagctttgactgcagcattagcaattaggaaaaaaaaaaaattaagttccctgcggacatgtaactttgccatcagttttgatgtggaaacactgtgatatataaaatgttgttggacaacagtagttttaagagtaaaatatgaaacgtttaaaaagttccaaaaaaagctagctctgtcctttacttattgagacactttaactttttcctttgtatttccattgtattagataaataaatgtgaatgtaaaattgtataaattactgtacttgaatacttctgtttcccagtgttgcttgctggacattttagtgccttggacttctattgcttctgccattagcatcaacttaccagaccccagatcaataaagggcatgtggaaggaaatcgtaggtccatgtgaccccagcagtccagcagtggttatgccaaagggaaattgaaaaagtatttttttaagtcattcaacaactttgtctagagcaggtgtaagatgagtagggtgggaagttaggttggcatcagtggttaaaaacagaaagttctgtttcgggaatagtgaggagggggtgttgtaacaaaattggacaacttaaaagaatggtgtgtgctgggtgaaagacaaagactaaagaatgaggaaacaaacgtgatgcctggccagtgactgtcatataaacctttcttatttgagctaggcttgaacagacgtgacctagaagaaactgaacataaagagaagggggtggggggctagttttcaagttggggaacctgatagtgaaaagtcacagatggagaaaattgctctcagaaaaactgtttggattgctttcctcttgttgcacatgtaccatgcatttctcagcttggggtactacattttgtggaaagttaatctatcatctatctttccacatctgaattaatcattctaggaaagaatacttattcctactcatttcctttatgatgtccaaatggttgcaggatcataatctattgtgccacctttatttctagaagtacaactaatatgttcacattttcaaataaataatactccccgtaagtaataactgcaaccaatcagtgttattcagtgctatgcctccttgtaatgggtagttattaattattttcagagctttccggaaatactgtcctaactggctatgtttaggatctttgttatctctgaagacaaagaaagaagctaggactcttaattttggggtgcttcttgactcttagttgggaaactgaaaatatttccaaccttttacccacgtcaatggcatattctgggaatcaccaccaccaccaccactaccacagaaagaggctggaggctcctgtaccctgttcattccttaagggccctgcttcccttaataagtaagtaagttggtctacggccctaaatatgcaaatgagagctgaaggtttttaaaaggtagaaaggaaaagggcaagggcttccacccctgctttaaaatgatttatttattctctgcttgtatttcttgtggagagagtaaggatagaaccaacaaggggctgagtagctgagaaaggggccacccaagagtgaaacatactttataccagaggagcagtggagcctcatgcagcacattatcatttgttatttgggtttaataataattttgacatcttttcactcatacacaaaaaaagtcagaactggtgttatttactgttgatttcatcctcctgtgtatgaaataacaagcctagaggaatgaactagtgctactgaactgtttaaattatttttgtgttaatagtacactttgagtatctttttccacattaaaaactttctgaattataaatgttttccttacattatttaacaatgtacactgttaaaaataaaaataaaaattcaaactttgggggtttctcagcagccgttaattgtacattttgcactaactctgggtgttgcgcttcttgtaagattgcgctttgtgcttcagtttgttacctttgtagacttatttaatgaaaccattcaaataaaccaaacttgcttttgttga

SEQ ID NO: 284702 - DNA, 8975 bp, Homo sapiens
ggcgggatccgagcgggctgtgtggaggcttcagactcccggcgccatttagcgcggagagtttcccgggtggacgcggctcctctctcggccactccgcacccccatcttcggtgacagaaggcgcctggtgggggtggctgctcttttctctccctgttccccctcacccagtcctctaggtctcctctcctcttgcctcagagaagcagcggagctcgggccccgcggtgagcggccctcccctccccgccgttccctcctccgtcagcccccggcaccggcccgggaggagacgggtttgccaggcctggggcgggcggggaggcctcggggaagggggggcccgctcctcaggcgccgaggctccgaggctccggcccttcgcctctgggcgatgggcgacctgtgaggccggtccccatcgctgggggcgcgtgtgggaggaggcggccgcccgagtgaccgggagccgggccgcggccttccctcgcccgcctcggcccctcccactcctctgccccggggccgccaccgcccgggcgtcggacctggtcccgtgctcgcggtgccgccgccctctgggcctagcccgcccagctcggcgagcggcggcagtgggagccgcgtccgccgcatccgcctcgactcggtgccggcccctggccctcccctcatgactgcggcgcctctgctgccaccgcccgcccggccgccgctcgccgcaggatggatgcggaccgtgcggcgctaacccccgtggctcagctcccgaatcgcccgccttcgagccctcctcgtgagccgcagcagcctcggtgccagcccccgccgcagctgggcccagcggtccgcctgtccctcgttgcggcttgtcggtgctgagtgaggcgtcgtccgggtcggcgcgaacccgcccggccgcggtgccctgcagacctctgcgcgggcggctcggcccttcacgcccttttcgttcacgaatccgagcccgctcgcctctctccagcgaaccgaccatgtctggcggcgccgcagagaagcagagcagcactcccggttccctgttcctctcgccgccggctcctgcccccaagaatggctccagctccgattcctccgtgggggagaaactgggagccgcggccgccgacgctgtgaccggcaggaccgaggagtacaggcgccgccgccacactatggacaaggacagccgtggggcggccgcgaccactaccaccactgagcaccgcttcttccgccggagcgtcatctgcgactccaatgccactgcactggagcttcccggccttcctctttccctgccccagcccagcatccccgcggctgtcccgcagagtgctccaccggagccccaccgggaagagaccgtgaccgccaccgccacttcccaggtagcccagcagcctccagccgctgccgcccctggggaacaggccgtcgcgggccctgccccctcgactgtccccagcagtaccagcaaagaccgcccagtgtcccagcctagccttgtggggagcaaagaggagccgccgccggcgagaagtggcagcggcggcggcagcgccaaggagccacaggaggaacggagccagcagcaggatgatatcgaagagctggagaccaaggccgtgggaatgtctaacgatggccgctttctcaagtttgacatcgaaatcggcagaggctcctttaagacggtctacaaaggtctggacactgaaaccaccgtggaagtcgcctggtgtgaactgcaggatcgaaaattaacaaagtctgagaggcagagatttaaagaagaagctgaaatgttaaaaggtcttcagcatcccaatattgttagattttatgattcctgggaatccacagtaaaaggaaagaagtgcattgttttggtgactgaacttatgacgtctggaacacttaaaacgtatctgaaaaggtttaaagtgatgaagatcaaagttctaagaagctggtgccgtcagatccttaaaggtcttcagtttcttcatactcgaactccacctatcattcaccgcgatcttaaatgtgacaacatctttatcaccggccctactggctcagtcaagattggagacctcggtctggcaaccctgaagcgggcttcttttgccaagagtgtgataggtaccccagagttcatggcccctgagatgtatgaggagaaatatgatgaatccgttgacgtttatgcttttgggatgtgcatgcttgagatggctacatctgaatatccttactcggagtgccaaaatgctgcgcagatctaccgtcgcgtgaccagtggggtgaagccagccagttttgacaaagtagcaattcctgaagtgaaggaaattattgaaggatgcatacgacaaaacaaagatgaaagatattccatcaaagaccttttgaaccatgccttcttccaagaggaaacaggagtacgggtagaattagcagaagaagatgatggagaaaaaatagccataaaattatggctacgtattgaagatattaagaaattaaagggaaaatacaaagataatgaagctattgagttttcttttgatttagagagagatgtcccagaagatgttgcacaagaaatggtagagtctgggtatgtctgtgaaggtgatcacaagaccatggctaaagctatcaaagacagagtatcattaattaagaggaaacgagagcagcggcagttggtacgggaggagcaagaaaaaaaaaagcaggaagagagcagtctcaaacagcaggtagaacaatccagtgcttcccagacaggaatcaagcagctcccttctgctagcaccggcatacctactgcttctaccacttcagcttcagtttctacacaagtagaacctgaagaacctgaggcagatcaacatcaacaactacagtaccagcaacccagtatatctgtgttatctgatgggacggttgacagtggtcagggatcctctgtcttcacagaatctcgagtgagcagccaacagacagtttcatatggttcccaacatgaacaggcacattctacaggcacagtcccagggcatataccttctactgtccaagcacagtctcagccccatggggtatatccaccctcaagtgtggcacaggggcagagccagggtcagccatcctcaagtagcttaacaggggtttcatcttcccaacccatacaacatcctcagcagcagcagggaatacagcagacagcccctcctcaacagacagtgcagtattcactttcacagacatcaacctccagtgaggccactactgcacagccagtgagtcaacctcaagctccacaagtcttgcctcaagtatcagctggaaaacagcttccagtttcccagccagtaccaactatccaaggcgaacctcagatcccagttgcgacacaaccctcggttgttccagtccactctggtgctcatttccttccagtgggacagccgctccctactcccttgctccctcagtaccctgtctctcagattcccatatcaactcctcatgtgtctacggctcagacaggtttctcatcccttcccatcacaatggcagctggcattactcagcctctgctcacgttggcttcatctgctacaacagctgcgatcccgggggtatcaactgtggttcctagtcagcttccaacccttctgcagcctgtgactcagctgccaagtcaggttcacccacagctcctacaaccagcagttcagtccatgggaataccagctaaccttggacaagctgctgaggttccactttcctctggagatgttctgtaccagggcttcccacctcgactgccaccacagtacccaggagattcaaatattgctccctcttccaacgtggcttctgtttgcatccattctacagtcctatcccctcccatgccgacagaagtactggctacacctgggtactttcccacagtggtgcagccttatgtggaatcaaatcttttagttcctatgggtggtgtaggaggacaggttcaagtgtcccagccaggagggagtttagcacaagcccccactacatcctcccagcaagcagttttggagagtactcagggagtctctcaggttgctcctgcagagccagttgcagtagcacagccccaagctacccagccgaccactttggcttcctctgtagacagtgcacattcagatgttgcttcaggtatgagtgatggcaatgagaacgtcccatcttccagtggaaggcatgaaggaagaactacaaaacggcattaccgaaaatctgtaaggagtcgctctcgacatgaaaaaacttcacgcccaaaattaagaattttgaatgtttcaaataaaggagaccgagtagtagaatgtcaattagagactcataataggaaaatggttacattcaaatttgacctagatggtgacaaccccgaggagatagcaacaattatggtgaacaatgactttattctagcaatagagagagagtcgtttgtggatcaagtgcgagaaattattgaaaaagctgatgaaatgctcagtgaggatgtcagtgtggaaccagagggtgatcagggattggagagtctacaaggaaaggatgactatggcttttcaggttctcagaaattggaaggagagttcaaacaaccaattcctgcgtcttccatgccacagcaaataggcattcctaccagttctttaactcaagttgttcattctgcgggaaggcggtttatagtgagtcctgtgccagaaagccgattacgagaatcaaaagttttccccagtgaaataacagatacagttgctgcctctacagctcagagccctggaatgaacttgtctcactctgcatcatcccttagtctacaacaggccttttctgaacttagacgtgcccaaatgacagaaggacccaacacagcacctccaaactttagtcatacaggaccaacatttccagtagtacctcctttcttaagtagcattgctggagtcccaaccacagcagcagccacagcaccagtccctgcaacaagcagccctcctaatgacatttccacatcagtaattcagtctgaggttacagtgcccactgaagaggggattgctggagttgccaccagcacaggtgtggtaacttcaggtggtctccccataccacctgtgtctgaatcaccagtactttccagcgtagtttcaagtatcacaatacctgcagttgtctcaatatctactacatccccgtcacttcaagtccccacatccacatctgagatcgttgtttctagtacagcactgtatccttcagtaacagtttcagcaacttcagcctctgcagggggcagtactgctaccccaggtcctaagcctccagctgtagtatctcagcaggcagcaggcagcactactgtgggagccacattaacatcagtttctaccaccacttcattcccaagcacagcttcacagctgtccattcagcttagcagcagtacttctactcctactttagctgaaaccgtggtagttagcgcacactcactagataagacatctcatagcagtacaactggattggctttctccctctctgcaccatcttcctcttcctctcctggagcaggagtgtctagttatatttctcagcctggtgggctgcatcctttggtcattccatcagtgatagcttctactcctattcttccccaagcagcaggacctacttctacacctttattaccccaagtacctagtatcccacccttggtacagcctgttgccaatgtgcctgctgtacagcagacactaattcatagtcagcctcaaccagctttgcttcccaaccagccccatactcattgtcctgaagtagattctgatacacaacccaaagctcctggaattgatgacataaagactctagaagaaaagctgcggtctctgttcagtgaacacagctcatctggagctcagcatgcctctgtctcactggagacctcactagtcatagagagcactgtcacaccaggcatcccaactactgctgttgcaccaagcaaactcctgacttctaccacaagtacttgcttaccaccaaccaatttaccactaggaacagttgctttgccagttacaccagtggtcacacctgggcaagtttctaccccagtcagcactactacatcaggagtgaaacctggaactgctccctccaagccacctctaactaaggctccggtgctgccagtgggtactgaacttccagcaggtactctacccagcgagcagctgccaccttttccaggaccttctctaacccagtcccagcaacctctagaggatcttgatgctcaattgagaagaacacttagtccagagatgatcacagtgacttctgcggttggtcctgtgtccatggcggctccaacagcaatcacagaagcaggaacacagcctcagaagggtgtttctcaagtcaaagaaggccctgtcctagcaactagttcaggagctggtgtttttaagatgggacgatttcaggtttctgttgcagcagacggtgcccagaaagagggtaaaaataagtcagaagatgcaaagtctgttcattttgaatccagcacctcagagtcctcagtgctatcaagtagtagtccagagagtaccttggtgaaaccagagccgaatggcataaccatccctggtatctcttcagatgtgccagagagtgcccacaaaactactgcctcagaggcaaagtcagacactgggcagcctaccaaggttggacgttttcaggtgacaactacagcaaacaaagtgggtcgtttctctgtatcaaaaactgaggacaagatcactgacacaaagaaagaaggaccagtggcatctcctccttttatggatttggaacaagctgttcttcctgctgtgataccaaagaaagagaagcctgaactgtcagagccttcacatctaaatgggccgtcttctgacccggaggccgcttttttaagtagggatgtggatgatggttccggtagtccacactcgccccatcagctgagctcaaagagccttcctagccagaatctaagtcaaagccttagtaattcatttaactcctcttacatgagtagcgacaatgagtcagatatcgaagatgaagacttaaagttagagctgcgacgactacgagataaacatctcaaagagattcaggacctgcagagtcgccagaagcatgaaattgaatctttgtataccaaactgggcaaggtgccccctgctgttattattcccccagctgctcccctttcagggagaagacgacgacccactaaaagcaaaggcagcaaatctagtcgaagcagttccttggggaataaaagcccccagctttcaggtaacctgtctggtcagagtgcagcttcagtcttgcacccccagcagaccctccaccctcctggcaacatcccagagtccgggcagaatcagctgttacagccccttaagccatctccctccagtgacaacctctattcagccttcaccagtgatggtgccatttcagtaccaagcctttctgctccaggtcaaggaaccagcagcacaaacactgttggggcaacagtgaacagccaagccgcccaagctcagcctcctgccatgacgtccagcaggaagggcacattcacagatgacttgcacaagttggtagacaattgggcccgagatgccatgaatctctcaggcaggagaggaagcaaagggcacatgaattatgagggccctggaatggcaaggaagttctctgcacctgggcaactgtgcatctccatgacctcgaacctgggtggctctgcccccatctctgcagcatcagctacctctctaggtcacttcaccaagtctatgtgccccccacagcagtatggctttccagctaccccatttggcgctcaatggagtgggacgggtggcccagcaccacagccacttggccagttccaacctgtgggaactgcctccttgcagaatttcaacatcagcaatttgcagaaatccatcagcaaccccccaggctccaacctgcggaccacttagacctagagacattaactgaatagatctgggggcaggagatggaatgctgagggggtgggtgggggtgggaagtagcctatatactaactactagtgctgcatttaactggttatttcttgccagaggggaatgtttttaatactgcattgagccctcagaatggagagtctcccccgctccagttattggaatgggagaggaaggaaagaacagcttttttgtcaaggggcagcttcagaccatgctttcctgtttatctatactcagtaatgaggatgagggctaggaaagtcttgttcataaggaagctggagaactcaatgtaaaatcaaacccatctgtaatttcgagtgggtggagctcttgcttttggtacatgccctgaatccctcactccctcaagaatccgaaccacaggacaaaaaccacctactgggctctctcctaccctgccctcctcccttttttttacccctctcttttttattttttctttgctctttagaacccagtgaaaaataccagggtactggggtgcaactctttcttatgataggtcattagtgctttaagcaaaagatattagcagctttgactgcagcattagcaattaggaaaaaaaaaaaattaagttccctgcggacatgtaactttgccatcagttttgatgtggaaacactgtgatatataaaatgttgttggacaacagtagttttaagagtaaaatatgaaacgtttaaaaagttccaaaaaaagctagctctgtcctttacttattgagacagcatatcagggtaccgagctcg

SEQ ID NO: 284703 - DNA, 9826 bp, Homo sapiens
ggcgggatccgagcgggctgtgtggaggcttcagactcccggcgccatttagcgcggagagtttcccgggtggacgcggctcctctctcggccactccgcacccccatcttcggtgacagaaggcgcctggtgggggtggctgctcttttctctccctgttccccctcacccagtcctctaggtctcctctcctcttgcctcagagaagcagcggagctcgggccccgcggtgagcggccctcccctccccgccgttccctcctccgtcagcccccggcaccggcccgggaggagacgggtttgccaggcctggggcgggcggggaggcctcggggaagggggggcccgctcctcaggcgccgaggctccgaggctccggcccttcgcctctgggcgatgggcgacctgtgaggccggtccccatcgctgggggcgcgtgtgggaggaggcggccgcccgagtgaccgggagccgggccgcggccttccctcgcccgcctcggcccctcccactcctctgccccggggccgccaccgcccgggcgtcggacctggtcccgtgctcgcggtgccgccgccctctgggcctagcccgcccagctcggcgagcggcggcagtgggagccgcgtccgccgcatccgcctcgactcggtgccggcccctggccctcccctcatgactgcggcgcctctgctgccaccgcccgcccggccgccgctcgccgcaggatggatgcggaccgtgcggcgctaacccccgtggctcagctcccgaatcgcccgccttcgagccctcctcgtgagccgcagcagcctcggtgccagcccccgccgcagctgggcccagcggtccgcctgtccctcgttgcggcttgtcggtgctgagtgaggcgtcgtccgggtcggcgcgaacccgcccggccgcggtgccctgcagacctctgcgcgggcggctcggcccttcacgcccttttcgttcacgaatccgagcccgctcgcctctctccagcgaaccgaccatgtctggcggcgccgcagagaagcagagcagcactcccggttccctgttcctctcgccgccggctcctgcccccaagaatggctccagctccgattcctccgtgggggagaaactgggagccgcggccgccgacgctgtgaccggcaggaccgaggagtacaggcgccgccgccacactatggacaaggacagccgtggggcggccgcgaccactaccaccactgagcaccgcttcttccgccggagcgtcatctgcgactccaatgccactgcactggagcttcccggccttcctctttccctgccccagcccagcatccccgcggctgtcccgcagagtgctccaccggagccccaccgggaagagaccgtgaccgccaccgccacttcccaggtagcccagcagcctccagcccaggatgatatcgaagagctggagaccaaggccgtgggaatgtctaacgatggccgctttctcaagtttgacatcgaaatcggcagaggctcctttaagacggtctacaaaggtctggacactgaaaccaccgtggaagtcgcctggtgtgaactgcaggatcgaaaattaacaaagtctgagaggcagagatttaaagaagaagctgaaatgttaaaaggtcttcagcatcccaatattgttagattttatgattcctgggaatccacagtaaaaggaaagaagtgcattgttttggtgactgaacttatgacgtctggaacacttaaaacgtatctgaaaaggtttaaagtgatgaagatcaaagttctaagaagctggtgccgtcagatccttaaaggtcttcagtttcttcatactcgaactccacctatcattcaccgcgatcttaaatgtgacaacatctttatcaccggccctactggctcagtcaagattggagacctcggtctggcaaccctgaagcgggcttcttttgccaagagtgtgataggtaccccagagttcatggcccctgagatgtatgaggagaaatatgatgaatccgttgacgtttatgcttttgggatgtgcatgcttgagatggctacatctgaatatccttactcggagtgccaaaatgctgcgcagatctaccgtcgcgtgaccagtggggtgaagccagccagttttgacaaagtagcaattcctgaagtgaaggaaattattgaaggatgcatacgacaaaacaaagatgaaagatattccatcaaagaccttttgaaccatgccttcttccaagaggaaacaggagtacgggtagaattagcagaagaagatgatggagaaaaaatagccataaaattatggctacgtattgaagatattaagaaattaaagggaaaatacaaagataatgaagctattgagttttcttttgatttagagagagatgtcccagaagatgttgcacaagaaatggtagagtctgggtatgtctgtgaaggtgatcacaagaccatggctaaagctatcaaagacagagtatcattaattaagaggaaacgagagcagcggcagttggtacgggaggagcaagaaaaaaaaaagcaggaagagagcagtctcaaacagcaggtagaacaatccagtgcttcccagacaggaatcaagcagctcccttctgctagcaccggcatacctactgcttctaccacttcagcttcagtttctacacaagtagaacctgaagaacctgaggcagatcaacatcaacaactacagtaccagcaacccagtatatctgtgttatctgatgggacggttgacagtggtcagggatcctctgtcttcacagaatctcgagtgagcagccaacagacagtttcatatggttcccaacatgaacaggcacattctacaggcacagtcccagggcatataccttctactgtccaagcacagtctcagccccatggggtatatccaccctcaagtgtgcagcagggaatacagcagacagcccctcctcaacagacagtgcagtattcactttcacagacatcaacctccagtgaggccactactgcacagccagtgagtcaacctcaagctccacaagtcttgcctcaagtatcagctggaaaacagagtactcagggagtctctcaggttgctcctgcagagccagttgcagtagcacagccccaagctacccagccgaccactttggcttcctctgtagacagtgcacattcagatgttgcttcaggtatgagtgatggcaatgagaacgtcccatcttccagtggaaggcatgaaggaagaactacaaaacggcattaccgaaaatctgtaaggagtcgctctcgacatgaaaaaacttcacgcccaaaattaagaattttgaatgtttcaaataaaggagaccgagtagtagaatgtcaattagagactcataataggaaaatggttacattcaaatttgacctagatggtgacaaccccgaggagatagcaacaattatggtgaacaatgactttattctagcaatagagagagagtcgtttgtggatcaagtgcgagaaattattgaaaaagctgatgaaatgctcagtgaggatgtcagtgtggaaccagagggtgatcagggattggagagtctacaaggaaaggatgactatggcttttcaggttctcagaaattggaaggagagttcaaacaaccaattcctgcgtcttccatgccacagcaaataggcattcctaccagttctttaactcaagttgttcattctgcgggaaggcggtttatagtgagtcctgtgccagaaagccgattacgagaatcaaaagttttccccagtgaaataacagatacagttgctgcctctacagctcagagccctggaatgaacttgtctcactctgcatcatcccttagtctacaacaggccttttctgaacttagacgtgcccaaatgacagaaggacccaacacagcacctccaaactttagtcatacaggaccaacatttccagtagtacctcctttcttaagtagcattgctggagtcccaaccacagcagcagccacagcaccagtccctgcaacaagcagccctcctaatgacatttccacatcagtaattcagtctgaggttacagtgcccactgaagaggggattgctggagttgccaccagcacaggtgtggtaacttcaggtggtctccccataccacctgtgtctgaatcaccagtactttccagcgtagtttcaagtatcacaatacctgcagttgtctcaatatctactacatccccgtcacttcaagtccccacatccacatctgagatcgttgtttctagtacagcactgtatccttcagtaacagtttcagcaacttcagcctctgcagggggcagtactgctaccccaggtcctaagcctccagctgtagtatctcagcaggcagcaggcagcactactgtgggagccacattaacatcagtttctaccaccacttcattcccaagcacagcttcacagctgtccattcagcttagcagcagtacttctactcctactttagctgaaaccgtggtagttagcgcacactcactagataagacatctcatagcagtacaactggattggctttctccctctctgcaccatcttcctcttcctctcctggagcaggagtgtctagttatatttctcagcctggtgggctgcatcctttggtcattccatcagtgatagcttctactcctattcttccccaagcagcaggacctacttctacacctttattaccccaagtacctagtatcccacccttggtacagcctgttgccaatgtgcctgctgtacagcagacactaattcatagtcagcctcaaccagctttgcttcccaaccagccccatactcattgtcctgaagtagattctgatacacaacccaaagctcctggaattgatgacataaagactctagaagaaaagctgcggtctctgttcagtgaacacagctcatctggagctcagcatgcctctgtctcactggagacctcactagtcatagagagcactgtcacaccaggcatcccaactactgctgttgcaccaagcaaactcctgacttctaccacaagtacttgcttaccaccaaccaatttaccactaggaacagttgctttgccagttacaccagtggtcacacctgggcaagtttctaccccagtcagcactactacatcaggagtgaaacctggaactgctccctccaagccacctctaactaaggctccggtgctgccagtgggtactgaacttccagcaggtactctacccagcgagcagctgccaccttttccaggaccttctctaacccagtcccagcaacctctagaggatcttgatgctcaattgagaagaacacttagtccagagatgatcacagtgacttctgcggttggtcctgtgtccatggcggctccaacagcaatcacagaagcaggaacacagcctcagaagggtgtttctcaagtcaaagaaggccctgtcctagcaactagttcaggagctggtgtttttaagatgggacgatttcaggtttctgttgcagcagacggtgcccagaaagagggtaaaaataagtcagaagatgcaaagtctgttcattttgaatccagcacctcagagtcctcagtgctatcaagtagtagtccagagagtaccttggtgaaaccagagccgaatggcataaccatccctggtatctcttcagatgtgccagagagtgcccacaaaactactgcctcagaggcaaagtcagacactgggcagcctaccaaggttggacgttttcaggtgacaactacagcaaacaaagtgggtcgtttctctgtatcaaaaactgaggacaagatcactgacacaaagaaagaaggaccagtggcatctcctccttttatggatttggaacaagctgttcttcctgctgtgataccaaagaaagagaagcctgaactgtcagagccttcacatctaaatgggccgtcttctgacccggaggccgcttttttaagtagggatgtggatgatggttccggtagtccacactcgccccatcagctgagctcaaagagccttcctagccagaatctaagtcaaagccttagtaattcatttaactcctcttacatgagtagcgacaatgagtcagatatcgaagatgaagacttaaagttagagctgcgacgactacgagataaacatctcaaagagattcaggacctgcagagtcgccagaagcatgaaattgaatctttgtataccaaactgggcaaggtgccccctgctgttattattcccccagctgctcccctttcagggagaagacgacgacccactaaaagcaaaggcagcaaatctagtcgaagcagttccttggggaataaaagcccccagctttcaggtaacctgtctggtcagagtgcagcttcagtcttgcacccccagcagaccctccaccctcctggcaacatcccagagtccgggcagaatcagctgttacagccccttaagccatctccctccagtgacaacctctattcagccttcaccagtgatggtgccatttcagtaccaagcctttctgctccaggtcaaggaaccagcagcacaaacactgttggggcaacagtgaacagccaagccgcccaagctcagcctcctgccatgacgtccagcaggaagggcacattcacagatgacttgcacaagttggtagacaattgggcccgagatgccatgaatctctcaggcaggagaggaagcaaagggcacatgaattatgagggccctggaatggcaaggaagttctctgcacctgggcaactgtgcatctccatgacctcgaacctgggtggctctgcccccatctctgcagcatcagctacctctctaggtcacttcaccaagtctatgtgccccccacagcagtatggctttccagctaccccatttggcgctcaatggagtgggacgggtggcccagcaccacagccacttggccagttccaacctgtgggaactgcctccttgcagaatttcaacatcagcaatttgcagaaatccatcagcaaccccccaggctccaacctgcggaccacttagacctagagacattaactgaatagatctgggggcaggagatggaatgctgagggggtgggtgggggtgggaagtagcctatatactaactactagtgctgcatttaactggttatttcttgccagaggggaatgtttttaatactgcattgagccctcagaatggagagtctcccccgctccagttattggaatgggagaggaaggaaagaacagcttttttgtcaaggggcagcttcagaccatgctttcctgtttatctatactcagtaatgaggatgagggctaggaaagtcttgttcataaggaagctggagaactcaatgtaaaatcaaacccatctgtaatttcgagtgggtggagctcttgcttttggtacatgccctgaatccctcactccctcaagaatccgaaccacaggacaaaaaccacctactgggctctctcctaccctgccctcctcccttttttttacccctctcttttttattttttctttgctctttagaacccagtgaaaaataccagggtactggggtgcaactctttcttatgataggtcattagtgctttaagcaaaagatattagcagctttgactgcagcattagcaattaggaaaaaaaaaaaattaagttccctgcggacatgtaactttgccatcagttttgatgtggaaacactgtgatatataaaatgttgttggacaacagtagttttaagagtaaaatatgaaacgtttaaaaagttccaaaaaaagctagctctgtcctttacttattgagacactttaactttttcctttgtatttccattgtattagataaataaatgtgaatgtaaaattgtataaattactgtacttgaatacttctgtttcccagtgttgcttgctggacattttagtgccttggacttctattgcttctgccattagcatcaacttaccagaccccagatcaataaagggcatgtggaaggaaatcgtaggtccatgtgaccccagcagtccagcagtggttatgccaaagggaaattgaaaaagtatttttttaagtcattcaacaactttgtctagagcaggtgtaagatgagtagggtgggaagttaggttggcatcagtggttaaaaacagaaagttctgtttcgggaatagtgaggagggggtgttgtaacaaaattggacaacttaaaagaatggtgtgtgctgggtgaaagacaaagactaaagaatgaggaaacaaacgtgatgcctggccagtgactgtcatataaacctttcttatttgagctaggcttgaacagacgtgacctagaagaaactgaacataaagagaagggggtggggggctagttttcaagttggggaacctgatagtgaaaagtcacagatggagaaaattgctctcagaaaaactgtttggattgctttcctcttgttgcacatgtaccatgcatttctcagcttggggtactacattttgtggaaagttaatctatcatctatctttccacatctgaattaatcattctaggaaagaatacttattcctactcatttcctttatgatgtccaaatggttgcaggatcataatctattgtgccacctttatttctagaagtacaactaatatgttcacattttcaaataaataatactccccgtaagtaataactgcaaccaatcagtgttattcagtgctatgcctccttgtaatgggtagttattaattattttcagagctttccggaaatactgtcctaactggctatgtttaggatctttgttatctctgaagacaaagaaagaagctaggactcttaattttggggtgcttcttgactcttagttgggaaactgaaaatatttccaaccttttacccacgtcaatggcatattctgggaatcaccaccaccaccaccactaccacagaaagaggctggaggctcctgtaccctgttcattccttaagggccctgcttcccttaataagtaagtaagttggtctacggccctaaatatgcaaatgagagctgaaggtttttaaaaggtagaaaggaaaagggcaagggcttccacccctgctttaaaatgatttatttattctctgcttgtatttcttgtggagagagtaaggatagaaccaacaaggggctgagtagctgagaaaggggccacccaagagtgaaacatactttataccagaggagcagtggagcctcatgcagcacattatcatttgttatttgggtttaataataattttgacatcttttcactcatacacaaaaaaagtcagaactggtgttatttactgttgatttcatcctcctgtgtatgaaataacaagcctagaggaatgaactagtgctactgaactgtttaaattatttttgtgttaatagtacactttgagtatctttttccacattaaaaactttctgaattataaatgttttccttacattatttaacaatgtacactgttaaaaataaaaataaaaattcaaactttgggggtttctcagcagccgttaattgtacattttgcactaactctgggtgttgcgcttcttgtaagattgcgctttgtgcttcagtttgttacctttgtagacttatttaatgaaaccattcaaataaaccaaacttgcttttgttga

SEQ ID NO: 284704 - DNA, 7811 bp, Homo sapiens
ccttcattttcctccaataagaaatctgttttgccttttctgatggatattaaaaagaaagatttttgctcagtatttgtcatcataaattctcattgctgctgctgccctcaaaaggattgtataaatgagggggtgaagccagccagttttgacaaagtagcaattcctgaagtgaaggaaattattgaaggatgcatacgacaaaacaaagatgaaagatattccatcaaagaccttttgaaccatgccttcttccaagaggaaacaggagtacgggtagaattagcagaagaagatgatggagaaaaaatagccataaaattatggctacgtattgaagatattaagaaattaaagggaaaatacaaagataatgaagctattgagttttcttttgatttagagagagatgtcccagaagatgttgcacaagaaatggtagagtctgggtatgtctgtgaaggtgatcacaagaccatggctaaagctatcaaagacagagtatcattaattaagaggaaacgagagcagcggcagttggtacgggaggagcaagaaaaaaaaaagcaggaagagagcagtctcaaacagcaggtagaacaatccagtgcttcccagacaggaatcaagcagctcccttctgctagcaccggcatacctactgcttctaccacttcagcttcagtttctacacaagtagaacctgaagaacctgaggcagatcaacatcaacaactacagtaccagcaacccagtatatctgtgttatctgatgggacggttgacagtggtcagggatcctctgtcttcacagaatctcgagtgagcagccaacagacagtttcatatggttcccaacatgaacaggcacattctacaggcacagtcccagggcatataccttctactgtccaagcacagtctcagccccatggggtatatccaccctcaagtgtgcagcagggaatacagcagacagcccctcctcaacagacagtgcagtattcactttcacagacatcaacctccagtgaggccactactgcacagccagtgagtcaacctcaagctccacaagtcttgcctcaagtatcagctggaaaacagagtactcagggagtctctcaggttgctcctgcagagccagttgcagtagcacagccccaagctacccagccgaccactttggcttcctctgtagacagtgcacattcagatgttgcttcaggtatgagtgatggcaatgagaacgtcccatcttccagtggaaggcatgaaggaagaactacaaaacggcattaccgaaaatctgtaaggagtcgctctcgacatgaaaaaacttcacgcccaaaattaagaattttgaatgtttcaaataaaggagaccgagtagtagaatgtcaattagagactcataataggaaaatggttacattcaaatttgacctagatggtgacaaccccgaggagatagcaacaattatggtgaacaatgactttattctagcaatagagagagagtcgtttgtggatcaagtgcgagaaattattgaaaaagctgatgaaatgctcagtgaggatgtcagtgtggaaccagagggtgatcagggattggagagtctacaaggaaaggatgactatggcttttcaggttctcagaaattggaaggagagttcaaacaaccaattcctgcgtcttccatgccacagcaaataggcattcctaccagttctttaactcaagttgttcattctgcgggaaggcggtttatagtgagtcctgtgccagaaagccgattacgagaatcaaaagttttccccagtgaaataacagatacagttgctgcctctacagctcagagccctggaatgaacttgtctcactctgcatcatcccttagtctacaacaggccttttctgaacttagacgtgcccaaatgacagaaggacccaacacagcacctccaaactttagtcatacaggaccaacatttccagtagtacctcctttcttaagtagcattgctggagtcccaaccacagcagcagccacagcaccagtccctgcaacaagcagccctcctaatgacatttccacatcagtaattcagtctgaggttacagtgcccactgaagaggggattgctggagttgccaccagcacaggtgtggtaacttcaggtggtctccccataccacctgtgtctgaatcaccagtactttccagcgtagtttcaagtatcacaatacctgcagttgtctcaatatctactacatccccgtcacttcaagtccccacatccacatctgagatcgttgtttctagtacagcactgtatccttcagtaacagtttcagcaacttcagcctctgcagggggcagtactgctaccccaggtcctaagcctccagctgtagtatctcagcaggcagcaggcagcactactgtgggagccacattaacatcagtttctaccaccacttcattcccaagcacagcttcacagctgtccattcagcttagcagcagtacttctactcctactttagctgaaaccgtggtagttagcgcacactcactagataagacatctcatagcagtacaactggattggctttctccctctctgcaccatcttcctcttcctctcctggagcaggagtgtctagttatatttctcagcctggtgggctgcatcctttggtcattccatcagtgatagcttctactcctattcttccccaagcagcaggacctacttctacacctttattaccccaagtacctagtatcccacccttggtacagcctgttgccaatgtgcctgctgtacagcagacactaattcatagtcagcctcaaccagctttgcttcccaaccagccccatactcattgtcctgaagtagattctgatacacaacccaaagctcctggaattgatgacataaagactctagaagaaaagctgcggtctctgttcagtgaacacagctcatctggagctcagcatgcctctgtctcactggagacctcactagtcatagagagcactgtcacaccaggcatcccaactactgctgttgcaccaagcaaactcctgacttctaccacaagtacttgcttaccaccaaccaatttaccactaggaacagttgctttgccagttacaccagtggtcacacctgggcaagtttctaccccagtcagcactactacatcaggagtgaaacctggaactgctccctccaagccacctctaactaaggctccggtgctgccagtgggtactgaacttccagcaggtactctacccagcgagcagctgccaccttttccaggaccttctctaacccagtcccagcaacctctagaggatcttgatgctcaattgagaagaacacttagtccagagatgatcacagtgacttctgcggttggtcctgtgtccatggcggctccaacagcaatcacagaagcaggaacacagcctcagaagggtgtttctcaagtcaaagaaggccctgtcctagcaactagttcaggagctggtgtttttaagatgggacgatttcaggtttctgttgcagcagacggtgcccagaaagagggtaaaaataagtcagaagatgcaaagtctgttcattttgaatccagcacctcagagtcctcagtgctatcaagtagtagtccagagagtaccttggtgaaaccagagccgaatggcataaccatccctggtatctcttcagatgtgccagagagtgcccacaaaactactgcctcagaggcaaagtcagacactgggcagcctaccaaggttggacgttttcaggtgacaactacagcaaacaaagtgggtcgtttctctgtatcaaaaactgaggacaagatcactgacacaaagaaagaaggaccagtggcatctcctccttttatggatttggaacaagctgttcttcctgctgtgataccaaagaaagagaagcctgaactgtcagagccttcacatctaaatgggccgtcttctgacccggaggccgcttttttaagtagggatgtggatgatggttccggtagtccacactcgccccatcagctgagctcaaagagccttcctagccagaatctaagtcaaagccttagtaattcatttaactcctcttacatgagtagcgacaatgagtcagatatcgaagatgaagacttaaagttagagctgcgacgactacgagataaacatctcaaagagattcaggacctgcagagtcgccagaagcatgaaattgaatctttgtataccaaactgggcaaggtgccccctgctgttattattcccccagctgctcccctttcagggagaagacgacgacccactaaaagcaaaggcagcaaatctagtcgaagcagttccttggggaataaaagcccccagctttcaggtaacctgtctggtcagagtgcagcttcagtcttgcacccccagcagaccctccaccctcctggcaacatcccagagtccgggcagaatcagctgttacagccccttaagccatctccctccagtgacaacctctattcagccttcaccagtgatggtgccatttcagtaccaagcctttctgctccaggtcaaggaaccagcagcacaaacactgttggggcaacagtgaacagccaagccgcccaagctcagcctcctgccatgacgtccagcaggaagggcacattcacagatgacttgcacaagttggtagacaattgggcccgagatgccatgaatctctcaggcaggagaggaagcaaagggcacatgaattatgagggccctggaatggcaaggaagttctctgcacctgggcaactgtgcatctccatgacctcgaacctgggtggctctgcccccatctctgcagcatcagctacctctctaggtcacttcaccaagtctatgtgccccccacagcagtatggctttccagctaccccatttggcgctcaatggagtgggacgggtggcccagcaccacagccacttggccagttccaacctgtgggaactgcctccttgcagaatttcaacatcagcaatttgcagaaatccatcagcaaccccccaggctccaacctgcggaccacttagacctagagacattaactgaatagatctgggggcaggagatggaatgctgagggggtgggtgggggtgggaagtagcctatatactaactactagtgctgcatttaactggttatttcttgccagaggggaatgtttttaatactgcattgagccctcagaatggagagtctcccccgctccagttattggaatgggagaggaaggaaagaacagcttttttgtcaaggggcagcttcagaccatgctttcctgtttatctatactcagtaatgaggatgagggctaggaaagtcttgttcataaggaagctggagaactcaatgtaaaatcaaacccatctgtaatttcgagtgggtggagctcttgcttttggtacatgccctgaatccctcactccctcaagaatccgaaccacaggacaaaaaccacctactgggctctctcctaccctgccctcctcccttttttttacccctctcttttttattttttctttgctctttagaacccagtgaaaaataccagggtactggggtgcaactctttcttatgataggtcattagtgctttaagcaaaagatattagcagctttgactgcagcattagcaattaggaaaaaaaaaaaattaagttccctgcggacatgtaactttgccatcagttttgatgtggaaacactgtgatatataaaatgttgttggacaacagtagttttaagagtaaaatatgaaacgtttaaaaagttccaaaaaaagctagctctgtcctttacttattgagacactttaactttttcctttgtatttccattgtattagataaataaatgtgaatgtaaaattgtataaattactgtacttgaatacttctgtttcccagtgttgcttgctggacattttagtgccttggacttctattgcttctgccattagcatcaacttaccagaccccagatcaataaagggcatgtggaaggaaatcgtaggtccatgtgaccccagcagtccagcagtggttatgccaaagggaaattgaaaaagtatttttttaagtcattcaacaactttgtctagagcaggtgtaagatgagtagggtgggaagttaggttggcatcagtggttaaaaacagaaagttctgtttcgggaatagtgaggagggggtgttgtaacaaaattggacaacttaaaagaatggtgtgtgctgggtgaaagacaaagactaaagaatgaggaaacaaacgtgatgcctggccagtgactgtcatataaacctttcttatttgagctaggcttgaacagacgtgacctagaagaaactgaacataaagagaagggggtggggggctagttttcaagttggggaacctgatagtgaaaagtcacagatggagaaaattgctctcagaaaaactgtttggattgctttcctcttgttgcacatgtaccatgcatttctcagcttggggtactacattttgtggaaagttaatctatcatctatctttccacatctgaattaatcattctaggaaagaatacttattcctactcatttcctttatgatgtccaaatggttgcaggatcataatctattgtgccacctttatttctagaagtacaactaatatgttcacattttcaaataaataatactccccgtaagtaataactgcaaccaatcagtgttattcagtgctatgcctccttgtaatgggtagttattaattattttcagagctttccggaaatactgtcctaactggctatgtttaggatctttgttatctctgaagacaaagaaagaagctaggactcttaattttggggtgcttcttgactcttagttgggaaactgaaaatatttccaaccttttacccacgtcaatggcatattctgggaatcaccaccaccaccaccactaccacagaaagaggctggaggctcctgtaccctgttcattccttaagggccctgcttcccttaataagtaagtaagttggtctacggccctaaatatgcaaatgagagctgaaggtttttaaaaggtagaaaggaaaagggcaagggcttccacccctgctttaaaatgatttatttattctctgcttgtatttcttgtggagagagtaaggatagaaccaacaaggggctgagtagctgagaaaggggccacccaagagtgaaacatactttataccagaggagcagtggagcctcatgcagcacattatcatttgttatttgggtttaataataattttgacatcttttcactcatacacaaaaaaagtcagaactggtgttatttactgttgatttcatcctcctgtgtatgaaataacaagcctagaggaatgaactagtgctactgaactgtttaaattatttttgtgttaatagtacactttgagtatctttttccacattaaaaactttctgaattataaatgttttccttacattatttaacaatgtacactgttaaaaataaaaataaaaattcaaactttgggggtttctcagcagccgttaattgtacattttgcactaactctgggtgttgcgcttcttgtaagattgcgctttgtgcttcagtttgttacctttgtagacttatttaatgaaaccattcaaataaaccaaacttgcttttgttga

SEQ ID NO: 284705 - DNA, 7411 bp, Homo sapiens
attctagaggatcccgagctgagaatgtcgcacaagagatggtagagtctgggtatgtctgtgaaggtgatcacaagaccatggctaaagctatcaaagacagagtatcattaattaagaggaaacgagagcagcggcagttggtacgggaggagcaagaaaaaaaaaagcaggaagagagcagtctcaaacagcaggtagaacaatccagtgcttcccagacaggaatcaagcagctcccttctgctagcaccggcatacctactgcttctaccacttcagcttcagtttctacacaagtagaacctgaagaacctgaggcagatcaacatcaacaactacagtaccagcaacccagtatatctgtgttatctgatgggacggttgacagtggtcagggatcctctgtcttcacagaatctcgagtgagcagccaacagacagtttcatatggttcccaacatgaacaggcacattctacaggcacagtcccagggcatataccttctactgtccaagcacagtctcagccccatggggtatatccaccctcaagtgtgcagcagggaatacagcagacagcccctcctcaacagacagtgcagtattcactttcacagacatcaacctccagtgaggccactactgcacagccagtgagtcaacctcaagctccacaagtcttgcctcaagtatcagctggaaaacagagtactcagggagtctctcaggttgctcctgcagagccagttgcagtagcacagccccaagctacccagccgaccactttggcttcctctgtagacagtgcacattcagatgttgcttcaggtatgagtgatggcaatgagaacgtcccatcttccagtggaaggcatgaaggaagaactacaaaacggcattaccgaaaatctgtaaggagtcgctctcgacatgaaaaaacttcacgcccaaaattaagaattttgaatgtttcaaataaaggagaccgagtagtagaatgtcaattagagactcataataggaaaatggttacattcaaatttgacctagatggtgacaaccccgaggagatagcaacaattatggtgaacaatgactttattctagcaatagagagagagtcgtttgtggatcaagtgcgagaaattattgaaaaagctgatgaaatgctcagtgaggatgtcagtgtggaaccagagggtgatcagggattggagagtctacaaggaaaggatgactatggcttttcaggttctcagaaattggaaggagagttcaaacaaccaattcctgcgtcttccatgccacagcaaataggcattcctaccagttctttaactcaagttgttcattctgcgggaaggcggtttatagtgagtcctgtgccagaaagccgattacgagaatcaaaagttttccccagtgaaataacagatacagttgctgcctctacagctcagagccctggaatgaacttgtctcactctgcatcatcccttagtctacaacaggccttttctgaacttagacgtgcccaaatgacagaaggacccaacacagcacctccaaactttagtcatacaggaccaacatttccagtagtacctcctttcttaagtagcattgctggagtcccaaccacagcagcagccacagcaccagtccctgcaacaagcagccctcctaatgacatttccacatcagtaattcagtctgaggttacagtgcccactgaagaggggattgctggagttgccaccagcacaggtgtggtaacttcaggtggtctccccataccacctgtgtctgaatcaccagtactttccagcgtagtttcaagtatcacaatacctgcagttgtctcaatatctactacatccccgtcacttcaagtccccacatccacatctgagatcgttgtttctagtacagcactgtatccttcagtaacagtttcagcaacttcagcctctgcagggggcagtactgctaccccaggtcctaagcctccagctgtagtatctcagcaggcagcaggcagcactactgtgggagccacattaacatcagtttctaccaccacttcattcccaagcacagcttcacagctgtccattcagcttagcagcagtacttctactcctactttagctgaaaccgtggtagttagcgcacactcactagataagacatctcatagcagtacaactggattggctttctccctctctgcaccatcttcctcttcctctcctggagcaggagtgtctagttatatttctcagcctggtgggctgcatcctttggtcattccatcagtgatagcttctactcctattcttccccaagcagcaggacctacttctacacctttattaccccaagtacctagtatcccacccttggtacagcctgttgccaatgtgcctgctgtacagcagacactaattcatagtcagcctcaaccagctttgcttcccaaccagccccatactcattgtcctgaagtagattctgatacacaacccaaagctcctggaattgatgacataaagactctagaagaaaagctgcggtctctgttcagtgaacacagctcatctggagctcagcatgcctctgtctcactggagacctcactagtcatagagagcactgtcacaccaggcatcccaactactgctgttgcaccaagcaaactcctgacttctaccacaagtacttgcttaccaccaaccaatttaccactaggaacagttgctttgccagttacaccagtggtcacacctgggcaagtttctaccccagtcagcactactacatcaggagtgaaacctggaactgctccctccaagccacctctaactaaggctccggtgctgccagtgggtactgaacttccagcaggtactctacccagcgagcagctgccaccttttccaggaccttctctaacccagtcccagcaacctctagaggatcttgatgctcaattgagaagaacacttagtccagagatgatcacagtgacttctgcggttggtcctgtgtccatggcggctccaacagcaatcacagaagcaggaacacagcctcagaagggtgtttctcaagtcaaagaaggccctgtcctagcaactagttcaggagctggtgtttttaagatgggacgatttcaggtttctgttgcagcagacggtgcccagaaagagggtaaaaataagtcagaagatgcaaagtctgttcattttgaatccagcacctcagagtcctcagtgctatcaagtagtagtccagagagtaccttggtgaaaccagagccgaatggcataaccatccctggtatctcttcagatgtgccagagagtgcccacaaaactactgcctcagaggcaaagtcagacactgggcagcctaccaaggttggacgttttcaggtgacaactacagcaaacaaagtgggtcgtttctctgtatcaaaaactgaggacaagatcactgacacaaagaaagaaggaccagtggcatctcctccttttatggatttggaacaagctgttcttcctgctgtgataccaaagaaagagaagcctgaactgtcagagccttcacatctaaatgggccgtcttctgacccggaggccgcttttttaagtagggatgtggatgatggttccggtagtccacactcgccccatcagctgagctcaaagagccttcctagccagaatctaagtcaaagccttagtaattcatttaactcctcttacatgagtagcgacaatgagtcagatatcgaagatgaagacttaaagttagagctgcgacgactacgagataaacatctcaaagagattcaggacctgcagagtcgccagaagcatgaaattgaatctttgtataccaaactgggcaaggtgccccctgctgttattattcccccagctgctcccctttcagggagaagacgacgacccactaaaagcaaaggcagcaaatctagtcgaagcagttccttggggaataaaagcccccagctttcaggtaacctgtctggtcagagtgcagcttcagtcttgcacccccagcagaccctccaccctcctggcaacatcccagagtccgggcagaatcagctgttacagccccttaagccatctccctccagtgacaacctctattcagccttcaccagtgatggtgccatttcagtaccaagcctttctgctccaggtcaaggaaccagcagcacaaacactgttggggcaacagtgaacagccaagccgcccaagctcagcctcctgccatgacgtccagcaggaagggcacattcacagatgacttgcacaagttggtagacaattgggcccgagatgccatgaatctctcaggcaggagaggaagcaaagggcacatgaattatgagggccctggaatggcaaggaagttctctgcacctgggcaactgtgcatctccatgacctcgaacctgggtggctctgcccccatctctgcagcatcagctacctctctaggtcacttcaccaagtctatgtgccccccacagcagtatggctttccagctaccccatttggcgctcaatggagtgggacgggtggcccagcaccacagccacttggccagttccaacctgtgggaactgcctccttgcagaatttcaacatcagcaatttgcagaaatccatcagcaaccccccaggctccaacctgcggaccacttagacctagagacattaactgaatagatctgggggcaggagatggaatgctgagggggtgggtgggggtgggaagtagcctatatactaactactagtgctgcatttaactggttatttcttgccagaggggaatgtttttaatactgcattgagccctcagaatggagagtctcccccgctccagttattggaatgggagaggaaggaaagaacagcttttttgtcaaggggcagcttcagaccatgctttcctgtttatctatactcagtaatgaggatgagggctaggaaagtcttgttcataaggaagctggagaactcaatgtaaaatcaaacccatctgtaatttcgagtgggtggagctcttgcttttggtacatgccctgaatccctcactccctcaagaatccgaaccacaggacaaaaaccacctactgggctctctcctaccctgccctcctcccttttttttacccctctcttttttattttttctttgctctttagaacccagtgaaaaataccagggtactggggtgcaactctttcttatgataggtcattagtgctttaagcaaaagatattagcagctttgactgcagcattagcaattaggaaaaaaaaaaaattaagttccctgcggacatgtaactttgccatcagttttgatgtggaaacactgtgatatataaaatgttgttggacaacagtagttttaagagtaaaatatgaaacgtttaaaaagttccaaaaaaagctagctctgtcctttacttattgagacactttaactttttcctttgtatttccattgtattagataaataaatgtgaatgtaaaattgtataaattactgtacttgaatacttctgtttcccagtgttgcttgctggacattttagtgccttggacttctattgcttctgccattagcatcaacttaccagaccccagatcaataaagggcatgtggaaggaaatcgtaggtccatgtgaccccagcagtccagcagtggttatgccaaagggaaattgaaaaagtatttttttaagtcattcaacaactttgtctagagcaggtgtaagatgagtagggtgggaagttaggttggcatcagtggttaaaaacagaaagttctgtttcgggaatagtgaggagggggtgttgtaacaaaattggacaacttaaaagaatggtgtgtgctgggtgaaagacaaagactaaagaatgaggaaacaaacgtgatgcctggccagtgactgtcatataaacctttcttatttgagctaggcttgaacagacgtgacctagaagaaactgaacataaagagaagggggtggggggctagttttcaagttggggaacctgatagtgaaaagtcacagatggagaaaattgctctcagaaaaactgtttggattgctttcctcttgttgcacatgtaccatgcatttctcagcttggggtactacattttgtggaaagttaatctatcatctatctttccacatctgaattaatcattctaggaaagaatacttattcctactcatttcctttatgatgtccaaatggttgcaggatcataatctattgtgccacctttatttctagaagtacaactaatatgttcacattttcaaataaataatactccccgtaagtaataactgcaaccaatcagtgttattcagtgctatgcctccttgtaatgggtagttattaattattttcagagctttccggaaatactgtcctaactggctatgtttaggatctttgttatctctgaagacaaagaaagaagctaggactcttaattttggggtgcttcttgactcttagttgggaaactgaaaatatttccaaccttttacccacgtcaatggcatattctgggaatcaccaccaccaccaccactaccacagaaagaggctggaggctcctgtaccctgttcattccttaagggccctgcttcccttaataagtaagtaagttggtctacggccctaaatatgcaaatgagagctgaaggtttttaaaaggtagaaaggaaaagggcaagggcttccacccctgctttaaaatgatttatttattctctgcttgtatttcttgtggagagagtaaggatagaaccaacaaggggctgagtagctgagaaaggggccacccaagagtgaaacatactttataccagaggagcagtggagcctcatgcagcacattatcatttgttatttgggtttaataataattttgacatcttttcactcatacacaaaaaaagtcagaactggtgttatttactgttgatttcatcctcctgtgtatgaaataacaagcctagaggaatgaactagtgctactgaactgtttaaattatttttgtgttaatagtacactttgagtatctttttccacattaaaaactttctgaattataaatgttttccttacattatttaacaatgtacactgttaaaaataaaaataaaaattcaaactttgggggtttctcagcagccgttaattgtacattttgcactaactctgggtgttgcgcttcttgtaagattgcgctttgtgcttcagtttgttacctttgtagacttatttaatgaaaccattcaaataaaccaaacttgcttttgttga

SEQ ID NO: 284706 - DNA, 7502 bp, Homo sapiens
tcattccctttggccccactttgagttaaaaaataatgtccttgtttcaaaaagagaaacttcatttttttaataaaataagcaatctaaggcattaacagctagtaaatattaaagctaaaatttgaaaatgtctgttattccaaatccagtgctttcctccctattttgtagctataatcaaagctattcttcaagcatattaattatacagttgataaaatagggtaaggaaaaaagattaaaggaagctattggatctatctgatataggtgccaaagagagagctgatgccaagagatagggaaaagggaatggcagggatgggatggggaaaggaactgtctggatatgttatgtaaatgtctttgtaaagacctattgttggggtgagggagataattgggtgaagagccaatggtaacttgagtattaaaagattggttaatttttcctggtggcaccatcacaaagaacatcagagggaaaacaaatatataatggaaattgatgaatttgggtttgtgcatgtcttgattactaaaatcatcattatttacagacactgaaggctttaggtaaacatgcttccttagaaacatgctgttattgatttgaaataaaactgaatcattgtattttattcttagcagcagggaatacagcagacagcccctcctcaacagacagtgcagtattcactttcacagacatcaacctccagtgaggccactactgcacagccagtgagtcaacctcaagctccacaagtcttgcctcaagtatcagctggaaaacagagtactcagggagtctctcaggttgctcctgcagagccagttgcagtagcacagccccaagctacccagccgaccactttggcttcctctgtagacagtgcacattcagatgttgcttcaggtatgagtgatggcaatgagaacgtcccatcttccagtggaaggcatgaaggaagaactacaaaacggcattaccgaaaatctgtaaggagtcgctctcgacatgaaaaaacttcacgcccaaaattaagaattttgaatgtttcaaataaaggagaccgagtagtagaatgtcaattagagactcataataggaaaatggttacattcaaatttgacctagatggtgacaaccccgaggagatagcaacaattatggtgaacaatgactttattctagcaatagagagagagtcgtttgtggatcaagtgcgagaaattattgaaaaagctgatgaaatgctcagtgaggatgtcagtgtggaaccagagggtgatcagggattggagagtctacaaggaaaggatgactatggcttttcaggttctcagaaattggaaggagagttcaaacaaccaattcctgcgtcttccatgccacagcaaataggcattcctaccagttctttaactcaagttgttcattctgcgggaaggcggtttatagtgagtcctgtgccagaaagccgattacgagaatcaaaagttttccccagtgaaataacagatacagttgctgcctctacagctcagagccctggaatgaacttgtctcactctgcatcatcccttagtctacaacaggccttttctgaacttagacgtgcccaaatgacagaaggacccaacacagcacctccaaactttagtcatacaggaccaacatttccagtagtacctcctttcttaagtagcattgctggagtcccaaccacagcagcagccacagcaccagtccctgcaacaagcagccctcctaatgacatttccacatcagtaattcagtctgaggttacagtgcccactgaagaggggattgctggagttgccaccagcacaggtgtggtaacttcaggtggtctccccataccacctgtgtctgaatcaccagtactttccagcgtagtttcaagtatcacaatacctgcagttgtctcaatatctactacatccccgtcacttcaagtccccacatccacatctgagatcgttgtttctagtacagcactgtatccttcagtaacagtttcagcaacttcagcctctgcagggggcagtactgctaccccaggtcctaagcctccagctgtagtatctcagcaggcagcaggcagcactactgtgggagccacattaacatcagtttctaccaccacttcattcccaagcacagcttcacagctgtccattcagcttagcagcagtacttctactcctactttagctgaaaccgtggtagttagcgcacactcactagataagacatctcatagcagtacaactggattggctttctccctctctgcaccatcttcctcttcctctcctggagcaggagtgtctagttatatttctcagcctggtgggctgcatcctttggtcattccatcagtgatagcttctactcctattcttccccaagcagcaggacctacttctacacctttattaccccaagtacctagtatcccacccttggtacagcctgttgccaatgtgcctgctgtacagcagacactaattcatagtcagcctcaaccagctttgcttcccaaccagccccatactcattgtcctgaagtagattctgatacacaacccaaagctcctggaattgatgacataaagactctagaagaaaagctgcggtctctgttcagtgaacacagctcatctggagctcagcatgcctctgtctcactggagacctcactagtcatagagagcactgtcacaccaggcatcccaactactgctgttgcaccaagcaaactcctgacttctaccacaagtacttgcttaccaccaaccaatttaccactaggaacagttgctttgccagttacaccagtggtcacacctgggcaagtttctaccccagtcagcactactacatcaggagtgaaacctggaactgctccctccaagccacctctaactaaggctccggtgctgccagtgggtactgaacttccagcaggtactctacccagcgagcagctgccaccttttccaggaccttctctaacccagtcccagcaacctctagaggatcttgatgctcaattgagaagaacacttagtccagagatgatcacagtgacttctgcggttggtcctgtgtccatggcggctccaacagcaatcacagaagcaggaacacagcctcagaagggtgtttctcaagtcaaagaaggccctgtcctagcaactagttcaggagctggtgtttttaagatgggacgatttcaggtttctgttgcagcagacggtgcccagaaagagggtaaaaataagtcagaagatgcaaagtctgttcattttgaatccagcacctcagagtcctcagtgctatcaagtagtagtccagagagtaccttggtgaaaccagagccgaatggcataaccatccctggtatctcttcagatgtgccagagagtgcccacaaaactactgcctcagaggcaaagtcagacactgggcagcctaccaaggttggacgttttcaggtgacaactacagcaaacaaagtgggtcgtttctctgtatcaaaaactgaggacaagatcactgacacaaagaaagaaggaccagtggcatctcctccttttatggatttggaacaagctgttcttcctgctgtgataccaaagaaagagaagcctgaactgtcagagccttcacatctaaatgggccgtcttctgacccggaggccgcttttttaagtagggatgtggatgatggttccggtagtccacactcgccccatcagctgagctcaaagagccttcctagccagaatctaagtcaaagccttagtaattcatttaactcctcttacatgagtagcgacaatgagtcagatatcgaagatgaagacttaaagttagagctgcgacgactacgagataaacatctcaaagagattcaggacctgcagagtcgccagaagcatgaaattgaatctttgtataccaaactgggcaaggtgccccctgctgttattattcccccagctgctcccctttcagggagaagacgacgacccactaaaagcaaaggcagcaaatctagtcgaagcagttccttggggaataaaagcccccagctttcaggtaacctgtctggtcagagtgcagcttcagtcttgcacccccagcagaccctccaccctcctggcaacatcccagagtccgggcagaatcagctgttacagccccttaagccatctccctccagtgacaacctctattcagccttcaccagtgatggtgccatttcagtaccaagcctttctgctccaggtcaaggaaccagcagcacaaacactgttggggcaacagtgaacagccaagccgcccaagctcagcctcctgccatgacgtccagcaggaagggcacattcacagatgacttgcacaagttggtagacaattgggcccgagatgccatgaatctctcaggcaggagaggaagcaaagggcacatgaattatgagggccctggaatggcaaggaagttctctgcacctgggcaactgtgcatctccatgacctcgaacctgggtggctctgcccccatctctgcagcatcagctacctctctaggtcacttcaccaagtctatgtgccccccacagcagtatggctttccagctaccccatttggcgctcaatggagtgggacgggtggcccagcaccacagccacttggccagttccaacctgtgggaactgcctccttgcagaatttcaacatcagcaatttgcagaaatccatcagcaaccccccaggctccaacctgcggaccacttagacctagagacattaactgaatagatctgggggcaggagatggaatgctgagggggtgggtgggggtgggaagtagcctatatactaactactagtgctgcatttaactggttatttcttgccagaggggaatgtttttaatactgcattgagccctcagaatggagagtctcccccgctccagttattggaatgggagaggaaggaaagaacagcttttttgtcaaggggcagcttcagaccatgctttcctgtttatctatactcagtaatgaggatgagggctaggaaagtcttgttcataaggaagctggagaactcaatgtaaaatcaaacccatctgtaatttcgagtgggtggagctcttgcttttggtacatgccctgaatccctcactccctcaagaatccgaaccacaggacaaaaaccacctactgggctctctcctaccctgccctcctcccttttttttacccctctcttttttattttttctttgctctttagaacccagtgaaaaataccagggtactggggtgcaactctttcttatgataggtcattagtgctttaagcaaaagatattagcagctttgactgcagcattagcaattaggaaaaaaaaaaaattaagttccctgcggacatgtaactttgccatcagttttgatgtggaaacactgtgatatataaaatgttgttggacaacagtagttttaagagtaaaatatgaaacgtttaaaaagttccaaaaaaagctagctctgtcctttacttattgagacactttaactttttcctttgtatttccattgtattagataaataaatgtgaatgtaaaattgtataaattactgtacttgaatacttctgtttcccagtgttgcttgctggacattttagtgccttggacttctattgcttctgccattagcatcaacttaccagaccccagatcaataaagggcatgtggaaggaaatcgtaggtccatgtgaccccagcagtccagcagtggttatgccaaagggaaattgaaaaagtatttttttaagtcattcaacaactttgtctagagcaggtgtaagatgagtagggtgggaagttaggttggcatcagtggttaaaaacagaaagttctgtttcgggaatagtgaggagggggtgttgtaacaaaattggacaacttaaaagaatggtgtgtgctgggtgaaagacaaagactaaagaatgaggaaacaaacgtgatgcctggccagtgactgtcatataaacctttcttatttgagctaggcttgaacagacgtgacctagaagaaactgaacataaagagaagggggtggggggctagttttcaagttggggaacctgatagtgaaaagtcacagatggagaaaattgctctcagaaaaactgtttggattgctttcctcttgttgcacatgtaccatgcatttctcagcttggggtactacattttgtggaaagttaatctatcatctatctttccacatctgaattaatcattctaggaaagaatacttattcctactcatttcctttatgatgtccaaatggttgcaggatcataatctattgtgccacctttatttctagaagtacaactaatatgttcacattttcaaataaataatactccccgtaagtaataactgcaaccaatcagtgttattcagtgctatgcctccttgtaatgggtagttattaattattttcagagctttccggaaatactgtcctaactggctatgtttaggatctttgttatctctgaagacaaagaaagaagctaggactcttaattttggggtgcttcttgactcttagttgggaaactgaaaatatttccaaccttttacccacgtcaatggcatattctgggaatcaccaccaccaccaccactaccacagaaagaggctggaggctcctgtaccctgttcattccttaagggccctgcttcccttaataagtaagtaagttggtctacggccctaaatatgcaaatgagagctgaaggtttttaaaaggtagaaaggaaaagggcaagggcttccacccctgctttaaaatgatttatttattctctgcttgtatttcttgtggagagagtaaggatagaaccaacaaggggctgagtagctgagaaaggggccacccaagagtgaaacatactttataccagaggagcagtggagcctcatgcagcacattatcatttgttatttgggtttaataataattttgacatcttttcactcatacacaaaaaaagtcagaactggtgttatttactgttgatttcatcctcctgtgtatgaaataacaagcctagaggaatgaactagtgctactgaactgtttaaattatttttgtgttaatagtacactttgagtatctttttccacattaaaaactttctgaattataaatgttttccttacattatttaacaatgtacactgttaaaaataaaaataaaaattcaaactttgggggtttctcagcagccgttaattgtacattttgcactaactctgggtgttgcgcttcttgtaagattgcgctttgtgcttcagtttgttacctttgtagacttatttaatgaaaccattcaaataaaccaaacttgcttttgttga

SEQ ID NO: 284707 - DNA, 7582 bp, Homo sapiens
  misc_feature (298)..(298): n is a, c, g, or t
tcattccctttggccccactttgagttaaaaaataatgtccttgtttcaaaaagagaaacttcatttttttaataaaataagcaatctaaggcattaacagctagtaaatattaaagctaaaatttgaaaatgtctgttattccaaatccagtgctttcctccctattttgtagctataatcaaagctattcttcaagcatattaattatacagttgataaaataggaaaagggaatggcagggatgggatggggaaaggaactgtctggatatgttatgtaaatgtctttgtaaagncctattgtggtaaggaaaaaagattaaaggaagctattggatctatctgatataggtgccaaagagagagctgatgccaagagatagggaaaagggaatggcagggatgggatggggaaaggaactgtctggatatgttatgtaaatgtctttgtaaagacctattgttggggtgagggagataattgggtgaagagccaatggtaacttgagtattaaaagattggttaatttttcctggtggcaccatcacaaagaacatcagagggaaaacaaatatataatggaaattgatgaatttgggtttgtgcatgtcttgattactaaaatcatcattatttacagacactgaaggctttaggtaaacatgcttccttagaaacatgctgttattgatttgaaataaaactgaatcattgtattttattcttagcagcagggaatacagcagacagcccctcctcaacagacagtgcagtattcactttcacagacatcaacctccagtgaggccactactgcacagccagtgagtcaacctcaagctccacaagtcttgcctcaagtatcagctggaaaacagagtactcagggagtctctcaggttgctcctgcagagccagttgcagtagcacagccccaagctacccagccgaccactttggcttcctctgtagacagtgcacattcagatgttgcttcaggtatgagtgatggcaatgagaacgtcccatcttccagtggaaggcatgaaggaagaactacaaaacggcattaccgaaaatctgtaaggagtcgctctcgacatgaaaaaacttcacgcccaaaattaagaattttgaatgtttcaaataaaggagaccgagtagtagaatgtcaattagagactcataataggaaaatggttacattcaaatttgacctagatggtgacaaccccgaggagatagcaacaattatggtgaacaatgactttattctagcaatagagagagagtcgtttgtggatcaagtgcgagaaattattgaaaaagctgatgaaatgctcagtgaggatgtcagtgtggaaccagagggtgatcagggattggagagtctacaaggaaaggatgactatggcttttcaggttctcagaaattggaaggagagttcaaacaaccaattcctgcgtcttccatgccacagcaaataggcattcctaccagttctttaactcaagttgttcattctgcgggaaggcggtttatagtgagtcctgtgccagaaagccgattacgagaatcaaaagttttccccagtgaaataacagatacagttgctgcctctacagctcagagccctggaatgaacttgtctcactctgcatcatcccttagtctacaacaggccttttctgaacttagacgtgcccaaatgacagaaggacccaacacagcacctccaaactttagtcatacaggaccaacatttccagtagtacctcctttcttaagtagcattgctggagtcccaaccacagcagcagccacagcaccagtccctgcaacaagcagccctcctaatgacatttccacatcagtaattcagtctgaggttacagtgcccactgaagaggggattgctggagttgccaccagcacaggtgtggtaacttcaggtggtctccccataccacctgtgtctgaatcaccagtactttccagcgtagtttcaagtatcacaatacctgcagttgtctcaatatctactacatccccgtcacttcaagtccccacatccacatctgagatcgttgtttctagtacagcactgtatccttcagtaacagtttcagcaacttcagcctctgcagggggcagtactgctaccccaggtcctaagcctccagctgtagtatctcagcaggcagcaggcagcactactgtgggagccacattaacatcagtttctaccaccacttcattcccaagcacagcttcacagctgtccattcagcttagcagcagtacttctactcctactttagctgaaaccgtggtagttagcgcacactcactagataagacatctcatagcagtacaactggattggctttctccctctctgcaccatcttcctcttcctctcctggagcaggagtgtctagttatatttctcagcctggtgggctgcatcctttggtcattccatcagtgatagcttctactcctattcttccccaagcagcaggacctacttctacacctttattaccccaagtacctagtatcccacccttggtacagcctgttgccaatgtgcctgctgtacagcagacactaattcatagtcagcctcaaccagctttgcttcccaaccagccccatactcattgtcctgaagtagattctgatacacaacccaaagctcctggaattgatgacataaagactctagaagaaaagctgcggtctctgttcagtgaacacagctcatctggagctcagcatgcctctgtctcactggagacctcactagtcatagagagcactgtcacaccaggcatcccaactactgctgttgcaccaagcaaactcctgacttctaccacaagtacttgcttaccaccaaccaatttaccactaggaacagttgctttgccagttacaccagtggtcacacctgggcaagtttctaccccagtcagcactactacatcaggagtgaaacctggaactgctccctccaagccacctctaactaaggctccggtgctgccagtgggtactgaacttccagcaggtactctacccagcgagcagctgccaccttttccaggaccttctctaacccagtcccagcaacctctagaggatcttgatgctcaattgagaagaacacttagtccagagatgatcacagtgacttctgcggttggtcctgtgtccatggcggctccaacagcaatcacagaagcaggaacacagcctcagaagggtgtttctcaagtcaaagaaggccctgtcctagcaactagttcaggagctggtgtttttaagatgggacgatttcaggtttctgttgcagcagacggtgcccagaaagagggtaaaaataagtcagaagatgcaaagtctgttcattttgaatccagcacctcagagtcctcagtgctatcaagtagtagtccagagagtaccttggtgaaaccagagccgaatggcataaccatccctggtatctcttcagatgtgccagagagtgcccacaaaactactgcctcagaggcaaagtcagacactgggcagcctaccaaggttggacgttttcaggtgacaactacagcaaacaaagtgggtcgtttctctgtatcaaaaactgaggacaagatcactgacacaaagaaagaaggaccagtggcatctcctccttttatggatttggaacaagctgttcttcctgctgtgataccaaagaaagagaagcctgaactgtcagagccttcacatctaaatgggccgtcttctgacccggaggccgcttttttaagtagggatgtggatgatggttccggtagtccacactcgccccatcagctgagctcaaagagccttcctagccagaatctaagtcaaagccttagtaattcatttaactcctcttacatgagtagcgacaatgagtcagatatcgaagatgaagacttaaagttagagctgcgacgactacgagataaacatctcaaagagattcaggacctgcagagtcgccagaagcatgaaattgaatctttgtataccaaactgggcaaggtgccccctgctgttattattcccccagctgctcccctttcagggagaagacgacgacccactaaaagcaaaggcagcaaatctagtcgaagcagttccttggggaataaaagcccccagctttcaggtaacctgtctggtcagagtgcagcttcagtcttgcacccccagcagaccctccaccctcctggcaacatcccagagtccgggcagaatcagctgttacagccccttaagccatctccctccagtgacaacctctattcagccttcaccagtgatggtgccatttcagtaccaagcctttctgctccaggtcaaggaaccagcagcacaaacactgttggggcaacagtgaacagccaagccgcccaagctcagcctcctgccatgacgtccagcaggaagggcacattcacagatgacttgcacaagttggtagacaattgggcccgagatgccatgaatctctcaggcaggagaggaagcaaagggcacatgaattatgagggccctggaatggcaaggaagttctctgcacctgggcaactgtgcatctccatgacctcgaacctgggtggctctgcccccatctctgcagcatcagctacctctctaggtcacttcaccaagtctatgtgccccccacagcagtatggctttccagctaccccatttggcgctcaatggagtgggacgggtggcccagcaccacagccacttggccagttccaacctgtgggaactgcctccttgcagaatttcaacatcagcaatttgcagaaatccatcagcaaccccccaggctccaacctgcggaccacttagacctagagacattaactgaatagatctgggggcaggagatggaatgctgagggggtgggtgggggtgggaagtagcctatatactaactactagtgctgcatttaactggttatttcttgccagaggggaatgtttttaatactgcattgagccctcagaatggagagtctcccccgctccagttattggaatgggagaggaaggaaagaacagcttttttgtcaaggggcagcttcagaccatgctttcctgtttatctatactcagtaatgaggatgagggctaggaaagtcttgttcataaggaagctggagaactcaatgtaaaatcaaacccatctgtaatttcgagtgggtggagctcttgcttttggtacatgccctgaatccctcactccctcaagaatccgaaccacaggacaaaaaccacctactgggctctctcctaccctgccctcctcccttttttttacccctctcttttttattttttctttgctctttagaacccagtgaaaaataccagggtactggggtgcaactctttcttatgataggtcattagtgctttaagcaaaagatattagcagctttgactgcagcattagcaattaggaaaaaaaaaaaattaagttccctgcggacatgtaactttgccatcagttttgatgtggaaacactgtgatatataaaatgttgttggacaacagtagttttaagagtaaaatatgaaacgtttaaaaagttccaaaaaaagctagctctgtcctttacttattgagacactttaactttttcctttgtatttccattgtattagataaataaatgtgaatgtaaaattgtataaattactgtacttgaatacttctgtttcccagtgttgcttgctggacattttagtgccttggacttctattgcttctgccattagcatcaacttaccagaccccagatcaataaagggcatgtggaaggaaatcgtaggtccatgtgaccccagcagtccagcagtggttatgccaaagggaaattgaaaaagtatttttttaagtcattcaacaactttgtctagagcaggtgtaagatgagtagggtgggaagttaggttggcatcagtggttaaaaacagaaagttctgtttcgggaatagtgaggagggggtgttgtaacaaaattggacaacttaaaagaatggtgtgtgctgggtgaaagacaaagactaaagaatgaggaaacaaacgtgatgcctggccagtgactgtcatataaacctttcttatttgagctaggcttgaacagacgtgacctagaagaaactgaacataaagagaagggggtggggggctagttttcaagttggggaacctgatagtgaaaagtcacagatggagaaaattgctctcagaaaaactgtttggattgctttcctcttgttgcacatgtaccatgcatttctcagcttggggtactacattttgtggaaagttaatctatcatctatctttccacatctgaattaatcattctaggaaagaatacttattcctactcatttcctttatgatgtccaaatggttgcaggatcataatctattgtgccacctttatttctagaagtacaactaatatgttcacattttcaaataaataatactccccgtaagtaataactgcaaccaatcagtgttattcagtgctatgcctccttgtaatgggtagttattaattattttcagagctttccggaaatactgtcctaactggctatgtttaggatctttgttatctctgaagacaaagaaagaagctaggactcttaattttggggtgcttcttgactcttagttgggaaactgaaaatatttccaaccttttacccacgtcaatggcatattctgggaatcaccaccaccaccaccactaccacagaaagaggctggaggctcctgtaccctgttcattccttaagggccctgcttcccttaataagtaagtaagttggtctacggccctaaatatgcaaatgagagctgaaggtttttaaaaggtagaaaggaaaagggcaagggcttccacccctgctttaaaatgatttatttattctctgcttgtatttcttgtggagagagtaaggatagaaccaacaaggggctgagtagctgagaaaggggccacccaagagtgaaacatactttataccagaggagcagtggagcctcatgcagcacattatcatttgttatttgggtttaataataattttgacatcttttcactcatacacaaaaaaagtcagaactggtgttatttactgttgatttcatcctcctgtgtatgaaataacaagcctagaggaatgaactagtgctactgaactgtttaaattatttttgtgttaatagtacactttgagtatctttttccacattaaaaactttctgaattataaatgttttccttacattatttaacaatgtacactgttaaaaataaaaataaaaattcaaactttgggggtttctcagcagccgttaattgtacattttgcactaactctgggtgttgcgcttcttgtaagattgcgctttgtgcttcagtttgttacctttgtagacttatttaatgaaaccattcaaataaaccaaacttgcttttgttga

SEQ ID NO: 284708 - DNA, 6900 bp, Homo sapiens
gagcaagtactatttgccatcttcccaacccatacaacatcctcagcagcagcagggaatacagcagacagcccctcctcaacagacagtgcagtattcactttcacagacatcaacctccagtgaggccactactgcacagccagtgagtcaacctcaagctccacaagtcttgcctcaagtatcagctggaaaacagagtactcagggagtctctcaggttgctcctgcagagccagttgcagtagcacagccccaagctacccagccgaccactttggcttcctctgtagacagtgcacattcagatgttgcttcaggtatgagtgatggcaatgagaacgtcccatcttccagtggaaggcatgaaggaagaactacaaaacggcattaccgaaaatctgtaaggagtcgctctcgacatgaaaaaacttcacgcccaaaattaagaattttgaatgtttcaaataaaggagaccgagtagtagaatgtcaattagagactcataataggaaaatggttacattcaaatttgacctagatggtgacaaccccgaggagatagcaacaattatggtgaacaatgactttattctagcaatagagagagagtcgtttgtggatcaagtgcgagaaattattgaaaaagctgatgaaatgctcagtgaggatgtcagtgtggaaccagagggtgatcagggattggagagtctacaaggaaaggatgactatggcttttcaggttctcagaaattggaaggagagttcaaacaaccaattcctgcgtcttccatgccacagcaaataggcattcctaccagttctttaactcaagttgttcattctgcgggaaggcggtttatagtgagtcctgtgccagaaagccgattacgagaatcaaaagttttccccagtgaaataacagatacagttgctgcctctacagctcagagccctggaatgaacttgtctcactctgcatcatcccttagtctacaacaggccttttctgaacttagacgtgcccaaatgacagaaggacccaacacagcacctccaaactttagtcatacaggaccaacatttccagtagtacctcctttcttaagtagcattgctggagtcccaaccacagcagcagccacagcaccagtccctgcaacaagcagccctcctaatgacatttccacatcagtaattcagtctgaggttacagtgcccactgaagaggggattgctggagttgccaccagcacaggtgtggtaacttcaggtggtctccccataccacctgtgtctgaatcaccagtactttccagcgtagtttcaagtatcacaatacctgcagttgtctcaatatctactacatccccgtcacttcaagtccccacatccacatctgagatcgttgtttctagtacagcactgtatccttcagtaacagtttcagcaacttcagcctctgcagggggcagtactgctaccccaggtcctaagcctccagctgtagtatctcagcaggcagcaggcagcactactgtgggagccacattaacatcagtttctaccaccacttcattcccaagcacagcttcacagctgtccattcagcttagcagcagtacttctactcctactttagctgaaaccgtggtagttagcgcacactcactagataagacatctcatagcagtacaactggattggctttctccctctctgcaccatcttcctcttcctctcctggagcaggagtgtctagttatatttctcagcctggtgggctgcatcctttggtcattccatcagtgatagcttctactcctattcttccccaagcagcaggacctacttctacacctttattaccccaagtacctagtatcccacccttggtacagcctgttgccaatgtgcctgctgtacagcagacactaattcatagtcagcctcaaccagctttgcttcccaaccagccccatactcattgtcctgaagtagattctgatacacaacccaaagctcctggaattgatgacataaagactctagaagaaaagctgcggtctctgttcagtgaacacagctcatctggagctcagcatgcctctgtctcactggagacctcactagtcatagagagcactgtcacaccaggcatcccaactactgctgttgcaccaagcaaactcctgacttctaccacaagtacttgcttaccaccaaccaatttaccactaggaacagttgctttgccagttacaccagtggtcacacctgggcaagtttctaccccagtcagcactactacatcaggagtgaaacctggaactgctccctccaagccacctctaactaaggctccggtgctgccagtgggtactgaacttccagcaggtactctacccagcgagcagctgccaccttttccaggaccttctctaacccagtcccagcaacctctagaggatcttgatgctcaattgagaagaacacttagtccagagatgatcacagtgacttctgcggttggtcctgtgtccatggcggctccaacagcaatcacagaagcaggaacacagcctcagaagggtgtttctcaagtcaaagaaggccctgtcctagcaactagttcaggagctggtgtttttaagatgggacgatttcaggtttctgttgcagcagacggtgcccagaaagagggtaaaaataagtcagaagatgcaaagtctgttcattttgaatccagcacctcagagtcctcagtgctatcaagtagtagtccagagagtaccttggtgaaaccagagccgaatggcataaccatccctggtatctcttcagatgtgccagagagtgcccacaaaactactgcctcagaggcaaagtcagacactgggcagcctaccaaggttggacgttttcaggtgacaactacagcaaacaaagtgggtcgtttctctgtatcaaaaactgaggacaagatcactgacacaaagaaagaaggaccagtggcatctcctccttttatggatttggaacaagctgttcttcctgctgtgataccaaagaaagagaagcctgaactgtcagagccttcacatctaaatgggccgtcttctgacccggaggccgcttttttaagtagggatgtggatgatggttccggtagtccacactcgccccatcagctgagctcaaagagccttcctagccagaatctaagtcaaagccttagtaattcatttaactcctcttacatgagtagcgacaatgagtcagatatcgaagatgaagacttaaagttagagctgcgacgactacgagataaacatctcaaagagattcaggacctgcagagtcgccagaagcatgaaattgaatctttgtataccaaactgggcaaggtgccccctgctgttattattcccccagctgctcccctttcagggagaagacgacgacccactaaaagcaaaggcagcaaatctagtcgaagcagttccttggggaataaaagcccccagctttcaggtaacctgtctggtcagagtgcagcttcagtcttgcacccccagcagaccctccaccctcctggcaacatcccagagtccgggcagaatcagctgttacagccccttaagccatctccctccagtgacaacctctattcagccttcaccagtgatggtgccatttcagtaccaagcctttctgctccaggtcaaggaaccagcagcacaaacactgttggggcaacagtgaacagccaagccgcccaagctcagcctcctgccatgacgtccagcaggaagggcacattcacagatgacttgcacaagttggtagacaattgggcccgagatgccatgaatctctcaggcaggagaggaagcaaagggcacatgaattatgagggccctggaatggcaaggaagttctctgcacctgggcaactgtgcatctccatgacctcgaacctgggtggctctgcccccatctctgcagcatcagctacctctctaggtcacttcaccaagtctatgtgccccccacagcagtatggctttccagctaccccatttggcgctcaatggagtgggacgggtggcccagcaccacagccacttggccagttccaacctgtgggaactgcctccttgcagaatttcaacatcagcaatttgcagaaatccatcagcaaccccccaggctccaacctgcggaccacttagacctagagacattaactgaatagatctgggggcaggagatggaatgctgagggggtgggtgggggtgggaagtagcctatatactaactactagtgctgcatttaactggttatttcttgccagaggggaatgtttttaatactgcattgagccctcagaatggagagtctcccccgctccagttattggaatgggagaggaaggaaagaacagcttttttgtcaaggggcagcttcagaccatgctttcctgtttatctatactcagtaatgaggatgagggctaggaaagtcttgttcataaggaagctggagaactcaatgtaaaatcaaacccatctgtaatttcgagtgggtggagctcttgcttttggtacatgccctgaatccctcactccctcaagaatccgaaccacaggacaaaaaccacctactgggctctctcctaccctgccctcctcccttttttttacccctctcttttttattttttctttgctctttagaacccagtgaaaaataccagggtactggggtgcaactctttcttatgataggtcattagtgctttaagcaaaagatattagcagctttgactgcagcattagcaattaggaaaaaaaaaaaattaagttccctgcggacatgtaactttgccatcagttttgatgtggaaacactgtgatatataaaatgttgttggacaacagtagttttaagagtaaaatatgaaacgtttaaaaagttccaaaaaaagctagctctgtcctttacttattgagacactttaactttttcctttgtatttccattgtattagataaataaatgtgaatgtaaaattgtataaattactgtacttgaatacttctgtttcccagtgttgcttgctggacattttagtgccttggacttctattgcttctgccattagcatcaacttaccagaccccagatcaataaagggcatgtggaaggaaatcgtaggtccatgtgaccccagcagtccagcagtggttatgccaaagggaaattgaaaaagtatttttttaagtcattcaacaactttgtctagagcaggtgtaagatgagtagggtgggaagttaggttggcatcagtggttaaaaacagaaagttctgtttcgggaatagtgaggagggggtgttgtaacaaaattggacaacttaaaagaatggtgtgtgctgggtgaaagacaaagactaaagaatgaggaaacaaacgtgatgcctggccagtgactgtcatataaacctttcttatttgagctaggcttgaacagacgtgacctagaagaaactgaacataaagagaagggggtggggggctagttttcaagttggggaacctgatagtgaaaagtcacagatggagaaaattgctctcagaaaaactgtttggattgctttcctcttgttgcacatgtaccatgcatttctcagcttggggtactacattttgtggaaagttaatctatcatctatctttccacatctgaattaatcattctaggaaagaatacttattcctactcatttcctttatgatgtccaaatggttgcaggatcataatctattgtgccacctttatttctagaagtacaactaatatgttcacattttcaaataaataatactccccgtaagtaataactgcaaccaatcagtgttattcagtgctatgcctccttgtaatgggtagttattaattattttcagagctttccggaaatactgtcctaactggctatgtttaggatctttgttatctctgaagacaaagaaagaagctaggactcttaattttggggtgcttcttgactcttagttgggaaactgaaaatatttccaaccttttacccacgtcaatggcatattctgggaatcaccaccaccaccaccactaccacagaaagaggctggaggctcctgtaccctgttcattccttaagggccctgcttcccttaataagtaagtaagttggtctacggccctaaatatgcaaatgagagctgaaggtttttaaaaggtagaaaggaaaagggcaagggcttccacccctgctttaaaatgatttatttattctctgcttgtatttcttgtggagagagtaaggatagaaccaacaaggggctgagtagctgagaaaggggccacccaagagtgaaacatactttataccagaggagcagtggagcctcatgcagcacattatcatttgttatttgggtttaataataattttgacatcttttcactcatacacaaaaaaagtcagaactggtgttatttactgttgatttcatcctcctgtgtatgaaataacaagcctagaggaatgaactagtgctactgaactgtttaaattatttttgtgttaatagtacactttgagtatctttttccacattaaaaactttctgaattataaatgttttccttacattatttaacaatgtacactgttaaaaataaaaataaaaattcaaactttgggggtttctcagcagccgttaattgtacattttgcactaactctgggtgttgcgcttcttgtaagattgcgctttgtgcttcagtttgttacctttgtagacttatttaatgaaaccattcaaataaaccaaacttgcttttgttga

SEQ ID NO: 284709 - DNA, 7481 bp, Homo sapiens
tttttttaagcctgtctgttttgtttttctttaccttcccagcttccagtttcccagccagtaccaactatccaaggcgaacctcagatcccagttgcgacacaaccctcggttgttccagtccactctggtgctcatttccttccagtgggacagccgctccctactcccttgctccctcagtaccctgtctctcagattcccatatcaactcctcatgtgtctacggctcagacaggtttctcatcccttcccatcacaatggcagctggcattactcagcctctgctcacgttggcttcatctgctacaacagctgcgatcccgggggtatcaactgtggttcctagtcagcttccaacccttctgcagcctgtgactcagctgccaagtcaggttcacccacagctcctacaaccagcagttcagtccatgggaataccagctaaccttggacaagctgctgaggttccactttcctctggagatgttctgtaccagggcttcccacctcgactgccaccacagtacccaggagattcaaatattgctccctcttccaacgtggcttctgtttgcatccattctacagtcctatcccctcccatgccgacagaagtactggctacacctgggtactttcccacagtggtgcagccttatgtggaatcaaatcttttagttcctatgggtggtgtaggaggacaggttcaagtgtcccagccaggagggagtttagcacaagcccccactacatcctcccagcaagcagttttggagagtactcagggagtctctcaggttgctcctgcagagccagttgcagtagcacagccccaagctacccagccgaccactttggcttcctctgtagacagtgcacattcagatgttgcttcaggtatgagtgatggcaatgagaacgtcccatcttccagtggaaggcatgaaggaagaactacaaaacggcattaccgaaaatctgtaaggagtcgctctcgacatgaaaaaacttcacgcccaaaattaagaattttgaatgtttcaaataaaggagaccgagtagtagaatgtcaattagagactcataataggaaaatggttacattcaaatttgacctagatggtgacaaccccgaggagatagcaacaattatggtgaacaatgactttattctagcaatagagagagagtcgtttgtggatcaagtgcgagaaattattgaaaaagctgatgaaatgctcagtgaggatgtcagtgtggaaccagagggtgatcagggattggagagtctacaaggaaaggatgactatggcttttcaggttctcagaaattggaaggagagttcaaacaaccaattcctgcgtcttccatgccacagcaaataggcattcctaccagttctttaactcaagttgttcattctgcgggaaggcggtttatagtgagtcctgtgccagaaagccgattacgagaatcaaaagttttccccagtgaaataacagatacagttgctgcctctacagctcagagccctggaatgaacttgtctcactctgcatcatcccttagtctacaacaggccttttctgaacttagacgtgcccaaatgacagaaggacccaacacagcacctccaaactttagtcatacaggaccaacatttccagtagtacctcctttcttaagtagcattgctggagtcccaaccacagcagcagccacagcaccagtccctgcaacaagcagccctcctaatgacatttccacatcagtaattcagtctgaggttacagtgcccactgaagaggggattgctggagttgccaccagcacaggtgtggtaacttcaggtggtctccccataccacctgtgtctgaatcaccagtactttccagcgtagtttcaagtatcacaatacctgcagttgtctcaatatctactacatccccgtcacttcaagtccccacatccacatctgagatcgttgtttctagtacagcactgtatccttcagtaacagtttcagcaacttcagcctctgcagggggcagtactgctaccccaggtcctaagcctccagctgtagtatctcagcaggcagcaggcagcactactgtgggagccacattaacatcagtttctaccaccacttcattcccaagcacagcttcacagctgtccattcagcttagcagcagtacttctactcctactttagctgaaaccgtggtagttagcgcacactcactagataagacatctcatagcagtacaactggattggctttctccctctctgcaccatcttcctcttcctctcctggagcaggagtgtctagttatatttctcagcctggtgggctgcatcctttggtcattccatcagtgatagcttctactcctattcttccccaagcagcaggacctacttctacacctttattaccccaagtacctagtatcccacccttggtacagcctgttgccaatgtgcctgctgtacagcagacactaattcatagtcagcctcaaccagctttgcttcccaaccagccccatactcattgtcctgaagtagattctgatacacaacccaaagctcctggaattgatgacataaagactctagaagaaaagctgcggtctctgttcagtgaacacagctcatctggagctcagcatgcctctgtctcactggagacctcactagtcatagagagcactgtcacaccaggcatcccaactactgctgttgcaccaagcaaactcctgacttctaccacaagtacttgcttaccaccaaccaatttaccactaggaacagttgctttgccagttacaccagtggtcacacctgggcaagtttctaccccagtcagcactactacatcaggagtgaaacctggaactgctccctccaagccacctctaactaaggctccggtgctgccagtgggtactgaacttccagcaggtactctacccagcgagcagctgccaccttttccaggaccttctctaacccagtcccagcaacctctagaggatcttgatgctcaattgagaagaacacttagtccagagatgatcacagtgacttctgcggttggtcctgtgtccatggcggctccaacagcaatcacagaagcaggaacacagcctcagaagggtgtttctcaagtcaaagaaggccctgtcctagcaactagttcaggagctggtgtttttaagatgggacgatttcaggtttctgttgcagcagacggtgcccagaaagagggtaaaaataagtcagaagatgcaaagtctgttcattttgaatccagcacctcagagtcctcagtgctatcaagtagtagtccagagagtaccttggtgaaaccagagccgaatggcataaccatccctggtatctcttcagatgtgccagagagtgcccacaaaactactgcctcagaggcaaagtcagacactgggcagcctaccaaggttggacgttttcaggtgacaactacagcaaacaaagtgggtcgtttctctgtatcaaaaactgaggacaagatcactgacacaaagaaagaaggaccagtggcatctcctccttttatggatttggaacaagctgttcttcctgctgtgataccaaagaaagagaagcctgaactgtcagagccttcacatctaaatgggccgtcttctgacccggaggccgcttttttaagtagggatgtggatgatggttccggtagtccacactcgccccatcagctgagctcaaagagccttcctagccagaatctaagtcaaagccttagtaattcatttaactcctcttacatgagtagcgacaatgagtcagatatcgaagatgaagacttaaagttagagctgcgacgactacgagataaacatctcaaagagattcaggacctgcagagtcgccagaagcatgaaattgaatctttgtataccaaactgggcaaggtgccccctgctgttattattcccccagctgctcccctttcagggagaagacgacgacccactaaaagcaaaggcagcaaatctagtcgaagcagttccttggggaataaaagcccccagctttcaggtaacctgtctggtcagagtgcagcttcagtcttgcacccccagcagaccctccaccctcctggcaacatcccagagtccgggcagaatcagctgttacagccccttaagccatctccctccagtgacaacctctattcagccttcaccagtgatggtgccatttcagtaccaagcctttctgctccaggtcaaggaaccagcagcacaaacactgttggggcaacagtgaacagccaagccgcccaagctcagcctcctgccatgacgtccagcaggaagggcacattcacagatgacttgcacaagttggtagacaattgggcccgagatgccatgaatctctcaggcaggagaggaagcaaagggcacatgaattatgagggccctggaatggcaaggaagttctctgcacctgggcaactgtgcatctccatgacctcgaacctgggtggctctgcccccatctctgcagcatcagctacctctctaggtcacttcaccaagtctatgtgccccccacagcagtatggctttccagctaccccatttggcgctcaatggagtgggacgggtggcccagcaccacagccacttggccagttccaacctgtgggaactgcctccttgcagaatttcaacatcagcaatttgcagaaatccatcagcaaccccccaggctccaacctgcggaccacttagacctagagacattaactgaatagatctgggggcaggagatggaatgctgagggggtgggtgggggtgggaagtagcctatatactaactactagtgctgcatttaactggttatttcttgccagaggggaatgtttttaatactgcattgagccctcagaatggagagtctcccccgctccagttattggaatgggagaggaaggaaagaacagcttttttgtcaaggggcagcttcagaccatgctttcctgtttatctatactcagtaatgaggatgagggctaggaaagtcttgttcataaggaagctggagaactcaatgtaaaatcaaacccatctgtaatttcgagtgggtggagctcttgcttttggtacatgccctgaatccctcactccctcaagaatccgaaccacaggacaaaaaccacctactgggctctctcctaccctgccctcctcccttttttttacccctctcttttttattttttctttgctctttagaacccagtgaaaaataccagggtactggggtgcaactctttcttatgataggtcattagtgctttaagcaaaagatattagcagctttgactgcagcattagcaattaggaaaaaaaaaaaattaagttccctgcggacatgtaactttgccatcagttttgatgtggaaacactgtgatatataaaatgttgttggacaacagtagttttaagagtaaaatatgaaacgtttaaaaagttccaaaaaaagctagctctgtcctttacttattgagacactttaactttttcctttgtatttccattgtattagataaataaatgtgaatgtaaaattgtataaattactgtacttgaatacttctgtttcccagtgttgcttgctggacattttagtgccttggacttctattgcttctgccattagcatcaacttaccagaccccagatcaataaagggcatgtggaaggaaatcgtaggtccatgtgaccccagcagtccagcagtggttatgccaaagggaaattgaaaaagtatttttttaagtcattcaacaactttgtctagagcaggtgtaagatgagtagggtgggaagttaggttggcatcagtggttaaaaacagaaagttctgtttcgggaatagtgaggagggggtgttgtaacaaaattggacaacttaaaagaatggtgtgtgctgggtgaaagacaaagactaaagaatgaggaaacaaacgtgatgcctggccagtgactgtcatataaacctttcttatttgagctaggcttgaacagacgtgacctagaagaaactgaacataaagagaagggggtggggggctagttttcaagttggggaacctgatagtgaaaagtcacagatggagaaaattgctctcagaaaaactgtttggattgctttcctcttgttgcacatgtaccatgcatttctcagcttggggtactacattttgtggaaagttaatctatcatctatctttccacatctgaattaatcattctaggaaagaatacttattcctactcatttcctttatgatgtccaaatggttgcaggatcataatctattgtgccacctttatttctagaagtacaactaatatgttcacattttcaaataaataatactccccgtaagtaataactgcaaccaatcagtgttattcagtgctatgcctccttgtaatgggtagttattaattattttcagagctttccggaaatactgtcctaactggctatgtttaggatctttgttatctctgaagacaaagaaagaagctaggactcttaattttggggtgcttcttgactcttagttgggaaactgaaaatatttccaaccttttacccacgtcaatggcatattctgggaatcaccaccaccaccaccactaccacagaaagaggctggaggctcctgtaccctgttcattccttaagggccctgcttcccttaataagtaagtaagttggtctacggccctaaatatgcaaatgagagctgaaggtttttaaaaggtagaaaggaaaagggcaagggcttccacccctgctttaaaatgatttatttattctctgcttgtatttcttgtggagagagtaaggatagaaccaacaaggggctgagtagctgagaaaggggccacccaagagtgaaacatactttataccagaggagcagtggagcctcatgcagcacattatcatttgttatttgggtttaataataattttgacatcttttcactcatacacaaaaaaagtcagaactggtgttatttactgttgatttcatcctcctgtgtatgaaataacaagcctagaggaatgaactagtgctactgaactgtttaaattatttttgtgttaatagtacactttgagtatctttttccacattaaaaactttctgaattataaatgttttccttacattatttaacaatgtacactgttaaaaataaaaataaaaattcaaactttgggggtttctcagcagccgttaattgtacattttgcactaactctgggtgttgcgcttcttgtaagattgcgctttgtgcttcagtttgttacctttgtagacttatttaatgaaaccattcaaataaaccaaacttgcttttgttga

SEQ ID NO: 284710 - DNA, 6402 bp, Homo sapiens
agcgtgttgagtcgcgttggtgtggaggaggtctttcaccagccagcagcagaacagaggtgtggggcctggagctccagccgctcaactcaaactgtatactcagccgtaagccatctcgatggtagcagctcccggagtaggcaccctcctggatctcccgctgcaggccagcagccccgcgcatcagaacgggtgatgcggattggagagtctacaaggaaaggatgactatggcttttcaggttctcagaaattggaaggagagttcaaacaaccaattcctgcgtcttccatgccacagcaaataggcattcctaccagttctttaactcaagttgttcattctgcgggaaggcggtttatagtgagtcctgtgccagaaagccgattacgagaatcaaaagttttccccagtgaaataacagatacagttgctgcctctacagctcagagccctggaatgaacttgtctcactctgcatcatcccttagtctacaacaggccttttctgaacttagacgtgcccaaatgacagaaggacccaacacagcacctccaaactttagtcatacaggaccaacatttccagtagtacctcctttcttaagtagcattgctggagtcccaaccacagcagcagccacagcaccagtccctgcaacaagcagccctcctaatgacatttccacatcagtaattcagtctgaggttacagtgcccactgaagaggggattgctggagttgccaccagcacaggtgtggtaacttcaggtggtctccccataccacctgtgtctgaatcaccagtactttccagcgtagtttcaagtatcacaatacctgcagttgtctcaatatctactacatccccgtcacttcaagtccccacatccacatctgagatcgttgtttctagtacagcactgtatccttcagtaacagtttcagcaacttcagcctctgcagggggcagtactgctaccccaggtcctaagcctccagctgtagtatctcagcaggcagcaggcagcactactgtgggagccacattaacatcagtttctaccaccacttcattcccaagcacagcttcacagctgtccattcagcttagcagcagtacttctactcctactttagctgaaaccgtggtagttagcgcacactcactagataagacatctcatagcagtacaactggattggctttctccctctctgcaccatcttcctcttcctctcctggagcaggagtgtctagttatatttctcagcctggtgggctgcatcctttggtcattccatcagtgatagcttctactcctattcttccccaagcagcaggacctacttctacacctttattaccccaagtacctagtatcccacccttggtacagcctgttgccaatgtgcctgctgtacagcagacactaattcatagtcagcctcaaccagctttgcttcccaaccagccccatactcattgtcctgaagtagattctgatacacaacccaaagctcctggaattgatgacataaagactctagaagaaaagctgcggtctctgttcagtgaacacagctcatctggagctcagcatgcctctgtctcactggagacctcactagtcatagagagcactgtcacaccaggcatcccaactactgctgttgcaccaagcaaactcctgacttctaccacaagtacttgcttaccaccaaccaatttaccactaggaacagttgctttgccagttacaccagtggtcacacctgggcaagtttctaccccagtcagcactactacatcaggagtgaaacctggaactgctccctccaagccacctctaactaaggctccggtgctgccagtgggtactgaacttccagcaggtactctacccagcgagcagctgccaccttttccaggaccttctctaacccagtcccagcaacctctagaggatcttgatgctcaattgagaagaacacttagtccagagatgatcacagtgacttctgcggttggtcctgtgtccatggcggctccaacagcaatcacagaagcaggaacacagcctcagaagggtgtttctcaagtcaaagaaggccctgtcctagcaactagttcaggagctggtgtttttaagatgggacgatttcaggtttctgttgcagcagacggtgcccagaaagagggtaaaaataagtcagaagatgcaaagtctgttcattttgaatccagcacctcagagtcctcagtgctatcaagtagtagtccagagagtaccttggtgaaaccagagccgaatggcataaccatccctggtatctcttcagatgtgccagagagtgcccacaaaactactgcctcagaggcaaagtcagacactgggcagcctaccaaggttggacgttttcaggtgacaactacagcaaacaaagtgggtcgtttctctgtatcaaaaactgaggacaagatcactgacacaaagaaagaaggaccagtggcatctcctccttttatggatttggaacaagctgttcttcctgctgtgataccaaagaaagagaagcctgaactgtcagagccttcacatctaaatgggccgtcttctgacccggaggccgcttttttaagtagggatgtggatgatggttccggtagtccacactcgccccatcagctgagctcaaagagccttcctagccagaatctaagtcaaagccttagtaattcatttaactcctcttacatgagtagcgacaatgagtcagatatcgaagatgaagacttaaagttagagctgcgacgactacgagataaacatctcaaagagattcaggacctgcagagtcgccagaagcatgaaattgaatctttgtataccaaactgggcaaggtgccccctgctgttattattcccccagctgctcccctttcagggagaagacgacgacccactaaaagcaaaggcagcaaatctagtcgaagcagttccttggggaataaaagcccccagctttcaggtaacctgtctggtcagagtgcagcttcagtcttgcacccccagcagaccctccaccctcctggcaacatcccagagtccgggcagaatcagctgttacagccccttaagccatctccctccagtgacaacctctattcagccttcaccagtgatggtgccatttcagtaccaagcctttctgctccaggtcaaggaaccagcagcacaaacactgttggggcaacagtgaacagccaagccgcccaagctcagcctcctgccatgacgtccagcaggaagggcacattcacagatgacttgcacaagttggtagacaattgggcccgagatgccatgaatctctcaggcaggagaggaagcaaagggcacatgaattatgagggccctggaatggcaaggaagttctctgcacctgggcaactgtgcatctccatgacctcgaacctgggtggctctgcccccatctctgcagcatcagctacctctctaggtcacttcaccaagtctatgtgccccccacagcagtatggctttccagctaccccatttggcgctcaatggagtgggacgggtggcccagcaccacagccacttggccagttccaacctgtgggaactgcctccttgcagaatttcaacatcagcaatttgcagaaatccatcagcaaccccccaggctccaacctgcggaccacttagacctagagacattaactgaatagatctgggggcaggagatggaatgctgagggggtgggtgggggtgggaagtagcctatatactaactactagtgctgcatttaactggttatttcttgccagaggggaatgtttttaatactgcattgagccctcagaatggagagtctcccccgctccagttattggaatgggagaggaaggaaagaacagcttttttgtcaaggggcagcttcagaccatgctttcctgtttatctatactcagtaatgaggatgagggctaggaaagtcttgttcataaggaagctggagaactcaatgtaaaatcaaacccatctgtaatttcgagtgggtggagctcttgcttttggtacatgccctgaatccctcactccctcaagaatccgaaccacaggacaaaaaccacctactgggctctctcctaccctgccctcctcccttttttttacccctctcttttttattttttctttgctctttagaacccagtgaaaaataccagggtactggggtgcaactctttcttatgataggtcattagtgctttaagcaaaagatattagcagctttgactgcagcattagcaattaggaaaaaaaaaaaattaagttccctgcggacatgtaactttgccatcagttttgatgtggaaacactgtgatatataaaatgttgttggacaacagtagttttaagagtaaaatatgaaacgtttaaaaagttccaaaaaaagctagctctgtcctttacttattgagacactttaactttttcctttgtatttccattgtattagataaataaatgtgaatgtaaaattgtataaattactgtacttgaatacttctgtttcccagtgttgcttgctggacattttagtgccttggacttctattgcttctgccattagcatcaacttaccagaccccagatcaataaagggcatgtggaaggaaatcgtaggtccatgtgaccccagcagtccagcagtggttatgccaaagggaaattgaaaaagtatttttttaagtcattcaacaactttgtctagagcaggtgtaagatgagtagggtgggaagttaggttggcatcagtggttaaaaacagaaagttctgtttcgggaatagtgaggagggggtgttgtaacaaaattggacaacttaaaagaatggtgtgtgctgggtgaaagacaaagactaaagaatgaggaaacaaacgtgatgcctggccagtgactgtcatataaacctttcttatttgagctaggcttgaacagacgtgacctagaagaaactgaacataaagagaagggggtggggggctagttttcaagttggggaacctgatagtgaaaagtcacagatggagaaaattgctctcagaaaaactgtttggattgctttcctcttgttgcacatgtaccatgcatttctcagcttggggtactacattttgtggaaagttaatctatcatctatctttccacatctgaattaatcattctaggaaagaatacttattcctactcatttcctttatgatgtccaaatggttgcaggatcataatctattgtgccacctttatttctagaagtacaactaatatgttcacattttcaaataaataatactccccgtaagtaataactgcaaccaatcagtgttattcagtgctatgcctccttgtaatgggtagttattaattattttcagagctttccggaaatactgtcctaactggctatgtttaggatctttgttatctctgaagacaaagaaagaagctaggactcttaattttggggtgcttcttgactcttagttgggaaactgaaaatatttccaaccttttacccacgtcaatggcatattctgggaatcaccaccaccaccaccactaccacagaaagaggctggaggctcctgtaccctgttcattccttaagggccctgcttcccttaataagtaagtaagttggtctacggccctaaatatgcaaatgagagctgaaggtttttaaaaggtagaaaggaaaagggcaagggcttccacccctgctttaaaatgatttatttattctctgcttgtatttcttgtggagagagtaaggatagaaccaacaaggggctgagtagctgagaaaggggccacccaagagtgaaacatactttataccagaggagcagtggagcctcatgcagcacattatcatttgttatttgggtttaataataattttgacatcttttcactcatacacaaaaaaagtcagaactggtgttatttactgttgatttcatcctcctgtgtatgaaataacaagcctagaggaatgaactagtgctactgaactgtttaaattatttttgtgttaatagtacactttgagtatctttttccacattaaaaactttctgaattataaatgttttccttacattatttaacaatgtacactgttaaaaataaaaataaaaattcaaactttgggggtttctcagcagccgttaattgtacattttgcactaactctgggtgttgcgcttcttgtaagattgcgctttgtgcttcagtttgttacctttgtagacttatttaatgaaaccattcaaataaaccaaacttgcttttgttga

SEQ ID NO: 284711 - DNA, 5614 bp, Homo sapiens
  misc_feature (6)..(6): n is a, c, g, or t
tacacntcattagtacaccatcagtcacatactcagtacacatcagtcacatactcagtacaccatcagtcagtacaccatcagtcacatcagtccgtacaccatcagtcacatctgagatcgttgtttctagtacagcactgtatccttcagtaacagtttcagcaacttcagcctctgcagggggcagtactgctaccccaggtcctaagcctccagctgtagtatctcagcaggcagcaggcagcactactgtgggagccacattaacatcagtttctaccaccacttcattcccaagcacagcttcacagctgtccattcagcttagcagcagtacttctactcctactttagctgaaaccgtggtagttagcgcacactcactagataagacatctcatagcagtacaactggattggctttctccctctctgcaccatcttcctcttcctctcctggagcaggagtgtctagttatatttctcagcctggtgggctgcatcctttggtcattccatcagtgatagcttctactcctattcttccccaagcagcaggacctacttctacacctttattaccccaagtacctagtatcccacccttggtacagcctgttgccaatgtgcctgctgtacagcagacactaattcatagtcagcctcaaccagctttgcttcccaaccagccccatactcattgtcctgaagtagattctgatacacaacccaaagctcctggaattgatgacataaagactctagaagaaaagctgcggtctctgttcagtgaacacagctcatctggagctcagcatgcctctgtctcactggagacctcactagtcatagagagcactgtcacaccaggcatcccaactactgctgttgcaccaagcaaactcctgacttctaccacaagtacttgcttaccaccaaccaatttaccactaggaacagttgctttgccagttacaccagtggtcacacctgggcaagtttctaccccagtcagcactactacatcaggagtgaaacctggaactgctccctccaagccacctctaactaaggctccggtgctgccagtgggtactgaacttccagcaggtactctacccagcgagcagctgccaccttttccaggaccttctctaacccagtcccagcaacctctagaggatcttgatgctcaattgagaagaacacttagtccagagatgatcacagtgacttctgcggttggtcctgtgtccatggcggctccaacagcaatcacagaagcaggaacacagcctcagaagggtgtttctcaagtcaaagaaggccctgtcctagcaactagttcaggagctggtgtttttaagatgggacgatttcaggtttctgttgcagcagacggtgcccagaaagagggtaaaaataagtcagaagatgcaaagtctgttcattttgaatccagcacctcagagtcctcagtgctatcaagtagtagtccagagagtaccttggtgaaaccagagccgaatggcataaccatccctggtatctcttcagatgtgccagagagtgcccacaaaactactgcctcagaggcaaagtcagacactgggcagcctaccaaggttggacgttttcaggtgacaactacagcaaacaaagtgggtcgtttctctgtatcaaaaactgaggacaagatcactgacacaaagaaagaaggaccagtggcatctcctccttttatggatttggaacaagctgttcttcctgctgtgataccaaagaaagagaagcctgaactgtcagagccttcacatctaaatgggccgtcttctgacccggaggccgcttttttaagtagggatgtggatgatggttccggtagtccacactcgccccatcagctgagctcaaagagccttcctagccagaatctaagtcaaagccttagtaattcatttaactcctcttacatgagtagcgacaatgagtcagatatcgaagatgaagacttaaagttagagctgcgacgactacgagataaacatctcaaagagattcaggacctgcagagtcgccagaagcatgaaattgaatctttgtataccaaactgggcaaggtgccccctgctgttattattcccccagctgctcccctttcagggagaagacgacgacccactaaaagcaaaggcagcaaatctagtcgaagcagttccttggggaataaaagcccccagctttcaggtaacctgtctggtcagagtgcagcttcagtcttgcacccccagcagaccctccaccctcctggcaacatcccagagtccgggcagaatcagctgttacagccccttaagccatctccctccagtgacaacctctattcagccttcaccagtgatggtgccatttcagtaccaagcctttctgctccaggtcaaggaaccagcagcacaaacactgttggggcaacagtgaacagccaagccgcccaagctcagcctcctgccatgacgtccagcaggaagggcacattcacagatgacttgcacaagttggtagacaattgggcccgagatgccatgaatctctcaggcaggagaggaagcaaagggcacatgaattatgagggccctggaatggcaaggaagttctctgcacctgggcaactgtgcatctccatgacctcgaacctgggtggctctgcccccatctctgcagcatcagctacctctctaggtcacttcaccaagtctatgtgccccccacagcagtatggctttccagctaccccatttggcgctcaatggagtgggacgggtggcccagcaccacagccacttggccagttccaacctgtgggaactgcctccttgcagaatttcaacatcagcaatttgcagaaatccatcagcaaccccccaggctccaacctgcggaccacttagacctagagacattaactgaatagatctgggggcaggagatggaatgctgagggggtgggtgggggtgggaagtagcctatatactaactactagtgctgcatttaactggttatttcttgccagaggggaatgtttttaatactgcattgagccctcagaatggagagtctcccccgctccagttattggaatgggagaggaaggaaagaacagcttttttgtcaaggggcagcttcagaccatgctttcctgtttatctatactcagtaatgaggatgagggctaggaaagtcttgttcataaggaagctggagaactcaatgtaaaatcaaacccatctgtaatttcgagtgggtggagctcttgcttttggtacatgccctgaatccctcactccctcaagaatccgaaccacaggacaaaaaccacctactgggctctctcctaccctgccctcctcccttttttttacccctctcttttttattttttctttgctctttagaacccagtgaaaaataccagggtactggggtgcaactctttcttatgataggtcattagtgctttaagcaaaagatattagcagctttgactgcagcattagcaattaggaaaaaaaaaaaattaagttccctgcggacatgtaactttgccatcagttttgatgtggaaacactgtgatatataaaatgttgttggacaacagtagttttaagagtaaaatatgaaacgtttaaaaagttccaaaaaaagctagctctgtcctttacttattgagacactttaactttttcctttgtatttccattgtattagataaataaatgtgaatgtaaaattgtataaattactgtacttgaatacttctgtttcccagtgttgcttgctggacattttagtgccttggacttctattgcttctgccattagcatcaacttaccagaccccagatcaataaagggcatgtggaaggaaatcgtaggtccatgtgaccccagcagtccagcagtggttatgccaaagggaaattgaaaaagtatttttttaagtcattcaacaactttgtctagagcaggtgtaagatgagtagggtgggaagttaggttggcatcagtggttaaaaacagaaagttctgtttcgggaatagtgaggagggggtgttgtaacaaaattggacaacttaaaagaatggtgtgtgctgggtgaaagacaaagactaaagaatgaggaaacaaacgtgatgcctggccagtgactgtcatataaacctttcttatttgagctaggcttgaacagacgtgacctagaagaaactgaacataaagagaagggggtggggggctagttttcaagttggggaacctgatagtgaaaagtcacagatggagaaaattgctctcagaaaaactgtttggattgctttcctcttgttgcacatgtaccatgcatttctcagcttggggtactacattttgtggaaagttaatctatcatctatctttccacatctgaattaatcattctaggaaagaatacttattcctactcatttcctttatgatgtccaaatggttgcaggatcataatctattgtgccacctttatttctagaagtacaactaatatgttcacattttcaaataaataatactccccgtaagtaataactgcaaccaatcagtgttattcagtgctatgcctccttgtaatgggtagttattaattattttcagagctttccggaaatactgtcctaactggctatgtttaggatctttgttatctctgaagacaaagaaagaagctaggactcttaattttggggtgcttcttgactcttagttgggaaactgaaaatatttccaaccttttacccacgtcaatggcatattctgggaatcaccaccaccaccaccactaccacagaaagaggctggaggctcctgtaccctgttcattccttaagggccctgcttcccttaataagtaagtaagttggtctacggccctaaatatgcaaatgagagctgaaggtttttaaaaggtagaaaggaaaagggcaagggcttccacccctgctttaaaatgatttatttattctctgcttgtatttcttgtggagagagtaaggatagaaccaacaaggggctgagtagctgagaaaggggccacccaagagtgaaacatactttataccagaggagcagtggagcctcatgcagcacattatcatttgttatttgggtttaataataattttgacatcttttcactcatacacaaaaaaagtcagaactggtgttatttactgttgatttcatcctcctgtgtatgaaataacaagcctagaggaatgaactagtgctactgaactgtttaaattatttttgtgttaatagtacactttgagtatctttttccacattaaaaactttctgaattataaatgttttccttacattatttaacaatgtacactgttaaaaataaaaataaaaattcaaactttgggggtttctcagcagccgttaattgtacattttgcactaactctgggtgttgcgcttcttgtaagattgcgctttgtgcttcagtttgttacctttgtagacttatttaatgaaaccattcaaataaaccaaacttgcttttgttga

SEQ ID NO: 284712 - DNA, 5555 bp, Homo sapiens
cagagaattagcggatctgtgtcgcgtatcggaggaaacggtggggtacagctaaataggttgtagtgatatggttaaaaaatagtagagggatgatgctaataattaggctggtcgctgtatcggggcagtactgctaccccaggtcctaagcctccagctgtagtatctcagcaggcagcaggcagcactactgtgggagccacattaacatcagtttctaccaccacttcattcccaagcacagcttcacagctgtccattcagcttagcagcagtacttctactcctactttagctgaaaccgtggtagttagcgcacactcactagataagacatctcatagcagtacaactggattggctttctccctctctgcaccatcttcctcttcctctcctggagcaggagtgtctagttatatttctcagcctggtgggctgcatcctttggtcattccatcagtgatagcttctactcctattcttccccaagcagcaggacctacttctacacctttattaccccaagtacctagtatcccacccttggtacagcctgttgccaatgtgcctgctgtacagcagacactaattcatagtcagcctcaaccagctttgcttcccaaccagccccatactcattgtcctgaagtagattctgatacacaacccaaagctcctggaattgatgacataaagactctagaagaaaagctgcggtctctgttcagtgaacacagctcatctggagctcagcatgcctctgtctcactggagacctcactagtcatagagagcactgtcacaccaggcatcccaactactgctgttgcaccaagcaaactcctgacttctaccacaagtacttgcttaccaccaaccaatttaccactaggaacagttgctttgccagttacaccagtggtcacacctgggcaagtttctaccccagtcagcactactacatcaggagtgaaacctggaactgctccctccaagccacctctaactaaggctccggtgctgccagtgggtactgaacttccagcaggtactctacccagcgagcagctgccaccttttccaggaccttctctaacccagtcccagcaacctctagaggatcttgatgctcaattgagaagaacacttagtccagagatgatcacagtgacttctgcggttggtcctgtgtccatggcggctccaacagcaatcacagaagcaggaacacagcctcagaagggtgtttctcaagtcaaagaaggccctgtcctagcaactagttcaggagctggtgtttttaagatgggacgatttcaggtttctgttgcagcagacggtgcccagaaagagggtaaaaataagtcagaagatgcaaagtctgttcattttgaatccagcacctcagagtcctcagtgctatcaagtagtagtccagagagtaccttggtgaaaccagagccgaatggcataaccatccctggtatctcttcagatgtgccagagagtgcccacaaaactactgcctcagaggcaaagtcagacactgggcagcctaccaaggttggacgttttcaggtgacaactacagcaaacaaagtgggtcgtttctctgtatcaaaaactgaggacaagatcactgacacaaagaaagaaggaccagtggcatctcctccttttatggatttggaacaagctgttcttcctgctgtgataccaaagaaagagaagcctgaactgtcagagccttcacatctaaatgggccgtcttctgacccggaggccgcttttttaagtagggatgtggatgatggttccggtagtccacactcgccccatcagctgagctcaaagagccttcctagccagaatctaagtcaaagccttagtaattcatttaactcctcttacatgagtagcgacaatgagtcagatatcgaagatgaagacttaaagttagagctgcgacgactacgagataaacatctcaaagagattcaggacctgcagagtcgccagaagcatgaaattgaatctttgtataccaaactgggcaaggtgccccctgctgttattattcccccagctgctcccctttcagggagaagacgacgacccactaaaagcaaaggcagcaaatctagtcgaagcagttccttggggaataaaagcccccagctttcaggtaacctgtctggtcagagtgcagcttcagtcttgcacccccagcagaccctccaccctcctggcaacatcccagagtccgggcagaatcagctgttacagccccttaagccatctccctccagtgacaacctctattcagccttcaccagtgatggtgccatttcagtaccaagcctttctgctccaggtcaaggaaccagcagcacaaacactgttggggcaacagtgaacagccaagccgcccaagctcagcctcctgccatgacgtccagcaggaagggcacattcacagatgacttgcacaagttggtagacaattgggcccgagatgccatgaatctctcaggcaggagaggaagcaaagggcacatgaattatgagggccctggaatggcaaggaagttctctgcacctgggcaactgtgcatctccatgacctcgaacctgggtggctctgcccccatctctgcagcatcagctacctctctaggtcacttcaccaagtctatgtgccccccacagcagtatggctttccagctaccccatttggcgctcaatggagtgggacgggtggcccagcaccacagccacttggccagttccaacctgtgggaactgcctccttgcagaatttcaacatcagcaatttgcagaaatccatcagcaaccccccaggctccaacctgcggaccacttagacctagagacattaactgaatagatctgggggcaggagatggaatgctgagggggtgggtgggggtgggaagtagcctatatactaactactagtgctgcatttaactggttatttcttgccagaggggaatgtttttaatactgcattgagccctcagaatggagagtctcccccgctccagttattggaatgggagaggaaggaaagaacagcttttttgtcaaggggcagcttcagaccatgctttcctgtttatctatactcagtaatgaggatgagggctaggaaagtcttgttcataaggaagctggagaactcaatgtaaaatcaaacccatctgtaatttcgagtgggtggagctcttgcttttggtacatgccctgaatccctcactccctcaagaatccgaaccacaggacaaaaaccacctactgggctctctcctaccctgccctcctcccttttttttacccctctcttttttattttttctttgctctttagaacccagtgaaaaataccagggtactggggtgcaactctttcttatgataggtcattagtgctttaagcaaaagatattagcagctttgactgcagcattagcaattaggaaaaaaaaaaaattaagttccctgcggacatgtaactttgccatcagttttgatgtggaaacactgtgatatataaaatgttgttggacaacagtagttttaagagtaaaatatgaaacgtttaaaaagttccaaaaaaagctagctctgtcctttacttattgagacactttaactttttcctttgtatttccattgtattagataaataaatgtgaatgtaaaattgtataaattactgtacttgaatacttctgtttcccagtgttgcttgctggacattttagtgccttggacttctattgcttctgccattagcatcaacttaccagaccccagatcaataaagggcatgtggaaggaaatcgtaggtccatgtgaccccagcagtccagcagtggttatgccaaagggaaattgaaaaagtatttttttaagtcattcaacaactttgtctagagcaggtgtaagatgagtagggtgggaagttaggttggcatcagtggttaaaaacagaaagttctgtttcgggaatagtgaggagggggtgttgtaacaaaattggacaacttaaaagaatggtgtgtgctgggtgaaagacaaagactaaagaatgaggaaacaaacgtgatgcctggccagtgactgtcatataaacctttcttatttgagctaggcttgaacagacgtgacctagaagaaactgaacataaagagaagggggtggggggctagttttcaagttggggaacctgatagtgaaaagtcacagatggagaaaattgctctcagaaaaactgtttggattgctttcctcttgttgcacatgtaccatgcatttctcagcttggggtactacattttgtggaaagttaatctatcatctatctttccacatctgaattaatcattctaggaaagaatacttattcctactcatttcctttatgatgtccaaatggttgcaggatcataatctattgtgccacctttatttctagaagtacaactaatatgttcacattttcaaataaataatactccccgtaagtaataactgcaaccaatcagtgttattcagtgctatgcctccttgtaatgggtagttattaattattttcagagctttccggaaatactgtcctaactggctatgtttaggatctttgttatctctgaagacaaagaaagaagctaggactcttaattttggggtgcttcttgactcttagttgggaaactgaaaatatttccaaccttttacccacgtcaatggcatattctgggaatcaccaccaccaccaccactaccacagaaagaggctggaggctcctgtaccctgttcattccttaagggccctgcttcccttaataagtaagtaagttggtctacggccctaaatatgcaaatgagagctgaaggtttttaaaaggtagaaaggaaaagggcaagggcttccacccctgctttaaaatgatttatttattctctgcttgtatttcttgtggagagagtaaggatagaaccaacaaggggctgagtagctgagaaaggggccacccaagagtgaaacatactttataccagaggagcagtggagcctcatgcagcacattatcatttgttatttgggtttaataataattttgacatcttttcactcatacacaaaaaaagtcagaactggtgttatttactgttgatttcatcctcctgtgtatgaaataacaagcctagaggaatgaactagtgctactgaactgtttaaattatttttgtgttaatagtacactttgagtatctttttccacattaaaaactttctgaattataaatgttttccttacattatttaacaatgtacactgttaaaaataaaaataaaaattcaaactttgggggtttctcagcagccgttaattgtacattttgcactaactctgggtgttgcgcttcttgtaagattgcgctttgtgcttcagtttgttacctttgtagacttatttaatgaaaccattcaaataaaccaaacttgcttttgttga

SEQ ID NO: 284713 - DNA, 5030 bp, Homo sapiens
cacgctcgggatccgttttgcaccttggtacagcctgttgccaatgtgcctgctgtacagcagacactaattcatagtcagcctcaaccagctttgcttcccaaccagccccatactcattgtcctgaagtagattctgatacacaacccaaagctcctggaattgatgacataaagactctagaagaaaagctgcggtctctgttcagtgaacacagctcatctggagctcagcatgcctctgtctcactggagacctcactagtcatagagagcactgtcacaccaggcatcccaactactgctgttgcaccaagcaaactcctgacttctaccacaagtacttgcttaccaccaaccaatttaccactaggaacagttgctttgccagttacaccagtggtcacacctgggcaagtttctaccccagtcagcactactacatcaggagtgaaacctggaactgctccctccaagccacctctaactaaggctccggtgctgccagtgggtactgaacttccagcaggtactctacccagcgagcagctgccaccttttccaggaccttctctaacccagtcccagcaacctctagaggatcttgatgctcaattgagaagaacacttagtccagagatgatcacagtgacttctgcggttggtcctgtgtccatggcggctccaacagcaatcacagaagcaggaacacagcctcagaagggtgtttctcaagtcaaagaaggccctgtcctagcaactagttcaggagctggtgtttttaagatgggacgatttcaggtttctgttgcagcagacggtgcccagaaagagggtaaaaataagtcagaagatgcaaagtctgttcattttgaatccagcacctcagagtcctcagtgctatcaagtagtagtccagagagtaccttggtgaaaccagagccgaatggcataaccatccctggtatctcttcagatgtgccagagagtgcccacaaaactactgcctcagaggcaaagtcagacactgggcagcctaccaaggttggacgttttcaggtgacaactacagcaaacaaagtgggtcgtttctctgtatcaaaaactgaggacaagatcactgacacaaagaaagaaggaccagtggcatctcctccttttatggatttggaacaagctgttcttcctgctgtgataccaaagaaagagaagcctgaactgtcagagccttcacatctaaatgggccgtcttctgacccggaggccgcttttttaagtagggatgtggatgatggttccggtagtccacactcgccccatcagctgagctcaaagagccttcctagccagaatctaagtcaaagccttagtaattcatttaactcctcttacatgagtagcgacaatgagtcagatatcgaagatgaagacttaaagttagagctgcgacgactacgagataaacatctcaaagagattcaggacctgcagagtcgccagaagcatgaaattgaatctttgtataccaaactgggcaaggtgccccctgctgttattattcccccagctgctcccctttcagggagaagacgacgacccactaaaagcaaaggcagcaaatctagtcgaagcagttccttggggaataaaagcccccagctttcaggtaacctgtctggtcagagtgcagcttcagtcttgcacccccagcagaccctccaccctcctggcaacatcccagagtccgggcagaatcagctgttacagccccttaagccatctccctccagtgacaacctctattcagccttcaccagtgatggtgccatttcagtaccaagcctttctgctccaggtcaaggaaccagcagcacaaacactgttggggcaacagtgaacagccaagccgcccaagctcagcctcctgccatgacgtccagcaggaagggcacattcacagatgacttgcacaagttggtagacaattgggcccgagatgccatgaatctctcaggcaggagaggaagcaaagggcacatgaattatgagggccctggaatggcaaggaagttctctgcacctgggcaactgtgcatctccatgacctcgaacctgggtggctctgcccccatctctgcagcatcagctacctctctaggtcacttcaccaagtctatgtgccccccacagcagtatggctttccagctaccccatttggcgctcaatggagtgggacgggtggcccagcaccacagccacttggccagttccaacctgtgggaactgcctccttgcagaatttcaacatcagcaatttgcagaaatccatcagcaaccccccaggctccaacctgcggaccacttagacctagagacattaactgaatagatctgggggcaggagatggaatgctgagggggtgggtgggggtgggaagtagcctatatactaactactagtgctgcatttaactggttatttcttgccagaggggaatgtttttaatactgcattgagccctcagaatggagagtctcccccgctccagttattggaatgggagaggaaggaaagaacagcttttttgtcaaggggcagcttcagaccatgctttcctgtttatctatactcagtaatgaggatgagggctaggaaagtcttgttcataaggaagctggagaactcaatgtaaaatcaaacccatctgtaatttcgagtgggtggagctcttgcttttggtacatgccctgaatccctcactccctcaagaatccgaaccacaggacaaaaaccacctactgggctctctcctaccctgccctcctcccttttttttacccctctcttttttattttttctttgctctttagaacccagtgaaaaataccagggtactggggtgcaactctttcttatgataggtcattagtgctttaagcaaaagatattagcagctttgactgcagcattagcaattaggaaaaaaaaaaaattaagttccctgcggacatgtaactttgccatcagttttgatgtggaaacactgtgatatataaaatgttgttggacaacagtagttttaagagtaaaatatgaaacgtttaaaaagttccaaaaaaagctagctctgtcctttacttattgagacactttaactttttcctttgtatttccattgtattagataaataaatgtgaatgtaaaattgtataaattactgtacttgaatacttctgtttcccagtgttgcttgctggacattttagtgccttggacttctattgcttctgccattagcatcaacttaccagaccccagatcaataaagggcatgtggaaggaaatcgtaggtccatgtgaccccagcagtccagcagtggttatgccaaagggaaattgaaaaagtatttttttaagtcattcaacaactttgtctagagcaggtgtaagatgagtagggtgggaagttaggttggcatcagtggttaaaaacagaaagttctgtttcgggaatagtgaggagggggtgttgtaacaaaattggacaacttaaaagaatggtgtgtgctgggtgaaagacaaagactaaagaatgaggaaacaaacgtgatgcctggccagtgactgtcatataaacctttcttatttgagctaggcttgaacagacgtgacctagaagaaactgaacataaagagaagggggtggggggctagttttcaagttggggaacctgatagtgaaaagtcacagatggagaaaattgctctcagaaaaactgtttggattgctttcctcttgttgcacatgtaccatgcatttctcagcttggggtactacattttgtggaaagttaatctatcatctatctttccacatctgaattaatcattctaggaaagaatacttattcctactcatttcctttatgatgtccaaatggttgcaggatcataatctattgtgccacctttatttctagaagtacaactaatatgttcacattttcaaataaataatactccccgtaagtaataactgcaaccaatcagtgttattcagtgctatgcctccttgtaatgggtagttattaattattttcagagctttccggaaatactgtcctaactggctatgtttaggatctttgttatctctgaagacaaagaaagaagctaggactcttaattttggggtgcttcttgactcttagttgggaaactgaaaatatttccaaccttttacccacgtcaatggcatattctgggaatcaccaccaccaccaccactaccacagaaagaggctggaggctcctgtaccctgttcattccttaagggccctgcttcccttaataagtaagtaagttggtctacggccctaaatatgcaaatgagagctgaaggtttttaaaaggtagaaaggaaaagggcaagggcttccacccctgctttaaaatgatttatttattctctgcttgtatttcttgtggagagagtaaggatagaaccaacaaggggctgagtagctgagaaaggggccacccaagagtgaaacatactttataccagaggagcagtggagcctcatgcagcacattatcatttgttatttgggtttaataataattttgacatcttttcactcatacacaaaaaaagtcagaactggtgttatttactgttgatttcatcctcctgtgtatgaaataacaagcctagaggaatgaactagtgctactgaactgtttaaattatttttgtgttaatagtacactttgagtatctttttccacattaaaaactttctgaattataaatgttttccttacattatttaacaatgtacactgttaaaaataaaaataaaaattcaaactttgggggtttctcagcagccgttaattgtacattttgcactaactctgggtgttgcgcttcttgtaagattgcgctttgtgcttcagtttgttacctttgtagacttatttaatgaaaccattcaaataaaccaaacttgcttttgttga

SEQ ID NO: 284714 - DNA, 3296 bp, Homo sapiens
gcatggcttcccagttcatcctcttctcattctgtggcttgccattcatcatcccgtgaagttttccctcttcctgaaattgtaacctaggcttcttttaatgctcgtattctgttgcttataataggaaccagcagcacaaacactgttggggcaacagtgaacagccaagccgcccaagctcagcctcctgccatgacgtccagcaggaagggcacattcacagatgacttgcacaagttggtagacaattgggcccgagatgccatgaatctctcaggcaggagaggaagcaaagggcacatgaattatgagggccctggaatggcaaggaagttctctgcacctgggcaactgtgcatctccatgacctcgaacctgggtggctctgcccccatctctgcagcatcagctacctctctaggtcacttcaccaagtctatgtgccccccacagcagtatggctttccagctaccccatttggcgctcaatggagtgggacgggtggcccagcaccacagccacttggccagttccaacctgtgggaactgcctccttgcagaatttcaacatcagcaatttgcagaaatccatcagcaaccccccaggctccaacctgcggaccacttagacctagagacattaactgaatagatctgggggcaggagatggaatgctgagggggtgggtgggggtgggaagtagcctatatactaactactagtgctgcatttaactggttatttcttgccagaggggaatgtttttaatactgcattgagccctcagaatggagagtctcccccgctccagttattggaatgggagaggaaggaaagaacagcttttttgtcaaggggcagcttcagaccatgctttcctgtttatctatactcagtaatgaggatgagggctaggaaagtcttgttcataaggaagctggagaactcaatgtaaaatcaaacccatctgtaatttcgagtgggtggagctcttgcttttggtacatgccctgaatccctcactccctcaagaatccgaaccacaggacaaaaaccacctactgggctctctcctaccctgccctcctcccttttttttacccctctcttttttattttttctttgctctttagaacccagtgaaaaataccagggtactggggtgcaactctttcttatgataggtcattagtgctttaagcaaaagatattagcagctttgactgcagcattagcaattaggaaaaaaaaaaaattaagttccctgcggacatgtaactttgccatcagttttgatgtggaaacactgtgatatataaaatgttgttggacaacagtagttttaagagtaaaatatgaaacgtttaaaaagttccaaaaaaagctagctctgtcctttacttattgagacactttaactttttcctttgtatttccattgtattagataaataaatgtgaatgtaaaattgtataaattactgtacttgaatacttctgtttcccagtgttgcttgctggacattttagtgccttggacttctattgcttctgccattagcatcaacttaccagaccccagatcaataaagggcatgtggaaggaaatcgtaggtccatgtgaccccagcagtccagcagtggttatgccaaagggaaattgaaaaagtatttttttaagtcattcaacaactttgtctagagcaggtgtaagatgagtagggtgggaagttaggttggcatcagtggttaaaaacagaaagttctgtttcgggaatagtgaggagggggtgttgtaacaaaattggacaacttaaaagaatggtgtgtgctgggtgaaagacaaagactaaagaatgaggaaacaaacgtgatgcctggccagtgactgtcatataaacctttcttatttgagctaggcttgaacagacgtgacctagaagaaactgaacataaagagaagggggtggggggctagttttcaagttggggaacctgatagtgaaaagtcacagatggagaaaattgctctcagaaaaactgtttggattgctttcctcttgttgcacatgtaccatgcatttctcagcttggggtactacattttgtggaaagttaatctatcatctatctttccacatctgaattaatcattctaggaaagaatacttattcctactcatttcctttatgatgtccaaatggttgcaggatcataatctattgtgccacctttatttctagaagtacaactaatatgttcacattttcaaataaataatactccccgtaagtaataactgcaaccaatcagtgttattcagtgctatgcctccttgtaatgggtagttattaattattttcagagctttccggaaatactgtcctaactggctatgtttaggatctttgttatctctgaagacaaagaaagaagctaggactcttaattttggggtgcttcttgactcttagttgggaaactgaaaatatttccaaccttttacccacgtcaatggcatattctgggaatcaccaccaccaccaccactaccacagaaagaggctggaggctcctgtaccctgttcattccttaagggccctgcttcccttaataagtaagtaagttggtctacggccctaaatatgcaaatgagagctgaaggtttttaaaaggtagaaaggaaaagggcaagggcttccacccctgctttaaaatgatttatttattctctgcttgtatttcttgtggagagagtaaggatagaaccaacaaggggctgagtagctgagaaaggggccacccaagagtgaaacatactttataccagaggagcagtggagcctcatgcagcacattatcatttgttatttgggtttaataataattttgacatcttttcactcatacacaaaaaaagtcagaactggtgttatttactgttgatttcatcctcctgtgtatgaaataacaagcctagaggaatgaactagtgctactgaactgtttaaattatttttgtgttaatagtacactttgagtatctttttccacattaaaaactttctgaattataaatgttttccttacattatttaacaatgtacactgttaaaaataaaaataaaaattcaaactttgggggtttctcagcagccgttaattgtacattttgcactaactctgggtgttgcgcttcttgtaagattgcgctttgtgcttcagtttgttacctttgtagacttatttaatgaaaccattcaaataaaccaaacttgcttttgttga

SEQ ID NO: 284715 - DNA, 4022 bp, Homo sapiens
  misc_feature (124)..(124): n is a, c, g, or t
  misc_feature (325)..(325): n is a, c, g, or t
  misc_feature (462)..(462): n is a, c, g, or t
  misc_feature (506)..(506): n is a, c, g, or t
  misc_feature (605)..(605): n is a, c, g, or t
gcttcggtgacccggaggccgctttggtaaagtacgggatgtgggatgataggttgccggttagtcgcgaccactcgaccgcctagtcgagcttgtaggctctaacagagctcggtgtccgtancgcgagacatcgtaatggtcatatacggcctcttagataggtatcactcttaaccgtacctctgttaacatgtgaggtagacgaccaacctgagatcacgtagtactcgcagagagtgaaggaagtgtaaagcttatgagctgcgcacgaggtatcgaagtataatacctagtctcgaataagtaggtaattgcggaggancgcatgacaagacgttacgcgcaagcaaggacaatgtaaacttagacatttctataggtgaataactcaatatctcggggtcgaaacggatgacctcccatgacatagttaatttagttgcaccgcgcatgactggnctcctcgcatatgtaccacgggcaagaaagaacagtacctggancgcacaacttcaaataaggcgatagagggcaaggactatacattgctaacgatcagtaaagtcgagatgtgccatatgcgaggaaattgagaaaaagcngcccactagcctttacaggggtaacccatgtgttctaggtccaggagtgcaagccattgtcagtcgttggcgaccaccacaaggcagaacccgcatccgaaaccgtccgtggcagagaatcgccatgagttccgggcagaatcagctgttacagccccttaagccatctccctccagtgacaacctctattcagccttcaccagtgatggtgccatttcagtaccaagcctttctgctccaggtcaaggaaccagcagcacaaacactgttggggcaacagtgaacagccaagccgcccaagctcagcctcctgccatgacgtccagcaggaagggcacattcacagatgacttgcacaagttggtagacaattgggcccgagatgccatgaatctctcaggcaggagaggaagcaaagggcacatgaattatgagggccctggaatggcaaggaagttctctgcacctgggcaactgtgcatctccatgacctcgaacctgggtggctctgcccccatctctgcagcatcagctacctctctaggtcacttcaccaagtctatgtgccccccacagcagtatggctttccagctaccccatttggcgctcaatggagtgggacgggtggcccagcaccacagccacttggccagttccaacctgtgggaactgcctccttgcagaatttcaacatcagcaatttgcagaaatccatcagcaaccccccaggctccaacctgcggaccacttagacctagagacattaactgaatagatctgggggcaggagatggaatgctgagggggtgggtgggggtgggaagtagcctatatactaactactagtgctgcatttaactggttatttcttgccagaggggaatgtttttaatactgcattgagccctcagaatggagagtctcccccgctccagttattggaatgggagaggaaggaaagaacagcttttttgtcaaggggcagcttcagaccatgctttcctgtttatctatactcagtaatgaggatgagggctaggaaagtcttgttcataaggaagctggagaactcaatgtaaaatcaaacccatctgtaatttcgagtgggtggagctcttgcttttggtacatgccctgaatccctcactccctcaagaatccgaaccacaggacaaaaaccacctactgggctctctcctaccctgccctcctcccttttttttacccctctcttttttattttttctttgctctttagaacccagtgaaaaataccagggtactggggtgcaactctttcttatgataggtcattagtgctttaagcaaaagatattagcagctttgactgcagcattagcaattaggaaaaaaaaaaaattaagttccctgcggacatgtaactttgccatcagttttgatgtggaaacactgtgatatataaaatgttgttggacaacagtagttttaagagtaaaatatgaaacgtttaaaaagttccaaaaaaagctagctctgtcctttacttattgagacactttaactttttcctttgtatttccattgtattagataaataaatgtgaatgtaaaattgtataaattactgtacttgaatacttctgtttcccagtgttgcttgctggacattttagtgccttggacttctattgcttctgccattagcatcaacttaccagaccccagatcaataaagggcatgtggaaggaaatcgtaggtccatgtgaccccagcagtccagcagtggttatgccaaagggaaattgaaaaagtatttttttaagtcattcaacaactttgtctagagcaggtgtaagatgagtagggtgggaagttaggttggcatcagtggttaaaaacagaaagttctgtttcgggaatagtgaggagggggtgttgtaacaaaattggacaacttaaaagaatggtgtgtgctgggtgaaagacaaagactaaagaatgaggaaacaaacgtgatgcctggccagtgactgtcatataaacctttcttatttgagctaggcttgaacagacgtgacctagaagaaactgaacataaagagaagggggtggggggctagttttcaagttggggaacctgatagtgaaaagtcacagatggagaaaattgctctcagaaaaactgtttggattgctttcctcttgttgcacatgtaccatgcatttctcagcttggggtactacattttgtggaaagttaatctatcatctatctttccacatctgaattaatcattctaggaaagaatacttattcctactcatttcctttatgatgtccaaatggttgcaggatcataatctattgtgccacctttatttctagaagtacaactaatatgttcacattttcaaataaataatactccccgtaagtaataactgcaaccaatcagtgttattcagtgctatgcctccttgtaatgggtagttattaattattttcagagctttccggaaatactgtcctaactggctatgtttaggatctttgttatctctgaagacaaagaaagaagctaggactcttaattttggggtgcttcttgactcttagttgggaaactgaaaatatttccaaccttttacccacgtcaatggcatattctgggaatcaccaccaccaccaccactaccacagaaagaggctggaggctcctgtaccctgttcattccttaagggccctgcttcccttaataagtaagtaagttggtctacggccctaaatatgcaaatgagagctgaaggtttttaaaaggtagaaaggaaaagggcaagggcttccacccctgctttaaaatgatttatttattctctgcttgtatttcttgtggagagagtaaggatagaaccaacaaggggctgagtagctgagaaaggggccacccaagagtgaaacatactttataccagaggagcagtggagcctcatgcagcacattatcatttgttatttgggtttaataataattttgacatcttttcactcatacacaaaaaaagtcagaactggtgttatttactgttgatttcatcctcctgtgtatgaaataacaagcctagaggaatgaactagtgctactgaactgtttaaattatttttgtgttaatagtacactttgagtatctttttccacattaaaaactttctgaattataaatgttttccttacattatttaacaatgtacactgttaaaaataaaaataaaaattcaaactttgggggtttctcagcagccgttaattgtacattttgcactaactctgggtgttgcgcttcttgtaagattgcgctttgtgcttcagtttgttacctttgtagacttatttaatgaaaccattcaaataaaccaaacttgcttttgttga

SEQ ID NO: 284716 - DNA, 3181 bp, Homo sapiens
  misc_feature (1)..(1): n is a, c, g, or t
  misc_feature (21)..(21): n is a, c, g, or t
  misc_feature (23)..(23): n is a, c, g, or t
nccccccccctcctttgatgncntgccattatgttggggcaacagtgaacagccaagccgcccaagctcagcctcctgccatgacgtccagcaggaagggcacattcacagatgacttgcacaagttggtagacaattgggcccgagatgccatgaatctctcaggcaggagaggaagcaaagggcacatgaattatgagggccctggaatggcaaggaagttctctgcacctgggcaactgtgcatctccatgacctcgaacctgggtggctctgcccccatctctgcagcatcagctacctctctaggtcacttcaccaagtctatgtgccccccacagcagtatggctttccagctaccccatttggcgctcaatggagtgggacgggtggcccagcaccacagccacttggccagttccaacctgtgggaactgcctccttgcagaatttcaacatcagcaatttgcagaaatccatcagcaaccccccaggctccaacctgcggaccacttagacctagagacattaactgaatagatctgggggcaggagatggaatgctgagggggtgggtgggggtgggaagtagcctatatactaactactagtgctgcatttaactggttatttcttgccagaggggaatgtttttaatactgcattgagccctcagaatggagagtctcccccgctccagttattggaatgggagaggaaggaaagaacagcttttttgtcaaggggcagcttcagaccatgctttcctgtttatctatactcagtaatgaggatgagggctaggaaagtcttgttcataaggaagctggagaactcaatgtaaaatcaaacccatctgtaatttcgagtgggtggagctcttgcttttggtacatgccctgaatccctcactccctcaagaatccgaaccacaggacaaaaaccacctactgggctctctcctaccctgccctcctcccttttttttacccctctcttttttattttttctttgctctttagaacccagtgaaaaataccagggtactggggtgcaactctttcttatgataggtcattagtgctttaagcaaaagatattagcagctttgactgcagcattagcaattaggaaaaaaaaaaaattaagttccctgcggacatgtaactttgccatcagttttgatgtggaaacactgtgatatataaaatgttgttggacaacagtagttttaagagtaaaatatgaaacgtttaaaaagttccaaaaaaagctagctctgtcctttacttattgagacactttaactttttcctttgtatttccattgtattagataaataaatgtgaatgtaaaattgtataaattactgtacttgaatacttctgtttcccagtgttgcttgctggacattttagtgccttggacttctattgcttctgccattagcatcaacttaccagaccccagatcaataaagggcatgtggaaggaaatcgtaggtccatgtgaccccagcagtccagcagtggttatgccaaagggaaattgaaaaagtatttttttaagtcattcaacaactttgtctagagcaggtgtaagatgagtagggtgggaagttaggttggcatcagtggttaaaaacagaaagttctgtttcgggaatagtgaggagggggtgttgtaacaaaattggacaacttaaaagaatggtgtgtgctgggtgaaagacaaagactaaagaatgaggaaacaaacgtgatgcctggccagtgactgtcatataaacctttcttatttgagctaggcttgaacagacgtgacctagaagaaactgaacataaagagaagggggtggggggctagttttcaagttggggaacctgatagtgaaaagtcacagatggagaaaattgctctcagaaaaactgtttggattgctttcctcttgttgcacatgtaccatgcatttctcagcttggggtactacattttgtggaaagttaatctatcatctatctttccacatctgaattaatcattctaggaaagaatacttattcctactcatttcctttatgatgtccaaatggttgcaggatcataatctattgtgccacctttatttctagaagtacaactaatatgttcacattttcaaataaataatactccccgtaagtaataactgcaaccaatcagtgttattcagtgctatgcctccttgtaatgggtagttattaattattttcagagctttccggaaatactgtcctaactggctatgtttaggatctttgttatctctgaagacaaagaaagaagctaggactcttaattttggggtgcttcttgactcttagttgggaaactgaaaatatttccaaccttttacccacgtcaatggcatattctgggaatcaccaccaccaccaccactaccacagaaagaggctggaggctcctgtaccctgttcattccttaagggccctgcttcccttaataagtaagtaagttggtctacggccctaaatatgcaaatgagagctgaaggtttttaaaaggtagaaaggaaaagggcaagggcttccacccctgctttaaaatgatttatttattctctgcttgtatttcttgtggagagagtaaggatagaaccaacaaggggctgagtagctgagaaaggggccacccaagagtgaaacatactttataccagaggagcagtggagcctcatgcagcacattatcatttgttatttgggtttaataataattttgacatcttttcactcatacacaaaaaaagtcagaactggtgttatttactgttgatttcatcctcctgtgtatgaaataacaagcctagaggaatgaactagtgctactgaactgtttaaattatttttgtgttaatagtacactttgagtatctttttccacattaaaaactttctgaattataaatgttttccttacattatttaacaatgtacactgttaaaaataaaaataaaaattcaaactttgggggtttctcagcagccgttaattgtacattttgcactaactctgggtgttgcgcttcttgtaagattgcgctttgtgcttcagtttgttacctttgtagacttatttaatgaaaccattcaaataaaccaaacttgcttttgttga

SEQ ID NO: 284717 - DNA, 7414 bp, Homo sapiens
ggcgggatccgagcgggctgtgtggaggcttcagactcccggcgccatttagcgcggagagtttcccgggtggacgcggctcctctctcggccactccgcacccccatcttcggtgacagaaggcgcctggtgggggtggctgctcttttctctccctgttccccctcacccagtcctctaggtctcctctcctcttgcctcagagaagcagcggagctcgggccccgcggtgagcggccctcccctccccgccgttccctcctccgtcagcccccggcaccggcccgggaggagacgggtttgccaggcctggggcgggcggggaggcctcggggaagggggggcccgctcctcaggcgccgaggctccgaggctccggcccttcgcctctgggcgatgggcgacctgtgaggccggtccccatcgctgggggcgcgtgtgggaggaggcggccgcccgagtgaccgggagccgggccgcggccttccctcgcccgcctcggcccctcccactcctctgccccggggccgccaccgcccgggcgtcggacctggtcccgtgctcgcggtgccgccgccctctgggcctagcccgcccagctcggcgagcggcggcagtgggagccgcgtccgccgcatccgcctcgactcggtgccggcccctggccctcccctcatgactgcggcgcctctgctgccaccgcccgcccggccgccgctcgccgcaggatggatgcggaccgtgcggcgctaacccccgtggctcagctcccgaatcgcccgccttcgagccctcctcgtgagccgcagcagcctcggtgccagcccccgccgcagctgggcccagcggtccgcctgtccctcgttgcggcttgtcggtgctgagtgaggcgtcgtccgggtcggcgcgaacccgcccggccgcggtgccctgcagacctctgcgcgggcggctcggcccttcacgcccttttcgttcacgaatccgagcccgctcgcctctctccagcgaaccgaccatgtctggcggcgccgcagagaagcagagcagcactcccggttccctgttcctctcgccgccggctcctgcccccaagaatggctccagctccgattcctccgtgggggagaaactgggagccgcggccgccgacgctgtgaccggcaggaccgaggagtacaggcgccgccgccacactatggacaaggacagccgtggggcggccgcgaccactaccaccactgagcaccgcttcttccgccggagcgtcatctgcgactccaatgccactgcactggagcttcccggccttcctctttccctgccccagcccagcatccccgcggctgtcccgcagagtgctccaccggagccccaccgggaagagaccgtgaccgccaccgccacttcccaggtagcccagcagcctccagccgctgccgcccctggggaacaggccgtcgcgggccctgccccctcgactgtccccagcagtaccagcaaagaccgcccagtgtcccagcctagccttgtggggagcaaagaggagccgccgccggcgagaagtggcagcggcggcggcagcgccaaggagccacaggaggaacggagccagcagcaggatgatatcgaagagctggagaccaaggccgtgggaatgtctaacgatggccgctttctcaagtttgacatcgaaatcggcagaggctcctttaagacggtctacaaaggtctggacactgaaaccaccgtggaagtcgcctggtgtgaactgcaggatcgaaaattaacaaagtctgagaggcagagatttaaagaagaagctgaaatgttaaaaggtcttcagcatcccaatattgttagattttatgattcctgggaatccacagtaaaaggaaagaagtgcattgttttggtgactgaacttatgacgtctggaacacttaaaacgtatctgaaaaggtttaaagtgatgaagatcaaagttctaagaagctggtgccgtcagatccttaaaggtcttcagtttcttcatactcgaactccacctatcattcaccgcgatcttaaatgtgacaacatctttatcaccggccctactggctcagtcaagattggagacctcggtctggcaaccctgaagcgggcttcttttgccaagagtgtgataggtaccccagagttcatggcccctgagatgtatgaggagaaatatgatgaatccgttgacgtttatgcttttgggatgtgcatgcttgagatggctacatctgaatatccttactcggagtgccaaaatgctgcgcagatctaccgtcgcgtgaccagtggggtgaagccagccagttttgacaaagtagcaattcctgaagtgaaggaaattattgaaggatgcatacgacaaaacaaagatgaaagatattccatcaaagaccttttgaaccatgccttcttccaagaggaaacaggagtacgggtagaattagcagaagaagatgatggagaaaaaatagccataaaattatggctacgtattgaagatattaagaaattaaagggaaaatacaaagataatgaagctattgagttttcttttgatttagagagagatgtcccagaagatgttgcacaagaaatggtagagtctgggtatgtctgtgaaggtgatcacaagaccatggctaaagctatcaaagacagagtatcattaattaagaggaaacgagagcagcggcagttggtacgggaggagcaagaaaaaaaaaagcaggaagagagcagtctcaaacagcaggtagaacaatccagtgcttcccagacaggaatcaagcagctcccttctgctagcaccggcatacctactgcttctaccacttcagcttcagtttctacacaagtagaacctgaagaacctgaggcagatcaacatcaacaactacagtaccagcaacccagtatatctgtgttatctgatgggacggttgacagtggtcagggatcctctgtcttcacagaatctcgagtgagcagccaacagacagtttcatatggttcccaacatgaacaggcacattctacaggcacagtcccagggcatataccttctactgtccaagcacagtctcagccccatggggtatatccaccctcaagtgtgcagcagggaatacagcagacagcccctcctcaacagacagtgcagtattcactttcacagacatcaacctccagtgaggccactactgcacagccagtgagtcaacctcaagctccacaagtcttgcctcaagtatcagctggaaaacagagtactcagggagtctctcaggttgctcctgcagagccagttgcagtagcacagccccaagctacccagccgaccactttggcttcctctgtagacagtgcacattcagatgttgcttcaggtatgagtgatggcaatgagaacgtcccatcttccagtggaaggcatgaaggaagaactacaaaacggcattaccgaaaatctgtaaggagtcgctctcgacatgaaaaaacttcacgcccaaaattaagaattttgaatgtttcaaataaaggagaccgagtagtagaatgtcaattagagactcataataggaaaatggttacattcaaatttgacctagatggtgacaaccccgaggagatagcaacaattatggtgaacaatgactttattctagcaatagagagagagtcgtttgtggatcaagtgcgagaaattattgaaaaagctgatgaaatgctcagtgaggatgtcagtgtggaaccagagggtgatcagggattggagagtctacaaggaaaggatgactatggcttttcaggttctcagaaattggaaggagagttcaaacaaccaattcctgcgtcttccatgccacagcaaataggcattcctaccagttctttaactcaagttgttcattctgcgggaaggcggtttatagtgagtcctgtgccagaaagccgattacgagaatcaaaagttttccccagtgaaataacagatacagttgctgcctctacagctcagagccctggaatgaacttgtctcactctgcatcatcccttagtctacaacaggccttttctgaacttagacgtgcccaaatgacagaaggacccaacacagcacctccaaactttagtcatacaggaccaacatttccagtagtacctcctttcttaagtagcattgctggagtcccaaccacagcagcagccacagcaccagtccctgcaacaagcagccctcctaatgacatttccacatcagtaattcagtctgaggttacagtgcccactgaagaggggattgctggagttgccaccagcacaggtgtggtaacttcaggtggtctccccataccacctgtgtctgaatcaccagtactttccagcgtagtttcaagtatcacaatacctgcagttgtctcaatatctactacatccccgtcacttcaagtccccacatccacatctgagatcgttgtttctagtacagcactgtatccttcagtaacagtttcagcaacttcagcctctgcagggggcagtactgctaccccaggtcctaagcctccagctgtagtatctcagcaggcagcaggcagcactactgtgggagccacattaacatcagtttctaccaccacttcattcccaagcacagcttcacagctgtccattcagcttagcagcagtacttctactcctactttagctgaaaccgtggtagttagcgcacactcactagataagacatctcatagcagtacaactggattggctttctccctctctgcaccatcttcctcttcctctcctggagcaggagtgtctagttatatttctcagcctggtgggctgcatcctttggtcattccatcagtgatagcttctactcctattcttccccaagcagcaggacctacttctacacctttattaccccaagtacctagtatcccacccttggtacagcctgttgccaatgtgcctgctgtacagcagacactaattcatagtcagcctcaaccagctttgcttcccaaccagccccatactcattgtcctgaagtagattctgatacacaacccaaagctcctggaattgatgacataaagactctagaagaaaagctgcggtctctgttcagtgaacacagctcatctggagctcagcatgcctctgtctcactggagacctcactagtcatagagagcactgtcacaccaggcatcccaactactgctgttgcaccaagcaaactcctgacttctaccacaagtacttgcttaccaccaaccaatttaccactaggaacagttgctttgccagttacaccagtggtcacacctgggcaagtttctaccccagtcagcactactacatcaggagtgaaacctggaactgctccctccaagccacctctaactaaggctccggtgctgccagtgggtactgaacttccagcaggtactctacccagcgagcagctgccaccttttccaggaccttctctaacccagtcccagcaacctctagaggatcttgatgctcaattgagaagaacacttagtccagagatgatcacagtgacttctgcggttggtcctgtgtccatggcggctccaacagcaatcacagaagcaggaacacagcctcagaagggtgtttctcaagtcaaagaaggccctgtcctagcaactagttcaggagctggtgtttttaagatgggacgatttcaggtttctgttgcagcagacggtgcccagaaagagggtaaaaataagtcagaagatgcaaagtctgttcattttgaatccagcacctcagagtcctcagtgctatcaagtagtagtccagagagtaccttggtgaaaccagagccgaatggcataaccatccctggtatctcttcagatgtgccagagagtgcccacaaaactactgcctcagaggcaaagtcagacactgggcagcctaccaaggttggacgttttcaggtgacaactacagcaaacaaagtgggtcgtttctctgtatcaaaaactgaggacaagatcactgacacaaagaaagaaggaccagtggcatctcctccttttatggatttggaacaagctgttcttcctgctgtgataccaaagaaagagaagcctgaactgtcagagccttcacatctaaatgggccgtcttctgacccggaggccgcttttttaagtagggatgtggatgatggttccggtagtccacactcgccccatcagctgagctcaaagagccttcctagccagaatctaagtcaaagccttagtaattcatttaactcctcttacatgagtagcgacaatgagtcagatatcgaagatgaagacttaaagttagagctgcgacgactacgagataaacatctcaaagagattcaggacctgcagagtcgccagaagcatgaaattgaatctttgtataccaaactgggcaaggtgccccctgctgttattattcccccagctgctcccctttcagggagaagacgacgacccactaaaagcaaaggcagcaaatctagtcgaagcagttccttggggaataaaagcccccagctttcaggtaacctgtctggtcagagtgcagcttcagtcttgcacccccagcagaccctccaccctcctggcaacatcccagagtccgggcagaatcagctgttacagccccttaagccatctccctccagtgacaacctctattcagccttcaccagtgatggtgccatttcagtaccaagcctttctgctccaggtcaaggaaccagcagcacaaacactgttggggcaacagtgaacagccaagccgcccaagctcagcctcctgccatgacgtccagcaggaagggcacattcacagatgacttgcacaagttggtagacaattgggcccgagatgccatgaatctctcaggcaggagaggaagcaaagggcacatgaattatgagggccctggaatggcaaggaagttctctgcacctgggcaactgtgcatctccaagagtgaaacatactttataccagaggagcagtggagcctcatgcagcacattatcatttgttatttgggtttaataataattttgacatcttttcactcatacacaaaaaaagtcagaactggtgttatttactgttgatttcatcctcctgtgtatgaaataacaagcctagaggaatgaactagtgctactgaactgtttaaattatttttgtgttaatagtacactttgagtatctttttccacattaaaaactttctgaattataaatgttttccttacattatttaacaatgtacactgttaaaaataaaaataaaaattcaaacttt

SEQ ID NO: 284718 - DNA, 9100 bp, Homo sapiens
ggcgggatccgagcgggctgtgtggaggcttcagactcccggcgccatttagcgcggagagtttcccgggtggacgcggctcctctctcggccactccgcacccccatcttcggtgacagaaggcgcctggtgggggtggctgctcttttctctccctgttccccctcacccagtcctctaggtctcctctcctcttgcctcagagaagcagcggagctcgggccccgcggtgagcggccctcccctccccgccgttccctcctccgtcagcccccggcaccggcccgggaggagacgggtttgccaggcctggggcgggcggggaggcctcggggaagggggggcccgctcctcaggcgccgaggctccgaggctccggcccttcgcctctgggcgatgggcgacctgtgaggccggtccccatcgctgggggcgcgtgtgggaggaggcggccgcccgagtgaccgggagccgggccgcggccttccctcgcccgcctcggcccctcccactcctctgccccggggccgccaccgcccgggcgtcggacctggtcccgtgctcgcggtgccgccgccctctgggcctagcccgcccagctcggcgagcggcggcagtgggagccgcgtccgccgcatccgcctcgactcggtgccggcccctggccctcccctcatgactgcggcgcctctgctgccaccgcccgcccggccgccgctcgccgcaggatggatgcggaccgtgcggcgctaacccccgtggctcagctcccgaatcgcccgccttcgagccctcctcgtgagccgcagcagcctcggtgccagcccccgccgcagctgggcccagcggtccgcctgtccctcgttgcggcttgtcggtgctgagtgaggcgtcgtccgggtcggcgcgaacccgcccggccgcggtgccctgcagacctctgcgcgggcggctcggcccttcacgcccttttcgttcacgaatccgagcccgctcgcctctctccagcgaaccgaccatgtctggcggcgccgcagagaagcagagcagcactcccggttccctgttcctctcgccgccggctcctgcccccaagaatggctccagctccgattcctccgtgggggagaaactgggagccgcggccgccgacgctgtgaccggcaggaccgaggagtacaggcgccgccgccacactatggacaaggacagccgtggggcggccgcgaccactaccaccactgagcaccgcttcttccgccggagcgtcatctgcgactccaatgccactgcactggagcttcccggccttcctctttccctgccccagcccagcatccccgcggctgtcccgcagagtgctccaccggagccccaccgggaagagaccgtgaccgccaccgccacttcccaggtagcccagcagcctccagccgctgccgcccctggggaacaggccgtcgcgggccctgccccctcgactgtccccagcagtaccagcaaagaccgcccagtgtcccagcctagccttgtggggagcaaagaggagccgccgccggcgagaagtggcagcggcggcggcagcgccaaggagccacaggaggaacggagccagcagcaggatgatatcgaagagctggagaccaaggccgtgggaatgtctaacgatggccgctttctcaagtttgacatcgaaatcggcagaggctcctttaagacggtctacaaaggtctggacactgaaaccaccgtggaagtcgcctggtgtgaactgcaggatcgaaaattaacaaagtctgagaggcagagatttaaagaagaagctgaaatgttaaaaggtcttcagcatcccaatattgttagattttatgattcctgggaatccacagtaaaaggaaagaagtgcattgttttggtgactgaacttatgacgtctggaacacttaaaacgtatctgaaaaggtttaaagtgatgaagatcaaagttctaagaagctggtgccgtcagatccttaaaggtcttcagtttcttcatactcgaactccacctatcattcaccgcgatcttaaatgtgacaacatctttatcaccggccctactggctcagtcaagattggagacctcggtctggcaaccctgaagcgggcttcttttgccaagagtgtgataggtaccccagagttcatggcccctgagatgtatgaggagaaatatgatgaatccgttgacgtttatgcttttgggatgtgcatgcttgagatggctacatctgaatatccttactcggagtgccaaaatgctgcgcagatctaccgtcgcgtgaccagtggggtgaagccagccagttttgacaaagtagcaattcctgaagtgaaggaaattattgaaggatgcatacgacaaaacaaagatgaaagatattccatcaaagaccttttgaaccatgccttcttccaagaggaaacaggagtacgggtagaattagcagaagaagatgatggagaaaaaatagccataaaattatggctacgtattgaagatattaagaaattaaagggaaaatacaaagataatgaagctattgagttttcttttgatttagagagagatgtcccagaagatgttgcacaagaaatggtagagtctgggtatgtctgtgaaggtgatcacaagaccatggctaaagctatcaaagacagagtatcattaattaagaggaaacgagagcagcggcagttggtacgggaggagcaagaaaaaaaaaagcaggaagagagcagtctcaaacagcaggtagaacaatccagtgcttcccagacaggaatcaagcagctcccttctgctagcaccggcatacctactgcttctaccacttcagcttcagtttctacacaagtagaacctgaagaacctgaggcagatcaacatcaacaactacagtaccagcaacccagtatatctgtgttatctgatgggacggttgacagtggtcagggatcctctgtcttcacagaatctcgagtgagcagccaacagacagtttcatatggttcccaacatgaacaggcacattctacaggcacagtcccagggcatataccttctactgtccaagcacagtctcagccccatggggtatatccaccctcaagtgtgcagcagggaatacagcagacagcccctcctcaacagacagtgcagtattcactttcacagacatcaacctccagtgaggccactactgcacagccagtgagtcaacctcaagctccacaagtcttgcctcaagtatcagctggaaaacagagtactcagggagtctctcaggttgctcctgcagagccagttgcagtagcacagccccaagctacccagccgaccactttggcttcctctgtagacagtgcacattcagatgttgcttcaggtatgagtgatggcaatgagaacgtcccatcttccagtggaaggcatgaaggaagaactacaaaacggcattaccgaaaatctgtaaggagtcgctctcgacatgaaaaaacttcacgcccaaaattaagaattttgaatgtttcaaataaaggagaccgagtagtagaatgtcaattagagactcataataggaaaatggttacattcaaatttgacctagatggtgacaaccccgaggagatagcaacaattatggtgaacaatgactttattctagcaatagagagagagtcgtttgtggatcaagtgcgagaaattattgaaaaagctgatgaaatgctcagtgaggatgtcagtgtggaaccagagggtgatcagggattggagagtctacaaggaaaggatgactatggcttttcaggttctcagaaattggaaggagagttcaaacaaccaattcctgcgtcttccatgccacagcaaataggcattcctaccagttctttaactcaagttgttcattctgcgggaaggcggtttatagtgagtcctgtgccagaaagccgattacgagaatcaaaagttttccccagtgaaataacagatacagttgctgcctctacagctcagagccctggaatgaacttgtctcactctgcatcatcccttagtctacaacaggccttttctgaacttagacgtgcccaaatgacagaaggacccaacacagcacctccaaactttagtcatacaggaccaacatttccagtagtacctcctttcttaagtagcattgctggagtcccaaccacagcagcagccacagcaccagtccctgcaacaagcagccctcctaatgacatttccacatcagtaattcagtctgaggttacagtgcccactgaagaggggattgctggagttgccaccagcacaggtgtggtaacttcaggtggtctccccataccacctgtgtctgaatcaccagtactttccagcgtagtttcaagtatcacaatacctgcagttgtctcaatatctactacatccccgtcacttcaagtccccacatccacatctgagatcgttgtttctagtacagcactgtatccttcagtaacagtttcagcaacttcagcctctgcagggggcagtactgctaccccaggtcctaagcctccagctgtagtatctcagcaggcagcaggcagcactactgtgggagccacattaacatcagtttctaccaccacttcattcccaagcacagcttcacagctgtccattcagcttagcagcagtacttctactcctactttagctgaaaccgtggtagttagcgcacactcactagataagacatctcatagcagtacaactggattggctttctccctctctgcaccatcttcctcttcctctcctggagcaggagtgtctagttatatttctcagcctggtgggctgcatcctttggtcattccatcagtgatagcttctactcctattcttccccaagcagcaggacctacttctacacctttattaccccaagtacctagtatcccacccttggtacagcctgttgccaatgtgcctgctgtacagcagacactaattcatagtcagcctcaaccagctttgcttcccaaccagccccatactcattgtcctgaagtagattctgatacacaacccaaagctcctggaattgatgacataaagactctagaagaaaagctgcggtctctgttcagtgaacacagctcatctggagctcagcatgcctctgtctcactggagacctcactagtcatagagagcactgtcacaccaggcatcccaactactgctgttgcaccaagcaaactcctgacttctaccacaagtacttgcttaccaccaaccaatttaccactaggaacagttgctttgccagttacaccagtggtcacacctgggcaagtttctaccccagtcagcactactacatcaggagtgaaacctggaactgctccctccaagccacctctaactaaggctccggtgctgccagtgggtactgaacttccagcaggtactctacccagcgagcagctgccaccttttccaggaccttctctaacccagtcccagcaacctctagaggatcttgatgctcaattgagaagaacacttagtccagagatgatcacagtgacttctgcggttggtcctgtgtccatggcggctccaacagcaatcacagaagcaggaacacagcctcagaagggtgtttctcaagtcaaagaaggccctgtcctagcaactagttcaggagctggtgtttttaagatgggacgatttcaggtttctgttgcagcagacggtgcccagaaagagggtaaaaataagtcagaagatgcaaagtctgttcattttgaatccagcacctcagagtcctcagtgctatcaagtagtagtccagagagtaccttggtgaaaccagagccgaatggcataaccatccctggtatctcttcagatgtgccagagagtgcccacaaaactactgcctcagaggcaaagtcagacactgggcagcctaccaaggttggacgttttcaggtgacaactacagcaaacaaagtgggtcgtttctctgtatcaaaaactgaggacaagatcactgacacaaagaaagaaggaccagtggcatctcctccttttatggatttggaacaagctgttcttcctgctgtgataccaaagaaagagaagcctgaactgtcagagccttcacatctaaatgggccgtcttctgacccggaggccgcttttttaagtagggatgtggatgatggttccggtagtccacactcgccccatcagctgagctcaaagagccttcctagccagaatctaagtcaaagccttagtaattcatttaactcctcttacatgagtagcgacaatgagtcagatatcgaagatgaagacttaaagttagagctgcgacgactacgagataaacatctcaaagagattcaggacctgcagagtcgccagaagcatgaaattgaatctttgtataccaaactgggcaaggtgccccctgctgttattattcccccagctgctcccctttcagggagaagacgacgacccactaaaagcaaaggcagcaaatctagtcgaagcagttccttggggaataaaagcccccagctttcaggtaacctgtctggtcagagtgcagcttcagtcttgcacccccagcagaccctccaccctcctggcaacatcccagagtccgggcagaatcagctgttacagccccttaagccatctccctccagtgacaacctctattcagccttcaccagtgatggtgccatttcagtaccaagcctttctgctccaggtcaaggtaataaagcaaccatcatcgtccaaaaacaataaaatggagatgttgccatacctgggacaaaagcctgttaaggcgggttgggagactagctgaccagaacacagcctgtgtgttgtacactgaagaatctgggtgaaaagggaagtggagtgataatgagaatcggtgggctcactgctcccattaggtgaaattactttttttcaaggaattacagtgaaaagttacatctgtgtggcctatatgacttgctcatttgggatttggaacttaggctttaatattaggctgagatttcctggatgaaattctaaggtgttttagcagtttctgaagctaatacattttcttagccattgtagaattttgttacttttaagtatgggagtggcatactaaaatgaataaccttacaattcagttttttatccataatctactttccaaatatagctctgtttattagtgattgctgaaaaaattcccacagaggaaagagcttttagtcatattagaacaagaattgaaaagacttgggcatctgggtgagaagaatgaaaaaaatataggtactggcttatgtgcctttgccacagtttcacagaaattagagatcagtctcttcacaggaagaatgcacttgattggtaaggagggcaaactagctagcattattcgaactaagaaaagcttccgcattttgcagatgggtagaattaagacctaatatttcatctcttacatatctgaccttccccccagaagcttgttcttctgtgtgccatcttagtgcatttcaccactccagcctcaagtttctaacatcttgtagttgtgttctgtctcttctcctctctctgttctaccctgtttttcccctctcacaggctgtgcgaagtttaactgtgcatctgaacaggtgacattcaaacctggtggcaggaggacccgatttctgagtacgccctgcttggctctttgtgtgtaacacctttactccttccttgtccttgtgtttctgctgcttggatctgatgtttcacgcagtccattttcatttgtctctttttgtatatcatctactcagtggcttggctgaattactgttaccctcagaagtttgggcccccacattaattatgataaaaaatgtcaaaataacaagttatctacaaatttcaatgtaactttctggtagaagtgcttcttcatggatctgtgacagagagtggatatggtatctaggcaatagattgctgggtcatttagaataatgaagactgaactccacagtcgtagtcagtgctgtctgtctgccctagcattagaaatgagagaaatcagccagacacggtggcgtacacctgtaatcccagcactttgggaggccgaggcgggaagattgcttgaggccaggagctcgagaccaaccctgggcaacatggtgataccccatctctaaaaaaaaaaaaaaagttagcctggcatggtggtgtgcacctatagtcccagctgcccaggaggctgaggcgggaggattaccaccttaagaccaggaggttgagactgcagtgagccatgattgcaccactgcaccccagcctgagcgacagagtgagactctatctcaaaaaaaagaaacgaaatgaagaaagcattttgaccaatgatgctcttagatcctggcagcaggtaaaaattatgtaccatttttttccattctttgtcagagtagattgaaatcttatttttcttctctattaagcctaagcagctaccagttgaaaagatgctaggatctcttcattggatcattccaccactactgtcctctaaccccataaaatcaaaagcggtttttagtttggttattctgataaagcacttagtctaataaagatcaaagcccagcatctgcaagtgaaaattctccttctaacatgatttctgggattttgcagctttctacttaaaaacaaggcacaatagcaagtcaccccatcttccccatatgtgaaatggagatgatgccagtgtcctagggccatcgtacaaatcaagctaagatcatgtacagagaaacaggtagcgcttgaaaagcactcatggtttctctctgatgagtcagtgcctacctggcacagaacaggtagtcaataactgttcgtggaagaacagtttaaaacaaacaaaaacatagttcaagtagaaaaacctttgttataatttgaataaagatcttctctgttaaggcctc

SEQ ID NO: 284719 - DNA, 7116 bp, Homo sapiens
ggcgggatccgagcgggctgtgtggaggcttcagactcccggcgccatttagcgcggagagtttcccgggtggacgcggctcctctctcggccactccgcacccccatcttcggtgacagaaggcgcctggtgggggtggctgctcttttctctccctgttccccctcacccagtcctctaggtctcctctcctcttgcctcagagaagcagcggagctcgggccccgcggtgagcggccctcccctccccgccgttccctcctccgtcagcccccggcaccggcccgggaggagacgggtttgccaggcctggggcgggcggggaggcctcggggaagggggggcccgctcctcaggcgccgaggctccgaggctccggcccttcgcctctgggcgatgggcgacctgtgaggccggtccccatcgctgggggcgcgtgtgggaggaggcggccgcccgagtgaccgggagccgggccgcggccttccctcgcccgcctcggcccctcccactcctctgccccggggccgccaccgcccgggcgtcggacctggtcccgtgctcgcggtgccgccgccctctgggcctagcccgcccagctcggcgagcggcggcagtgggagccgcgtccgccgcatccgcctcgactcggtgccggcccctggccctcccctcatgactgcggcgcctctgctgccaccgcccgcccggccgccgctcgccgcaggatggatgcggaccgtgcggcgctaacccccgtggctcagctcccgaatcgcccgccttcgagccctcctcgtgagccgcagcagcctcggtgccagcccccgccgcagctgggcccagcggtccgcctgtccctcgttgcggcttgtcggtgctgagtgaggcgtcgtccgggtcggcgcgaacccgcccggccgcggtgccctgcagacctctgcgcgggcggctcggcccttcacgcccttttcgttcacgaatccgagcccgctcgcctctctccagcgaaccgaccatgtctggcggcgccgcagagaagcagagcagcactcccggttccctgttcctctcgccgccggctcctgcccccaagaatggctccagctccgattcctccgtgggggagaaactgggagccgcggccgccgacgctgtgaccggcaggaccgaggagtacaggcgccgccgccacactatggacaaggacagccgtggggcggccgcgaccactaccaccactgagcaccgcttcttccgccggagcgtcatctgcgactccaatgccactgcactggagcttcccggccttcctctttccctgccccagcccagcatccccgcggctgtcccgcagagtgctccaccggagccccaccgggaagagaccgtgaccgccaccgccacttcccaggtagcccagcagcctccagccgctgccgcccctggggaacaggccgtcgcgggccctgccccctcgactgtccccagcagtaccagcaaagaccgcccagtgtcccagcctagccttgtggggagcaaagaggagccgccgccggcgagaagtggcagcggcggcggcagcgccaaggagccacaggaggaacggagccagcagcaggatgatatcgaagagctggagaccaaggccgtgggaatgtctaacgatggccgctttctcaagtttgacatcgaaatcggcagaggctcctttaagacggtctacaaaggtctggacactgaaaccaccgtggaagtcgcctggtgtgaactgcaggatcgaaaattaacaaagtctgagaggcagagatttaaagaagaagctgaaatgttaaaaggtcttcagcatcccaatattgttagattttatgattcctgggaatccacagtaaaaggaaagaagtgcattgttttggtgactgaacttatgacgtctggaacacttaaaacgtatctgaaaaggtttaaagtgatgaagatcaaagttctaagaagctggtgccgtcagatccttaaaggtcttcagtttcttcatactcgaactccacctatcattcaccgcgatcttaaatgtgacaacatctttatcaccggccctactggctcagtcaagattggagacctcggtctggcaaccctgaagcgggcttcttttgccaagagtgtgataggtaccccagagttcatggcccctgagatgtatgaggagaaatatgatgaatccgttgacgtttatgcttttgggatgtgcatgcttgagatggctacatctgaatatccttactcggagtgccaaaatgctgcgcagatctaccgtcgcgtgaccagtggggtgaagccagccagttttgacaaagtagcaattcctgaagtgaaggaaattattgaaggatgcatacgacaaaacaaagatgaaagatattccatcaaagaccttttgaaccatgccttcttccaagaggaaacaggagtacgggtagaattagcagaagaagatgatggagaaaaaatagccataaaattatggctacgtattgaagatattaagaaattaaagggaaaatacaaagataatgaagctattgagttttcttttgatttagagagagatgtcccagaagatgttgcacaagaaatggtagagtctgggtatgtctgtgaaggtgatcacaagaccatggctaaagctatcaaagacagagtatcattaattaagaggaaacgagagcagcggcagttggtacgggaggagcaagaaaaaaaaaagcaggaagagagcagtctcaaacagcaggtagaacaatccagtgcttcccagacaggaatcaagcagctcccttctgctagcaccggcatacctactgcttctaccacttcagcttcagtttctacacaagtagaacctgaagaacctgaggcagatcaacatcaacaactacagtaccagcaacccagtatatctgtgttatctgatgggacggttgacagtggtcagggatcctctgtcttcacagaatctcgagtgagcagccaacagacagtttcatatggttcccaacatgaacaggcacattctacaggcacagtcccagggcatataccttctactgtccaagcacagtctcagccccatggggtatatccaccctcaagtgtgcagcagggaatacagcagacagcccctcctcaacagacagtgcagtattcactttcacagacatcaacctccagtgaggccactactgcacagccagtgagtcaacctcaagctccacaagtcttgcctcaagtatcagctggaaaacagagtactcagggagtctctcaggttgctcctgcagagccagttgcagtagcacagccccaagctacccagccgaccactttggcttcctctgtagacagtgcacattcagatgttgcttcaggtatgagtgatggcaatgagaacgtcccatcttccagtggaaggcatgaaggaagaactacaaaacggcattaccgaaaatctgtaaggagtcgctctcgacatgaaaaaacttcacgcccaaaattaagaattttgaatgtttcaaataaaggagaccgagtagtagaatgtcaattagagactcataataggaaaatggttacattcaaatttgacctagatggtgacaaccccgaggagatagcaacaattatggtgaacaatgactttattctagcaatagagagagagtcgtttgtggatcaagtgcgagaaattattgaaaaagctgatgaaatgctcagtgaggatgtcagtgtggaaccagagggtgatcagggattggagagtctacaaggaaaggatgactatggcttttcaggttctcagaaattggaaggagagttcaaacaaccaattcctgcgtcttccatgccacagcaaataggcattcctaccagttctttaactcaagttgttcattctgcgggaaggcggtttatagtgagtcctgtgccagaaagccgattacgagaatcaaaagttttccccagtgaaataacagatacagttgctgcctctacagctcagagccctggaatgaacttgtctcactctgcatcatcccttagtctacaacaggccttttctgaacttagacgtgcccaaatgacagaaggacccaacacagcacctccaaactttagtcatacaggaccaacatttccagtagtacctcctttcttaagtagcattgctggagtcccaaccacagcagcagccacagcaccagtccctgcaacaagcagccctcctaatgacatttccacatcagtaattcagtctgaggttacagtgcccactgaagaggggattgctggagttgccaccagcacaggtgtggtaacttcaggtggtctccccataccacctgtgtctgaatcaccagtactttccagcgtagtttcaagtatcacaatacctgcagttgtctcaatatctactacatccccgtcacttcaagtccccacatccacatctgagatcgttgtttctagtacagcactgtatccttcagtaacagtttcagcaacttcagcctctgcagggggcagtactgctaccccaggtcctaagcctccagctgtagtatctcagcaggcagcaggcagcactactgtgggagccacattaacatcagtttctaccaccacttcattcccaagcacagcttcacagctgtccattcagcttagcagcagtacttctactcctactttagctgaaaccgtggtagttagcgcacactcactagataagacatctcatagcagtacaactggattggctttctccctctctgcaccatcttcctcttcctctcctggagcaggagtgtctagttatatttctcagcctggtgggctgcatcctttggtcattccatcagtgatagcttctactcctattcttccccaagcagcaggacctacttctacacctttattaccccaagtacctagtatcccacccttggtacagcctgttgccaatgtgcctgctgtacagcagacactaattcatagtcagcctcaaccagctttgcttcccaaccagccccatactcattgtcctgaagtagattctgatacacaacccaaagctcctggaattgatgacataaagactctagaagaaaagctgcggtctctgttcagtgaacacagctcatctggagctcagcatgcctctgtctcactggagacctcactagtcatagagagcactgtcacaccaggcatcccaactactgctgttgcaccaagcaaactcctgacttctaccacaagtacttgcttaccaccaaccaatttaccactaggaacagttgctttgccagttacaccagtggtcacacctgggcaagtttctaccccagtcagcactactacatcaggagtgaaacctggaactgctccctccaagccacctctaactaaggctccggtgctgccagtgggtactgaacttccagcaggtactctacccagcgagcagctgccaccttttccaggaccttctctaacccagtcccagcaacctctagaggatcttgatgctcaattgagaagaacacttagtccagagatgatcacagtgacttctgcggttggtcctgtgtccatggcggctccaacagcaatcacagaagcaggaacacagcctcagaagggtgtttctcaagtcaaagaaggccctgtcctagcaactagttcaggagctggtgtttttaagatgggacgatttcaggtttctgttgcagcagacggtgcccagaaagagggtaaaaataagtcagaagatgcaaagtctgttcattttgaatccagcacctcagagtcctcagtgctatcaagtagtagtccagagagtaccttggtgaaaccagagccgaatggcataaccatccctggtatctcttcagatgtgccagagagtgcccacaaaactactgcctcagaggcaaagtcagacactgggcagcctaccaaggttggacgttttcaggtgacaactacagcaaacaaagtgggtcgtttctctgtatcaaaaactgaggacaagatcactgacacaaagaaagaaggaccagtggcatctcctccttttatggatttggaacaagctgttcttcctgctgtgataccaaagaaagagaagcctgaactgtcagagccttcacatctaaatgggccgtcttctgacccggaggccgcttttttaagtagggatgtggatgatggttccggtagtccacactcgccccatcagctgagctcaaagagccttcctagccagaatctaagtcaaagccttagtaattcatttaactcctcttacatgagtagcgacaatgagtcagatatcgaagatgaagacttaaagttagagctgcgacgactacgagataaacatctcaaagagattcaggacctgcagagtcgccagaagcatgaaattgaatctttgtataccaaactgggcaaggtgccccctgctgttattattcccccagctgctcccctttcagggagaagacgacgacccactaaaagcaaaggcagcaaatctagtcgaagcagttccttggggaataaaagcccccagctttcaggtaacctgtctggtcagagtgcagcttcagtcttgcacccccagcagaccctccaccctcctggcaacatcccagagtccgggcagaatcagctgttacagccccttaagccatctccctccagtgacaacctctattcagccttcaccagtgatggtgccatttcagtaccaagcctttctgctccaggtcaaggaaccagcagcacaaacactgttggggcaacagtgaacagccaagccgcccaagctcagcctcctgccatgacgtccagcaggaagggcacattcacagatgacttgcacaagttggtagacaattgggcccgagatgccatgaatctctcaggcaggagaggaagcaaagggcacatgaattatgagggccctggaatggcaaggaagttctctgcacctgggcaactgtgcatctccatacccattacaatttccagcattccccctcaaccct

SEQ ID NO: 284720 - DNA, 7205 bp, Homo sapiens
ggcgggatccgagcgggctgtgtggaggcttcagactcccggcgccatttagcgcggagagtttcccgggtggacgcggctcctctctcggccactccgcacccccatcttcggtgacagaaggcgcctggtgggggtggctgctcttttctctccctgttccccctcacccagtcctctaggtctcctctcctcttgcctcagagaagcagcggagctcgggccccgcggtgagcggccctcccctccccgccgttccctcctccgtcagcccccggcaccggcccgggaggagacgggtttgccaggcctggggcgggcggggaggcctcggggaagggggggcccgctcctcaggcgccgaggctccgaggctccggcccttcgcctctgggcgatgggcgacctgtgaggccggtccccatcgctgggggcgcgtgtgggaggaggcggccgcccgagtgaccgggagccgggccgcggccttccctcgcccgcctcggcccctcccactcctctgccccggggccgccaccgcccgggcgtcggacctggtcccgtgctcgcggtgccgccgccctctgggcctagcccgcccagctcggcgagcggcggcagtgggagccgcgtccgccgcatccgcctcgactcggtgccggcccctggccctcccctcatgactgcggcgcctctgctgccaccgcccgcccggccgccgctcgccgcaggatggatgcggaccgtgcggcgctaacccccgtggctcagctcccgaatcgcccgccttcgagccctcctcgtgagccgcagcagcctcggtgccagcccccgccgcagctgggcccagcggtccgcctgtccctcgttgcggcttgtcggtgctgagtgaggcgtcgtccgggtcggcgcgaacccgcccggccgcggtgccctgcagacctctgcgcgggcggctcggcccttcacgcccttttcgttcacgaatccgagcccgctcgcctctctccagcgaaccgaccatgtctggcggcgccgcagagaagcagagcagcactcccggttccctgttcctctcgccgccggctcctgcccccaagaatggctccagctccgattcctccgtgggggagaaactgggagccgcggccgccgacgctgtgaccggcaggaccgaggagtacaggcgccgccgccacactatggacaaggacagccgtggggcggccgcgaccactaccaccactgagcaccgcttcttccgccggagcgtcatctgcgactccaatgccactgcactggagcttcccggccttcctctttccctgccccagcccagcatccccgcggctgtcccgcagagtgctccaccggagccccaccgggaagagaccgtgaccgccaccgccacttcccaggtagcccagcagcctccagccgctgccgcccctggggaacaggccgtcgcgggccctgccccctcgactgtccccagcagtaccagcaaagaccgcccagtgtcccagcctagccttgtggggagcaaagaggagccgccgccggcgagaagtggcagcggcggcggcagcgccaaggagccacaggaggaacggagccagcagcaggatgatatcgaagagctggagaccaaggccgtgggaatgtctaacgatggccgctttctcaagtttgacatcgaaatcggcagaggctcctttaagacggtctacaaaggtctggacactgaaaccaccgtggaagtcgcctggtgtgaactgcaggatcgaaaattaacaaagtctgagaggcagagatttaaagaagaagctgaaatgttaaaaggtcttcagcatcccaatattgttagattttatgattcctgggaatccacagtaaaaggaaagaagtgcattgttttggtgactgaacttatgacgtctggaacacttaaaacgtatctgaaaaggtttaaagtgatgaagatcaaagttctaagaagctggtgccgtcagatccttaaaggtcttcagtttcttcatactcgaactccacctatcattcaccgcgatcttaaatgtgacaacatctttatcaccggccctactggctcagtcaagattggagacctcggtctggcaaccctgaagcgggcttcttttgccaagagtgtgataggtaccccagagttcatggcccctgagatgtatgaggagaaatatgatgaatccgttgacgtttatgcttttgggatgtgcatgcttgagatggctacatctgaatatccttactcggagtgccaaaatgctgcgcagatctaccgtcgcgtgaccagtggggtgaagccagccagttttgacaaagtagcaattcctgaagtgaaggaaattattgaaggatgcatacgacaaaacaaagatgaaagatattccatcaaagaccttttgaaccatgccttcttccaagaggaaacaggagtacgggtagaattagcagaagaagatgatggagaaaaaatagccataaaattatggctacgtattgaagatattaagaaattaaagggaaaatacaaagataatgaagctattgagttttcttttgatttagagagagatgtcccagaagatgttgcacaagaaatggtagagtctgggtatgtctgtgaaggtgatcacaagaccatggctaaagctatcaaagacagagtatcattaattaagaggaaacgagagcagcggcagttggtacgggaggagcaagaaaaaaaaaagcaggaagagagcagtctcaaacagcaggtagaacaatccagtgcttcccagacaggaatcaagcagctcccttctgctagcaccggcatacctactgcttctaccacttcagcttcagtttctacacaagtagaacctgaagaacctgaggcagatcaacatcaacaactacagtaccagcaacccagtatatctgtgttatctgatgggacggttgacagtggtcagggatcctctgtcttcacagaatctcgagtgagcagccaacagacagtttcatatggttcccaacatgaacaggcacattctacaggcacagtcccagggcatataccttctactgtccaagcacagtctcagccccatggggtatatccaccctcaagtgtgcagcagggaatacagcagacagcccctcctcaacagacagtgcagtattcactttcacagacatcaacctccagtgaggccactactgcacagccagtgagtcaacctcaagctccacaagtcttgcctcaagtatcagctggaaaacagagtactcagggagtctctcaggttgctcctgcagagccagttgcagtagcacagccccaagctacccagccgaccactttggcttcctctgtagacagtgcacattcagatgttgcttcaggtatgagtgatggcaatgagaacgtcccatcttccagtggaaggcatgaaggaagaactacaaaacggcattaccgaaaatctgtaaggagtcgctctcgacatgaaaaaacttcacgcccaaaattaagaattttgaatgtttcaaataaaggagaccgagtagtagaatgtcaattagagactcataataggaaaatggttacattcaaatttgacctagatggtgacaaccccgaggagatagcaacaattatggtgaacaatgactttattctagcaatagagagagagtcgtttgtggatcaagtgcgagaaattattgaaaaagctgatgaaatgctcagtgaggatgtcagtgtggaaccagagggtgatcagggattggagagtctacaaggaaaggatgactatggcttttcaggttctcagaaattggaaggagagttcaaacaaccaattcctgcgtcttccatgccacagcaaataggcattcctaccagttctttaactcaagttgttcattctgcgggaaggcggtttatagtgagtcctgtgccagaaagccgattacgagaatcaaaagttttccccagtgaaataacagatacagttgctgcctctacagctcagagccctggaatgaacttgtctcactctgcatcatcccttagtctacaacaggccttttctgaacttagacgtgcccaaatgacagaaggacccaacacagcacctccaaactttagtcatacaggaccaacatttccagtagtacctcctttcttaagtagcattgctggagtcccaaccacagcagcagccacagcaccagtccctgcaacaagcagccctcctaatgacatttccacatcagtaattcagtctgaggttacagtgcccactgaagaggggattgctggagttgccaccagcacaggtgtggtaacttcaggtggtctccccataccacctgtgtctgaatcaccagtactttccagcgtagtttcaagtatcacaatacctgcagttgtctcaatatctactacatccccgtcacttcaagtccccacatccacatctgagatcgttgtttctagtacagcactgtatccttcagtaacagtttcagcaacttcagcctctgcagggggcagtactgctaccccaggtcctaagcctccagctgtagtatctcagcaggcagcaggcagcactactgtgggagccacattaacatcagtttctaccaccacttcattcccaagcacagcttcacagctgtccattcagcttagcagcagtacttctactcctactttagctgaaaccgtggtagttagcgcacactcactagataagacatctcatagcagtacaactggattggctttctccctctctgcaccatcttcctcttcctctcctggagcaggagtgtctagttatatttctcagcctggtgggctgcatcctttggtcattccatcagtgatagcttctactcctattcttccccaagcagcaggacctacttctacacctttattaccccaagtacctagtatcccacccttggtacagcctgttgccaatgtgcctgctgtacagcagacactaattcatagtcagcctcaaccagctttgcttcccaaccagccccatactcattgtcctgaagtagattctgatacacaacccaaagctcctggaattgatgacataaagactctagaagaaaagctgcggtctctgttcagtgaacacagctcatctggagctcagcatgcctctgtctcactggagacctcactagtcatagagagcactgtcacaccaggcatcccaactactgctgttgcaccaagcaaactcctgacttctaccacaagtacttgcttaccaccaaccaatttaccactaggaacagttgctttgccagttacaccagtggtcacacctgggcaagtttctaccccagtcagcactactacatcaggagtgaaacctggaactgctccctccaagccacctctaactaaggctccggtgctgccagtgggtactgaacttccagcaggtactctacccagcgagcagctgccaccttttccaggaccttctctaacccagtcccagcaacctctagaggatcttgatgctcaattgagaagaacacttagtccagagatgatcacagtgacttctgcggttggtcctgtgtccatggcggctccaacagcaatcacagaagcaggaacacagcctcagaagggtgtttctcaagtcaaagaaggccctgtcctagcaactagttcaggagctggtgtttttaagatgggacgatttcaggtttctgttgcagcagacggtgcccagaaagagggtaaaaataagtcagaagatgcaaagtctgttcattttgaatccagcacctcagagtcctcagtgctatcaagtagtagtccagagagtaccttggtgaaaccagagccgaatggcataaccatccctggtatctcttcagatgtgccagagagtgcccacaaaactactgcctcagaggcaaagtcagacactgggcagcctaccaaggttggacgttttcaggtgacaactacagcaaacaaagtgggtcgtttctctgtatcaaaaactgaggacaagatcactgacacaaagaaagaaggaccagtggcatctcctccttttatggatttggaacaagctgttcttcctgctgtgataccaaagaaagagaagcctgaactgtcagagccttcacatctaaatgggccgtcttctgacccggaggccgcttttttaagtagggatgtggatgatggttccggtagtccacactcgccccatcagctgagctcaaagagccttcctagccagaatctaagtcaaagccttagtaattcatttaactcctcttacatgagtagcgacaatgagtcagatatcgaagatgaagacttaaagttagagctgcgacgactacgagataaacatctcaaagagattcaggacctgcagagtcgccagaagcatgaaattgaatctttgtataccaaactgggcaaggtgccccctgctgttattattcccccagctgctcccctttcagggagaagacgacgacccactaaaagcaaaggcagcaaatctagtcgaagcagttccttggggaataaaagcccccagctttcaggtaacctgtctggtcagagtgcagcttcagtcttgcacccccagcagaccctccaccctcctggcaacatcccagagtccgggcagaatcagctgttacagccccttaagccatctccctccagtgacaacctctattcagccttcaccagtgatggtgccatttcagtaccaagcctttctgctccaggtcaaggaaccagcagcacaaacactgttggggcaacagtgaacagccaagccgcccaagctcagcctcctgccatgacgtccagcaggaagggcacattcacagatgacttgcacaagttggtagacaattgggcccgagatgccatgaatctctcaggcaggagaggaagcaaagggcacatgaattatgaggtaagtctctcttttgccgcagagaatccgtaacacacatctgagtcaaggtgatagaaacaactaagctgctgcttaacgtcttacgccacgaccttcttcaattttaatactttagaaaaacaaggcaaaaatcccccaggtacccttttatttttccttccctgaattcctaac

SEQ ID NO: 284721 - DNA, 7030 bp, Homo sapiens
ggcgggatccgagcgggctgtgtggaggcttcagactcccggcgccatttagcgcggagagtttcccgggtggacgcggctcctctctcggccactccgcacccccatcttcggtgacagaaggcgcctggtgggggtggctgctcttttctctccctgttccccctcacccagtcctctaggtctcctctcctcttgcctcagagaagcagcggagctcgggccccgcggtgagcggccctcccctccccgccgttccctcctccgtcagcccccggcaccggcccgggaggagacgggtttgccaggcctggggcgggcggggaggcctcggggaagggggggcccgctcctcaggcgccgaggctccgaggctccggcccttcgcctctgggcgatgggcgacctgtgaggccggtccccatcgctgggggcgcgtgtgggaggaggcggccgcccgagtgaccgggagccgggccgcggccttccctcgcccgcctcggcccctcccactcctctgccccggggccgccaccgcccgggcgtcggacctggtcccgtgctcgcggtgccgccgccctctgggcctagcccgcccagctcggcgagcggcggcagtgggagccgcgtccgccgcatccgcctcgactcggtgccggcccctggccctcccctcatgactgcggcgcctctgctgccaccgcccgcccggccgccgctcgccgcaggatggatgcggaccgtgcggcgctaacccccgtggctcagctcccgaatcgcccgccttcgagccctcctcgtgagccgcagcagcctcggtgccagcccccgccgcagctgggcccagcggtccgcctgtccctcgttgcggcttgtcggtgctgagtgaggcgtcgtccgggtcggcgcgaacccgcccggccgcggtgccctgcagacctctgcgcgggcggctcggcccttcacgcccttttcgttcacgaatccgagcccgctcgcctctctccagcgaaccgaccatgtctggcggcgccgcagagaagcagagcagcactcccggttccctgttcctctcgccgccggctcctgcccccaagaatggctccagctccgattcctccgtgggggagaaactgggagccgcggccgccgacgctgtgaccggcaggaccgaggagtacaggcgccgccgccacactatggacaaggacagccgtggggcggccgcgaccactaccaccactgagcaccgcttcttccgccggagcgtcatctgcgactccaatgccactgcactggagcttcccggccttcctctttccctgccccagcccagcatccccgcggctgtcccgcagagtgctccaccggagccccaccgggaagagaccgtgaccgccaccgccacttcccaggtagcccagcagcctccagccgctgccgcccctggggaacaggccgtcgcgggccctgccccctcgactgtccccagcagtaccagcaaagaccgcccagtgtcccagcctagccttgtggggagcaaagaggagccgccgccggcgagaagtggcagcggcggcggcagcgccaaggagccacaggaggaacggagccagcagcaggatgatatcgaagagctggagaccaaggccgtgggaatgtctaacgatggccgctttctcaagtttgacatcgaaatcggcagaggctcctttaagacggtctacaaaggtctggacactgaaaccaccgtggaagtcgcctggtgtgaactgcaggatcgaaaattaacaaagtctgagaggcagagatttaaagaagaagctgaaatgttaaaaggtcttcagcatcccaatattgttagattttatgattcctgggaatccacagtaaaaggaaagaagtgcattgttttggtgactgaacttatgacgtctggaacacttaaaacgtatctgaaaaggtttaaagtgatgaagatcaaagttctaagaagctggtgccgtcagatccttaaaggtcttcagtttcttcatactcgaactccacctatcattcaccgcgatcttaaatgtgacaacatctttatcaccggccctactggctcagtcaagattggagacctcggtctggcaaccctgaagcgggcttcttttgccaagagtgtgataggtaccccagagttcatggcccctgagatgtatgaggagaaatatgatgaatccgttgacgtttatgcttttgggatgtgcatgcttgagatggctacatctgaatatccttactcggagtgccaaaatgctgcgcagatctaccgtcgcgtgaccagtggggtgaagccagccagttttgacaaagtagcaattcctgaagtgaaggaaattattgaaggatgcatacgacaaaacaaagatgaaagatattccatcaaagaccttttgaaccatgccttcttccaagaggaaacaggagtacgggtagaattagcagaagaagatgatggagaaaaaatagccataaaattatggctacgtattgaagatattaagaaattaaagggaaaatacaaagataatgaagctattgagttttcttttgatttagagagagatgtcccagaagatgttgcacaagaaatggtagagtctgggtatgtctgtgaaggtgatcacaagaccatggctaaagctatcaaagacagagtatcattaattaagaggaaacgagagcagcggcagttggtacgggaggagcaagaaaaaaaaaagcaggaagagagcagtctcaaacagcaggtagaacaatccagtgcttcccagacaggaatcaagcagctcccttctgctagcaccggcatacctactgcttctaccacttcagcttcagtttctacacaagtagaacctgaagaacctgaggcagatcaacatcaacaactacagtaccagcaacccagtatatctgtgttatctgatgggacggttgacagtggtcagggatcctctgtcttcacagaatctcgagtgagcagccaacagacagtttcatatggttcccaacatgaacaggcacattctacaggcacagtcccagggcatataccttctactgtccaagcacagtctcagccccatggggtatatccaccctcaagtgtgcagcagggaatacagcagacagcccctcctcaacagacagtgcagtattcactttcacagacatcaacctccagtgaggccactactgcacagccagtgagtcaacctcaagctccacaagtcttgcctcaagtatcagctggaaaacagagtactcagggagtctctcaggttgctcctgcagagccagttgcagtagcacagccccaagctacccagccgaccactttggcttcctctgtagacagtgcacattcagatgttgcttcaggtatgagtgatggcaatgagaacgtcccatcttccagtggaaggcatgaaggaagaactacaaaacggcattaccgaaaatctgtaaggagtcgctctcgacatgaaaaaacttcacgcccaaaattaagaattttgaatgtttcaaataaaggagaccgagtagtagaatgtcaattagagactcataataggaaaatggttacattcaaatttgacctagatggtgacaaccccgaggagatagcaacaattatggtgaacaatgactttattctagcaatagagagagagtcgtttgtggatcaagtgcgagaaattattgaaaaagctgatgaaatgctcagtgaggatgtcagtgtggaaccagagggtgatcagggattggagagtctacaaggaaaggatgactatggcttttcaggttctcagaaattggaaggagagttcaaacaaccaattcctgcgtcttccatgccacagcaaataggcattcctaccagttctttaactcaagttgttcattctgcgggaaggcggtttatagtgagtcctgtgccagaaagccgattacgagaatcaaaagttttccccagtgaaataacagatacagttgctgcctctacagctcagagccctggaatgaacttgtctcactctgcatcatcccttagtctacaacaggccttttctgaacttagacgtgcccaaatgacagaaggacccaacacagcacctccaaactttagtcatacaggaccaacatttccagtagtacctcctttcttaagtagcattgctggagtcccaaccacagcagcagccacagcaccagtccctgcaacaagcagccctcctaatgacatttccacatcagtaattcagtctgaggttacagtgcccactgaagaggggattgctggagttgccaccagcacaggtgtggtaacttcaggtggtctccccataccacctgtgtctgaatcaccagtactttccagcgtagtttcaagtatcacaatacctgcagttgtctcaatatctactacatccccgtcacttcaagtccccacatccacatctgagatcgttgtttctagtacagcactgtatccttcagtaacagtttcagcaacttcagcctctgcagggggcagtactgctaccccaggtcctaagcctccagctgtagtatctcagcaggcagcaggcagcactactgtgggagccacattaacatcagtttctaccaccacttcattcccaagcacagcttcacagctgtccattcagcttagcagcagtacttctactcctactttagctgaaaccgtggtagttagcgcacactcactagataagacatctcatagcagtacaactggattggctttctccctctctgcaccatcttcctcttcctctcctggagcaggagtgtctagttatatttctcagcctggtgggctgcatcctttggtcattccatcagtgatagcttctactcctattcttccccaagcagcaggacctacttctacacctttattaccccaagtacctagtatcccacccttggtacagcctgttgccaatgtgcctgctgtacagcagacactaattcatagtcagcctcaaccagctttgcttcccaaccagccccatactcattgtcctgaagtagattctgatacacaacccaaagctcctggaattgatgacataaagactctagaagaaaagctgcggtctctgttcagtgaacacagctcatctggagctcagcatgcctctgtctcactggagacctcactagtcatagagagcactgtcacaccaggcatcccaactactgctgttgcaccaagcaaactcctgacttctaccacaagtacttgcttaccaccaaccaatttaccactaggaacagttgctttgccagttacaccagtggtcacacctgggcaagtttctaccccagtcagcactactacatcaggagtgaaacctggaactgctccctccaagccacctctaactaaggctccggtgctgccagtgggtactgaacttccagcaggtactctacccagcgagcagctgccaccttttccaggaccttctctaacccagtcccagcaacctctagaggatcttgatgctcaattgagaagaacacttagtccagagatgatcacagtgacttctgcggttggtcctgtgtccatggcggctccaacagcaatcacagaagcaggaacacagcctcagaagggtgtttctcaagtcaaagaaggccctgtcctagcaactagttcaggagctggtgtttttaagatgggacgatttcaggtttctgttgcagcagacggtgcccagaaagagggtaaaaataagtcagaagatgcaaagtctgttcattttgaatccagcacctcagagtcctcagtgctatcaagtagtagtccagagagtaccttggtgaaaccagagccgaatggcataaccatccctggtatctcttcagatgtgccagagagtgcccacaaaactactgcctcagaggcaaagtcagacactgggcagcctaccaaggttggacgttttcaggtgacaactacagcaaacaaagtgggtcgtttctctgtatcaaaaactgaggacaagatcactgacacaaagaaagaaggaccagtggcatctcctccttttatggatttggaacaagctgttcttcctgctgtgataccaaagaaagagaagcctgaactgtcagagccttcacatctaaatgggccgtcttctgacccggaggccgcttttttaagtagggatgtggatgatggttccggtagtccacactcgccccatcagctgagctcaaagagccttcctagccagaatctaagtcaaagccttagtaattcatttaactcctcttacatgagtagcgacaatgagtcagatatcgaagatgaagacttaaagttagagctgcgacgactacgagataaacatctcaaagagattcaggacctgcagagtcgccagaagcatgaaattgaatctttgtataccaaactgggcaaggtgccccctgctgttattattcccccagctgctcccctttcagggagaagacgacgacccactaaaagcaaaggcagcaaatctagtcgaagcagttccttggggaataaaagcccccagctttcaggtaacctgtctggtcagagtgcagcttcagtcttgcacccccagcagaccctccaccctcctggcaacatcccagagtccgggcagaatcagctgttacagccccttaagccatctccctccagtgacaacctctattcagccttcaccagtgatggtgccatttcagtaccaagcctttctgctccaggtcaaggaaccagcagcacaaacactgttggggcaacagtgaacagccaagccgcccaagctcagcctcctgccatgacgtccagcaggaagggcacattcacagatgacttgcacaagttggtagacaaggtagagccgagagacaaggtagagccgagagacaaggtagagccgagagacaaggtagagccgag

SEQ ID NO: 284722 - DNA, 6990 bp, Homo sapiens
ggcgggatccgagcgggctgtgtggaggcttcagactcccggcgccatttagcgcggagagtttcccgggtggacgcggctcctctctcggccactccgcacccccatcttcggtgacagaaggcgcctggtgggggtggctgctcttttctctccctgttccccctcacccagtcctctaggtctcctctcctcttgcctcagagaagcagcggagctcgggccccgcggtgagcggccctcccctccccgccgttccctcctccgtcagcccccggcaccggcccgggaggagacgggtttgccaggcctggggcgggcggggaggcctcggggaagggggggcccgctcctcaggcgccgaggctccgaggctccggcccttcgcctctgggcgatgggcgacctgtgaggccggtccccatcgctgggggcgcgtgtgggaggaggcggccgcccgagtgaccgggagccgggccgcggccttccctcgcccgcctcggcccctcccactcctctgccccggggccgccaccgcccgggcgtcggacctggtcccgtgctcgcggtgccgccgccctctgggcctagcccgcccagctcggcgagcggcggcagtgggagccgcgtccgccgcatccgcctcgactcggtgccggcccctggccctcccctcatgactgcggcgcctctgctgccaccgcccgcccggccgccgctcgccgcaggatggatgcggaccgtgcggcgctaacccccgtggctcagctcccgaatcgcccgccttcgagccctcctcgtgagccgcagcagcctcggtgccagcccccgccgcagctgggcccagcggtccgcctgtccctcgttgcggcttgtcggtgctgagtgaggcgtcgtccgggtcggcgcgaacccgcccggccgcggtgccctgcagacctctgcgcgggcggctcggcccttcacgcccttttcgttcacgaatccgagcccgctcgcctctctccagcgaaccgaccatgtctggcggcgccgcagagaagcagagcagcactcccggttccctgttcctctcgccgccggctcctgcccccaagaatggctccagctccgattcctccgtgggggagaaactgggagccgcggccgccgacgctgtgaccggcaggaccgaggagtacaggcgccgccgccacactatggacaaggacagccgtggggcggccgcgaccactaccaccactgagcaccgcttcttccgccggagcgtcatctgcgactccaatgccactgcactggagcttcccggccttcctctttccctgccccagcccagcatccccgcggctgtcccgcagagtgctccaccggagccccaccgggaagagaccgtgaccgccaccgccacttcccaggtagcccagcagcctccagccgctgccgcccctggggaacaggccgtcgcgggccctgccccctcgactgtccccagcagtaccagcaaagaccgcccagtgtcccagcctagccttgtggggagcaaagaggagccgccgccggcgagaagtggcagcggcggcggcagcgccaaggagccacaggaggaacggagccagcagcaggatgatatcgaagagctggagaccaaggccgtgggaatgtctaacgatggccgctttctcaagtttgacatcgaaatcggcagaggctcctttaagacggtctacaaaggtctggacactgaaaccaccgtggaagtcgcctggtgtgaactgcaggatcgaaaattaacaaagtctgagaggcagagatttaaagaagaagctgaaatgttaaaaggtcttcagcatcccaatattgttagattttatgattcctgggaatccacagtaaaaggaaagaagtgcattgttttggtgactgaacttatgacgtctggaacacttaaaacgtatctgaaaaggtttaaagtgatgaagatcaaagttctaagaagctggtgccgtcagatccttaaaggtcttcagtttcttcatactcgaactccacctatcattcaccgcgatcttaaatgtgacaacatctttatcaccggccctactggctcagtcaagattggagacctcggtctggcaaccctgaagcgggcttcttttgccaagagtgtgataggtaccccagagttcatggcccctgagatgtatgaggagaaatatgatgaatccgttgacgtttatgcttttgggatgtgcatgcttgagatggctacatctgaatatccttactcggagtgccaaaatgctgcgcagatctaccgtcgcgtgaccagtggggtgaagccagccagttttgacaaagtagcaattcctgaagtgaaggaaattattgaaggatgcatacgacaaaacaaagatgaaagatattccatcaaagaccttttgaaccatgccttcttccaagaggaaacaggagtacgggtagaattagcagaagaagatgatggagaaaaaatagccataaaattatggctacgtattgaagatattaagaaattaaagggaaaatacaaagataatgaagctattgagttttcttttgatttagagagagatgtcccagaagatgttgcacaagaaatggtagagtctgggtatgtctgtgaaggtgatcacaagaccatggctaaagctatcaaagacagagtatcattaattaagaggaaacgagagcagcggcagttggtacgggaggagcaagaaaaaaaaaagcaggaagagagcagtctcaaacagcaggtagaacaatccagtgcttcccagacaggaatcaagcagctcccttctgctagcaccggcatacctactgcttctaccacttcagcttcagtttctacacaagtagaacctgaagaacctgaggcagatcaacatcaacaactacagtaccagcaacccagtatatctgtgttatctgatgggacggttgacagtggtcagggatcctctgtcttcacagaatctcgagtgagcagccaacagacagtttcatatggttcccaacatgaacaggcacattctacaggcacagtcccagggcatataccttctactgtccaagcacagtctcagccccatggggtatatccaccctcaagtgtgcagcagggaatacagcagacagcccctcctcaacagacagtgcagtattcactttcacagacatcaacctccagtgaggccactactgcacagccagtgagtcaacctcaagctccacaagtcttgcctcaagtatcagctggaaaacagagtactcagggagtctctcaggttgctcctgcagagccagttgcagtagcacagccccaagctacccagccgaccactttggcttcctctgtagacagtgcacattcagatgttgcttcaggtatgagtgatggcaatgagaacgtcccatcttccagtggaaggcatgaaggaagaactacaaaacggcattaccgaaaatctgtaaggagtcgctctcgacatgaaaaaacttcacgcccaaaattaagaattttgaatgtttcaaataaaggagaccgagtagtagaatgtcaattagagactcataataggaaaatggttacattcaaatttgacctagatggtgacaaccccgaggagatagcaacaattatggtgaacaatgactttattctagcaatagagagagagtcgtttgtggatcaagtgcgagaaattattgaaaaagctgatgaaatgctcagtgaggatgtcagtgtggaaccagagggtgatcagggattggagagtctacaaggaaaggatgactatggcttttcaggttctcagaaattggaaggagagttcaaacaaccaattcctgcgtcttccatgccacagcaaataggcattcctaccagttctttaactcaagttgttcattctgcgggaaggcggtttatagtgagtcctgtgccagaaagccgattacgagaatcaaaagttttccccagtgaaataacagatacagttgctgcctctacagctcagagccctggaatgaacttgtctcactctgcatcatcccttagtctacaacaggccttttctgaacttagacgtgcccaaatgacagaaggacccaacacagcacctccaaactttagtcatacaggaccaacatttccagtagtacctcctttcttaagtagcattgctggagtcccaaccacagcagcagccacagcaccagtccctgcaacaagcagccctcctaatgacatttccacatcagtaattcagtctgaggttacagtgcccactgaagaggggattgctggagttgccaccagcacaggtgtggtaacttcaggtggtctccccataccacctgtgtctgaatcaccagtactttccagcgtagtttcaagtatcacaatacctgcagttgtctcaatatctactacatccccgtcacttcaagtccccacatccacatctgagatcgttgtttctagtacagcactgtatccttcagtaacagtttcagcaacttcagcctctgcagggggcagtactgctaccccaggtcctaagcctccagctgtagtatctcagcaggcagcaggcagcactactgtgggagccacattaacatcagtttctaccaccacttcattcccaagcacagcttcacagctgtccattcagcttagcagcagtacttctactcctactttagctgaaaccgtggtagttagcgcacactcactagataagacatctcatagcagtacaactggattggctttctccctctctgcaccatcttcctcttcctctcctggagcaggagtgtctagttatatttctcagcctggtgggctgcatcctttggtcattccatcagtgatagcttctactcctattcttccccaagcagcaggacctacttctacacctttattaccccaagtacctagtatcccacccttggtacagcctgttgccaatgtgcctgctgtacagcagacactaattcatagtcagcctcaaccagctttgcttcccaaccagccccatactcattgtcctgaagtagattctgatacacaacccaaagctcctggaattgatgacataaagactctagaagaaaagctgcggtctctgttcagtgaacacagctcatctggagctcagcatgcctctgtctcactggagacctcactagtcatagagagcactgtcacaccaggcatcccaactactgctgttgcaccaagcaaactcctgacttctaccacaagtacttgcttaccaccaaccaatttaccactaggaacagttgctttgccagttacaccagtggtcacacctgggcaagtttctaccccagtcagcactactacatcaggagtgaaacctggaactgctccctccaagccacctctaactaaggctccggtgctgccagtgggtactgaacttccagcaggtactctacccagcgagcagctgccaccttttccaggaccttctctaacccagtcccagcaacctctagaggatcttgatgctcaattgagaagaacacttagtccagagatgatcacagtgacttctgcggttggtcctgtgtccatggcggctccaacagcaatcacagaagcaggaacacagcctcagaagggtgtttctcaagtcaaagaaggccctgtcctagcaactagttcaggagctggtgtttttaagatgggacgatttcaggtttctgttgcagcagacggtgcccagaaagagggtaaaaataagtcagaagatgcaaagtctgttcattttgaatccagcacctcagagtcctcagtgctatcaagtagtagtccagagagtaccttggtgaaaccagagccgaatggcataaccatccctggtatctcttcagatgtgccagagagtgcccacaaaactactgcctcagaggcaaagtcagacactgggcagcctaccaaggttggacgttttcaggtgacaactacagcaaacaaagtgggtcgtttctctgtatcaaaaactgaggacaagatcactgacacaaagaaagaaggaccagtggcatctcctccttttatggatttggaacaagctgttcttcctgctgtgataccaaagaaagagaagcctgaactgtcagagccttcacatctaaatgggccgtcttctgacccggaggccgcttttttaagtagggatgtggatgatggttccggtagtccacactcgccccatcagctgagctcaaagagccttcctagccagaatctaagtcaaagccttagtaattcatttaactcctcttacatgagtagcgacaatgagtcagatatcgaagatgaagacttaaagttagagctgcgacgactacgagataaacatctcaaagagattcaggacctgcagagtcgccagaagcatgaaattgaatctttgtataccaaactgggcaaggtgccccctgctgttattattcccccagctgctcccctttcagggagaagacgacgacccactaaaagcaaaggcagcaaatctagtcgaagcagttccttggggaataaaagcccccagctttcaggaaccagcagcacaaacactgttggggcaacagtgaacagccaagccgcccaagctcagcctcctgccatgacgtccagcaggaagggcacattcacagatgacttgcacaagttggtagacaattgggcccgagatgccatgaatctctcaggcaggagaggaagcaaagggcacatgaattatgagggccctggaatggcaaggaagttctctgcacctgggcaactgtgcatctccatgacctcgaacctgggtggctctgcccccatctctgcagcatcagctacctctctaggtcacttcaccaagtctatgtgcccccgccctccacgcgccgggcgcg

SEQ ID NO: 284723 - DNA, 2316 bp, Homo sapiens
tactactactaaattcgcggctgcgtcgacatgccctgaatccctcactccctcaagaatccgaaccacaggacaaaaaccacctactgggctctctcctaccctgccctcctcccttttttttacccctctcttttttattttttctttgctctttagaacccagtgaaaaataccagggtactggggtgcaactctttcttatgataggtcattagtgctttaagcaaaagatattagcagctttgactgcagcattagcaattaggaaaaaaaaaaaattaagttccctgcggacatgtaactttgccatcagttttgatgtggaaacactgtgatatataaaatgttgttggacaacagtagttttaagagtaaaatatgaaacgtttaaaaagttccaaaaaaagctagctctgtcctttacttattgagacactttaactttttcctttgtatttccattgtattagataaataaatgtgaatgtaaaattgtataaattactgtacttgaatacttctgtttcccagtgttgcttgctggacattttagtgccttggacttctattgcttctgccattagcatcaacttaccagaccccagatcaataaagggcatgtggaaggaaatcgtaggtccatgtgaccccagcagtccagcagtggttatgccaaagggaaattgaaaaagtatttttttaagtcattcaacaactttgtctagagcaggtgtaagatgagtagggtgggaagttaggttggcatcagtggttaaaaacagaaagttctgtttcgggaatagtgaggagggggtgttgtaacaaaattggacaacttaaaagaatggtgtgtgctgggtgaaagacaaagactaaagaatgaggaaacaaacgtgatgcctggccagtgactgtcatataaacctttcttatttgagctaggcttgaacagacgtgacctagaagaaactgaacataaagagaagggggtggggggctagttttcaagttggggaacctgatagtgaaaagtcacagatggagaaaattgctctcagaaaaactgtttggattgctttcctcttgttgcacatgtaccatgcatttctcagcttggggtactacattttgtggaaagttaatctatcatctatctttccacatctgaattaatcattctaggaaagaatacttattcctactcatttcctttatgatgtccaaatggttgcaggatcataatctattgtgccacctttatttctagaagtacaactaatatgttcacattttcaaataaataatactccccgtaagtaataactgcaaccaatcagtgttattcagtgctatgcctccttgtaatgggtagttattaattattttcagagctttccggaaatactgtcctaactggctatgtttaggatctttgttatctctgaagacaaagaaagaagctaggactcttaattttggggtgcttcttgactcttagttgggaaactgaaaatatttccaaccttttacccacgtcaatggcatattctgggaatcaccaccaccaccaccactaccacagaaagaggctggaggctcctgtaccctgttcattccttaagggccctgcttcccttaataagtaagtaagttggtctacggccctaaatatgcaaatgagagctgaaggtttttaaaaggtagaaaggaaaagggcaagggcttccacccctgctttaaaatgatttatttattctctgcttgtatttcttgtggagagagtaaggatagaaccaacaaggggctgagtagctgagaaaggggccacccaagagtgaaacatactttataccagaggagcagtggagcctcatgcagcacattatcatttgttatttgggtttaataataattttgacatcttttcactcatacacaaaaaaagtcagaactggtgttatttactgttgatttcatcctcctgtgtatgaaataacaagcctagaggaatgaactagtgctactgaactgtttaaattatttttgtgttaatagtacactttgagtatctttttccacattaaaaactttctgaattataaatgttttccttacattatttaacaatgtacactgttaaaaataaaaataaaaattcaaactttgggggtttctcagcagccgttaattgtacattttgcactaactctgggtgttgcgcttcttgtaagattgcgctttgtgcttcagtttgttacctttgtagacttatttaatgaaaccattcaaataaaccaaacttgcttttgttga

SEQ ID NO: 284724 - DNA, 2302 bp, Homo sapiens
gtttgtttgtttttgagacagagtcttactctgtcacccaggctggagtgcagtggcgacaaaaaccacctactgggctctctcctaccctgccctcctcccttttttttacccctctcttttttattttttctttgctctttagaacccagtgaaaaataccagggtactggggtgcaactctttcttatgataggtcattagtgctttaagcaaaagatattagcagctttgactgcagcattagcaattaggaaaaaaaaaaaattaagttccctgcggacatgtaactttgccatcagttttgatgtggaaacactgtgatatataaaatgttgttggacaacagtagttttaagagtaaaatatgaaacgtttaaaaagttccaaaaaaagctagctctgtcctttacttattgagacactttaactttttcctttgtatttccattgtattagataaataaatgtgaatgtaaaattgtataaattactgtacttgaatacttctgtttcccagtgttgcttgctggacattttagtgccttggacttctattgcttctgccattagcatcaacttaccagaccccagatcaataaagggcatgtggaaggaaatcgtaggtccatgtgaccccagcagtccagcagtggttatgccaaagggaaattgaaaaagtatttttttaagtcattcaacaactttgtctagagcaggtgtaagatgagtagggtgggaagttaggttggcatcagtggttaaaaacagaaagttctgtttcgggaatagtgaggagggggtgttgtaacaaaattggacaacttaaaagaatggtgtgtgctgggtgaaagacaaagactaaagaatgaggaaacaaacgtgatgcctggccagtgactgtcatataaacctttcttatttgagctaggcttgaacagacgtgacctagaagaaactgaacataaagagaagggggtggggggctagttttcaagttggggaacctgatagtgaaaagtcacagatggagaaaattgctctcagaaaaactgtttggattgctttcctcttgttgcacatgtaccatgcatttctcagcttggggtactacattttgtggaaagttaatctatcatctatctttccacatctgaattaatcattctaggaaagaatacttattcctactcatttcctttatgatgtccaaatggttgcaggatcataatctattgtgccacctttatttctagaagtacaactaatatgttcacattttcaaataaataatactccccgtaagtaataactgcaaccaatcagtgttattcagtgctatgcctccttgtaatgggtagttattaattattttcagagctttccggaaatactgtcctaactggctatgtttaggatctttgttatctctgaagacaaagaaagaagctaggactcttaattttggggtgcttcttgactcttagttgggaaactgaaaatatttccaaccttttacccacgtcaatggcatattctgggaatcaccaccaccaccaccactaccacagaaagaggctggaggctcctgtaccctgttcattccttaagggccctgcttcccttaataagtaagtaagttggtctacggccctaaatatgcaaatgagagctgaaggtttttaaaaggtagaaaggaaaagggcaagggcttccacccctgctttaaaatgatttatttattctctgcttgtatttcttgtggagagagtaaggatagaaccaacaaggggctgagtagctgagaaaggggccacccaagagtgaaacatactttataccagaggagcagtggagcctcatgcagcacattatcatttgttatttgggtttaataataattttgacatcttttcactcatacacaaaaaaagtcagaactggtgttatttactgttgatttcatcctcctgtgtatgaaataacaagcctagaggaatgaactagtgctactgaactgtttaaattatttttgtgttaatagtacactttgagtatctttttccacattaaaaactttctgaattataaatgttttccttacattatttaacaatgtacactgttaaaaataaaaataaaaattcaaactttgggggtttctcagcagccgttaattgtacattttgcactaactctgggtgttgcgcttcttgtaagattgcgctttgtgcttcagtttgttacctttgtagacttatttaatgaaaccattcaaataaaccaaacttgcttttgttga

SEQ ID NO: 284725 - DNA, 5336 bp, Homo sapiens
ggcgggatccgagcgggctgtgtggaggcttcagactcccggcgccatttagcgcggagagtttcccgggtggacgcggctcctctctcggccactccgcacccccatcttcggtgacagaaggcgcctggtgggggtggctgctcttttctctccctgttccccctcacccagtcctctaggtctcctctcctcttgcctcagagaagcagcggagctcgggccccgcggtgagcggccctcccctccccgccgttccctcctccgtcagcccccggcaccggcccgggaggagacgggtttgccaggcctggggcgggcggggaggcctcggggaagggggggcccgctcctcaggcgccgaggctccgaggctccggcccttcgcctctgggcgatgggcgacctgtgaggccggtccccatcgctgggggcgcgtgtgggaggaggcggccgcccgagtgaccgggagccgggccgcggccttccctcgcccgcctcggcccctcccactcctctgccccggggccgccaccgcccgggcgtcggacctggtcccgtgctcgcggtgccgccgccctctgggcctagcccgcccagctcggcgagcggcggcagtgggagccgcgtccgccgcatccgcctcgactcggtgccggcccctggccctcccctcatgactgcggcgcctctgctgccaccgcccgcccggccgccgctcgccgcaggatggatgcggaccgtgcggcgctaacccccgtggctcagctcccgaatcgcccgccttcgagccctcctcgtgagccgcagcagcctcggtgccagcccccgccgcagctgggcccagcggtccgcctgtccctcgttgcggcttgtcggtgctgagtgaggcgtcgtccgggtcggcgcgaacccgcccggccgcggtgccctgcagacctctgcgcgggcggctcggcccttcacgcccttttcgttcacgaatccgagcccgctcgcctctctccagcgaaccgaccatgtctggcggcgccgcagagaagcagagcagcactcccggttccctgttcctctcgccgccggctcctgcccccaagaatggctccagctccgattcctccgtgggggagaaactgggagccgcggccgccgacgctgtgaccggcaggaccgaggagtacaggcgccgccgccacactatggacaaggacagccgtggggcggccgcgaccactaccaccactgagcaccgcttcttccgccggagcgtcatctgcgactccaatgccactgcactggagcttcccggccttcctctttccctgccccagcccagcatccccgcggctgtcccgcagagtgctccaccggagccccaccgggaagagaccgtgaccgccaccgccacttcccaggtagcccagcagcctccagccgctgccgcccctggggaacaggccgtcgcgggccctgccccctcgactgtccccagcagtaccagcaaagaccgcccagtgtcccagcctagccttgtggggagcaaagaggagccgccgccggcgagaagtggcagcggcggcggcagcgccaaggagccacaggaggaacggagccagcagcaggatgatatcgaagagctggagaccaaggccgtgggaatgtctaacgatggccgctttctcaagtttgacatcgaaatcggcagaggctcctttaagacggtctacaaaggtctggacactgaaaccaccgtggaagtcgcctggtgtgaactgcaggatcgaaaattaacaaagtctgagaggcagagatttaaagaagaagctgaaatgttaaaaggtcttcagcatcccaatattgttagattttatgattcctgggaatccacagtaaaaggaaagaagtgcattgttttggtgactgaacttatgacgtctggaacacttaaaacgtatctgaaaaggtttaaagtgatgaagatcaaagttctaagaagctggtgccgtcagatccttaaaggtcttcagtttcttcatactcgaactccacctatcattcaccgcgatcttaaatgtgacaacatctttatcaccggccctactggctcagtcaagattggagacctcggtctggcaaccctgaagcgggcttcttttgccaagagtgtgataggtaccccagagttcatggcccctgagatgtatgaggagaaatatgatgaatccgttgacgtttatgcttttgggatgtgcatgcttgagatggctacatctgaatatccttactcggagtgccaaaatgctgcgcagatctaccgtcgcgtgaccagtggggtgaagccagccagttttgacaaagtagcaattcctgaagtgaaggaaattattgaaggatgcatacgacaaaacaaagatgaaagatattccatcaaagaccttttgaaccatgccttcttccaagaggaaacaggagtacgggtagaattagcagaagaagatgatggagaaaaaatagccataaaattatggctacgtattgaagatattaagaaattaaagggaaaatacaaagataatgaagctattgagttttcttttgatttagagagagatgtcccagaagatgttgcacaagaaatggtagagtctgggtatgtctgtgaaggtgatcacaagaccatggctaaagctatcaaagacagagtatcattaattaagaggaaacgagagcagcggcagttggtacgggaggagcaagaaaaaaaaaagcaggaagagagcagtctcaaacagcaggtagaacaatccagtgcttcccagacaggaatcaagcagctcccttctgctagcaccggcatacctactgcttctaccacttcagcttcagtttctacacaagtagaacctgaagaacctgaggcagatcaacatcaacaactacagtaccagcaacccagtatatctgtgttatctgatgggacggttgacagtggtcagggatcctctgtcttcacagaatctcgagtgagcagccaacagacagtttcatatggttcccaacatgaacaggcacattctacaggcacagtcccagggcatataccttctactgtccaagcacagtctcagccccatggggtatatccaccctcaagtgtgcagcagggaatacagcagacagcccctcctcaacagacagtgcagtattcactttcacagacatcaacctccagtgaggccactactgcacagccagtgagtcaacctcaagctccacaagtcttgcctcaagtatcagctggaaaacagagtactcagggagtctctcaggttgctcctgcagagccagttgcagtagcacagccccaagctacccagccgaccactttggcttcctctgtagacagtgcacattcagatgttgcttcaggtatgagtgatggcaatgagaacgtcccatcttccagtggaaggcatgaaggaagaactacaaaacggcattaccgaaaatctgtaaggagtcgctctcgacatgaaaaaacttcacgcccaaaattaagaattttgaatgtttcaaataaaggagaccgagtagtagaatgtcaattagagactcataataggaaaatggttacattcaaatttgacctagatggtgacaaccccgaggagatagcaacaattatggtgaacaatgactttattctagcaatagagagagagtcgtttgtggatcaagtgcgagaaattattgaaaaagctgatgaaatgctcagtgaggatgtcagtgtggaaccagagggtgatcagggattggagagtctacaaggaaaggatgactatggcttttcaggttctcagaaattggaaggagagttcaaacaaccaattcctgcgtcttccatgccacagcaaataggcattcctaccagttctttaactcaagttgttcattctgcgggaaggcggtttatagtgagtcctgtgccagaaagccgattacgagaatcaaaagttttccccagtgaaataacagatacagttgctgcctctacagctcagagccctggaatgaacttgtctcactctgcatcatcccttagtctacaacaggccttttctgaacttagacgtgcccaaatgacagaaggacccaacacagcacctccaaactttagtcatacaggaccaacatttccagtagtacctcctttcttaagtagcattgctggagtcccaaccacagcagcagccacagcaccagtccctgcaacaagcagccctcctaatgacatttccacatcagtaattcagtctgaggttacagtgcccactgaagaggggattgctggagttgccaccagcacaggtgtggtaacttcaggtggtctccccataccacctgtgtctgaatcaccagtactttccagcgtagtttcaagtatcacaatacctgcagttgtctcaatatctactacatccccgtcacttcaagtccccacatccacatctgagatcgttgtttctagtacagcactgtatccttcagtaacagtttcagcaacttcagcctctgcagggggcagtactgctaccccaggtcctaagcctccagctgtagtatctcagcaggcagcaggcagcactactgtgggagccacattaacatcagtttctaccaccacttcattcccaagcacagcttcacagctgtccattcagcttagcagcagtacttctactcctactttagctgaaaccgtggtagttagcgcacactcactagataagacatctcatagcagtacaactggattggctttctccctctctgcaccatcttcctcttcctctcctggagcaggagtgtctagttatatttctcagcctggtgggctgcatcctttggtcattccatcagtgatagcttctactcctattcttccccaagcagcaggacctacttctacacctttattaccccaagtacctagtatcccacccttggtacagcctgttgccaatgtgcctgctgtacagcagacactaattcatagtcagcctcaaccagctttgcttcccaaccagccccatactcattgtcctgaagtagattctgatacacaacccaaagctcctggaattgatgacataaagactctagaagaaaagctgcggtctctgttcagtgaacacagctcatctggagctcagcatgcctctgtctcactggagacctcactagtcatagagagcactgtcacaccaggcatcccaactactgctgttgcaccaagcaaactcctgacttctacccggtgcaaaacgggcccagtc

SEQ ID NO: 284726 - DNA, 1728 bp, Homo sapiens
cgcggccccagtgtagactaatcaataaagggcatgtggaaggaaatcgtaggtccatgtgaccccagcagtccagcagtggttatgccaaagggaaattgaaaaagtatttttttaagtcattcaacaactttgtctagagcaggtgtaagatgagtagggtgggaagttaggttggcatcagtggttaaaaacagaaagttctgtttcgggaatagtgaggagggggtgttgtaacaaaattggacaacttaaaagaatggtgtgtgctgggtgaaagacaaagactaaagaatgaggaaacaaacgtgatgcctggccagtgactgtcatataaacctttcttatttgagctaggcttgaacagacgtgacctagaagaaactgaacataaagagaagggggtggggggctagttttcaagttggggaacctgatagtgaaaagtcacagatggagaaaattgctctcagaaaaactgtttggattgctttcctcttgttgcacatgtaccatgcatttctcagcttggggtactacattttgtggaaagttaatctatcatctatctttccacatctgaattaatcattctaggaaagaatacttattcctactcatttcctttatgatgtccaaatggttgcaggatcataatctattgtgccacctttatttctagaagtacaactaatatgttcacattttcaaataaataatactccccgtaagtaataactgcaaccaatcagtgttattcagtgctatgcctccttgtaatgggtagttattaattattttcagagctttccggaaatactgtcctaactggctatgtttaggatctttgttatctctgaagacaaagaaagaagctaggactcttaattttggggtgcttcttgactcttagttgggaaactgaaaatatttccaaccttttacccacgtcaatggcatattctgggaatcaccaccaccaccaccactaccacagaaagaggctggaggctcctgtaccctgttcattccttaagggccctgcttcccttaataagtaagtaagttggtctacggccctaaatatgcaaatgagagctgaaggtttttaaaaggtagaaaggaaaagggcaagggcttccacccctgctttaaaatgatttatttattctctgcttgtatttcttgtggagagagtaaggatagaaccaacaaggggctgagtagctgagaaaggggccacccaagagtgaaacatactttataccagaggagcagtggagcctcatgcagcacattatcatttgttatttgggtttaataataattttgacatcttttcactcatacacaaaaaaagtcagaactggtgttatttactgttgatttcatcctcctgtgtatgaaataacaagcctagaggaatgaactagtgctactgaactgtttaaattatttttgtgttaatagtacactttgagtatctttttccacattaaaaactttctgaattataaatgttttccttacattatttaacaatgtacactgttaaaaataaaaataaaaattcaaactttgggggtttctcagcagccgttaattgtacattttgcactaactctgggtgttgcgcttcttgtaagattgcgctttgtgcttcagtttgttacctttgtagacttatttaatgaaaccattcaaataaaccaaacttgcttttgttga

SEQ ID NO: 284727 - DNA, 1580 bp, Homo sapiens
gattatagaggatcccctgcaaacggttggcatcagtggttaaaaacagaaagttctgtttcgggaatagtgaggagggggtgttgtaacaaaattggacaacttaaaagaatggtgtgtgctgggtgaaagacaaagactaaagaatgaggaaacaaacgtgatgcctggccagtgactgtcatataaacctttcttatttgagctaggcttgaacagacgtgacctagaagaaactgaacataaagagaagggggtggggggctagttttcaagttggggaacctgatagtgaaaagtcacagatggagaaaattgctctcagaaaaactgtttggattgctttcctcttgttgcacatgtaccatgcatttctcagcttggggtactacattttgtggaaagttaatctatcatctatctttccacatctgaattaatcattctaggaaagaatacttattcctactcatttcctttatgatgtccaaatggttgcaggatcataatctattgtgccacctttatttctagaagtacaactaatatgttcacattttcaaataaataatactccccgtaagtaataactgcaaccaatcagtgttattcagtgctatgcctccttgtaatgggtagttattaattattttcagagctttccggaaatactgtcctaactggctatgtttaggatctttgttatctctgaagacaaagaaagaagctaggactcttaattttggggtgcttcttgactcttagttgggaaactgaaaatatttccaaccttttacccacgtcaatggcatattctgggaatcaccaccaccaccaccactaccacagaaagaggctggaggctcctgtaccctgttcattccttaagggccctgcttcccttaataagtaagtaagttggtctacggccctaaatatgcaaatgagagctgaaggtttttaaaaggtagaaaggaaaagggcaagggcttccacccctgctttaaaatgatttatttattctctgcttgtatttcttgtggagagagtaaggatagaaccaacaaggggctgagtagctgagaaaggggccacccaagagtgaaacatactttataccagaggagcagtggagcctcatgcagcacattatcatttgttatttgggtttaataataattttgacatcttttcactcatacacaaaaaaagtcagaactggtgttatttactgttgatttcatcctcctgtgtatgaaataacaagcctagaggaatgaactagtgctactgaactgtttaaattatttttgtgttaatagtacactttgagtatctttttccacattaaaaactttctgaattataaatgttttccttacattatttaacaatgtacactgttaaaaataaaaataaaaattcaaactttgggggtttctcagcagccgttaattgtacattttgcactaactctgggtgttgcgcttcttgtaagattgcgctttgtgcttcagtttgttacctttgtagacttatttaatgaaaccattcaaataaaccaaacttgcttttgttga

SEQ ID NO: 284728 - DNA, 3969 bp, Homo sapiens
ggcgggatccgagcgggctgtgtggaggcttcagactcccggcgccatttagcgcggagagtttcccgggtggacgcggctcctctctcggccactccgcacccccatcttcggtgacagaaggcgcctggtgggggtggctgctcttttctctccctgttccccctcacccagtcctctaggtctcctctcctcttgcctcagagaagcagcggagctcgggccccgcggtgagcggccctcccctccccgccgttccctcctccgtcagcccccggcaccggcccgggaggagacgggtttgccaggcctggggcgggcggggaggcctcggggaagggggggcccgctcctcaggcgccgaggctccgaggctccggcccttcgcctctgggcgatgggcgacctgtgaggccggtccccatcgctgggggcgcgtgtgggaggaggcggccgcccgagtgaccgggagccgggccgcggccttccctcgcccgcctcggcccctcccactcctctgccccggggccgccaccgcccgggcgtcggacctggtcccgtgctcgcggtgccgccgccctctgggcctagcccgcccagctcggcgagcggcggcagtgggagccgcgtccgccgcatccgcctcgactcggtgccggcccctggccctcccctcatgactgcggcgcctctgctgccaccgcccgcccggccgccgctcgccgcaggatggatgcggaccgtgcggcgctaacccccgtggctcagctcccgaatcgcccgccttcgagccctcctcgtgagccgcagcagcctcggtgccagcccccgccgcagctgggcccagcggtccgcctgtccctcgttgcggcttgtcggtgctgagtgaggcgtcgtccgggtcggcgcgaacccgcccggccgcggtgccctgcagacctctgcgcgggcggctcggcccttcacgcccttttcgttcacgaatccgagcccgctcgcctctctccagcgaaccgaccatgtctggcggcgccgcagagaagcagagcagcactcccggttccctgttcctctcgccgccggctcctgcccccaagaatggctccagctccgattcctccgtgggggagaaactgggagccgcggccgccgacgctgtgaccggcaggaccgaggagtacaggcgccgccgccacactatggacaaggacagccgtggggcggccgcgaccactaccaccactgagcaccgcttcttccgccggagcgtcatctgcgactccaatgccactgcactggagcttcccggccttcctctttccctgccccagcccagcatccccgcggctgtcccgcagagtgctccaccggagccccaccgggaagagaccgtgaccgccaccgccacttcccaggtagcccagcagcctccagccgctgccgcccctggggaacaggccgtcgcgggccctgccccctcgactgtccccagcagtaccagcaaagaccgcccagtgtcccagcctagccttgtggggagcaaagaggagccgccgccggcgagaagtggcagcggcggcggcagcgccaaggagccacaggaggaacggagccagcagcaggatgatatcgaagagctggagaccaaggccgtgggaatgtctaacgatggccgctttctcaagtttgacatcgaaatcggcagaggctcctttaagacggtctacaaaggtctggacactgaaaccaccgtggaagtcgcctggtgtgaactgcaggatcgaaaattaacaaagtctgagaggcagagatttaaagaagaagctgaaatgttaaaaggtcttcagcatcccaatattgttagattttatgattcctgggaatccacagtaaaaggaaagaagtgcattgttttggtgactgaacttatgacgtctggaacacttaaaacgtatctgaaaaggtttaaagtgatgaagatcaaagttctaagaagctggtgccgtcagatccttaaaggtcttcagtttcttcatactcgaactccacctatcattcaccgcgatcttaaatgtgacaacatctttatcaccggccctactggctcagtcaagattggagacctcggtctggcaaccctgaagcgggcttcttttgccaagagtgtgataggtaccccagagttcatggcccctgagatgtatgaggagaaatatgatgaatccgttgacgtttatgcttttgggatgtgcatgcttgagatggctacatctgaatatccttactcggagtgccaaaatgctgcgcagatctaccgtcgcgtgaccagtggggtgaagccagccagttttgacaaagtagcaattcctgaagtgaaggaaattattgaaggatgcatacgacaaaacaaagatgaaagatattccatcaaagaccttttgaaccatgccttcttccaagaggaaacaggagtacgggtagaattagcagaagaagatgatggagaaaaaatagccataaaattatggctacgtattgaagatattaagaaattaaagggaaaatacaaagataatgaagctattgagttttcttttgatttagagagagatgtcccagaagatgttgcacaagaaatggtagagtctgggtatgtctgtgaaggtgatcacaagaccatggctaaagctatcaaagacagagtatcattaattaagaggaaacgagagcagcggcagttggtacgggaggagcaagaaaaaaaaaagcaggaagagagcagtctcaaacagcaggtagaacaatccagtgcttcccagacaggaatcaagcagctcccttctgctagcaccggcatacctactgcttctaccacttcagcttcagtttctacacaagtagaacctgaagaacctgaggcagatcaacatcaacaactacagtaccagcaacccagtatatctgtgttatctgatgggacggttgacagtggtcagggatcctctgtcttcacagaatctcgagtgagcagccaacagacagtttcatatggttcccaacatgaacaggcacattctacaggcacagtcccagggcatataccttctactgtccaagcacagtctcagccccatggggtatatccaccctcaagtgtgcagcagggaatacagcagacagcccctcctcaacagacagtgcagtattcactttcacagacatcaacctccagtgaggccactactgcacagccagtgagtcaacctcaagctccacaagtcttgcctcaagtatcagctggaaaacagagtactcagggagtctctcaggttgctcctgcagagccagttgcagtagcacagccccaagctacccagccgaccactttggcttcctctgtagacagtgcacattcagatgttgcttcaggtatgagtgatggcaatgagaacgtcccatcttccagtggaaggcatgaaggaagaactacaaaacggcattaccgaaaatctgtaaggagtcgctctcgacatgaaaaaacttcacgcccaaaattaagaattttgaatgtttcaaataaaggagaccgagtagtagaatgtcaattagagactcataataggaaaatggttacattcaaatttgacctagatggtgacaaccccgaggagatagcaacaattatggtgaacaatgactttattctagcaatagagagagagtcgtttgtggatcaagtgcgagaaattattgaaaaagctgatgaaatgctcagtgaggatgtcagtgtggaaccagagggtgatcagggattggagagtctacaaggaaaggatgactatggcttttcaggttctcagaaattggaaggagagttcaaacaaccaattcctgcgtcttccatgccacagcaaataggcatccctaccagttcatctcctccgttgactacaacccctaacacggata

SEQ ID NO: 284729 - DNA, 2418 bp, Homo sapiens
ggcgggatccgagcgggctgtgtggaggcttcagactcccggcgccatttagcgcggagagtttcccgggtggacgcggctcctctctcggccactccgcacccccatcttcggtgacagaaggcgcctggtgggggtggctgctcttttctctccctgttccccctcacccagtcctctaggtctcctctcctcttgcctcagagaagcagcggagctcgggccccgcggtgagcggccctcccctccccgccgttccctcctccgtcagcccccggcaccggcccgggaggagacgggtttgccaggcctggggcgggcggggaggcctcggggaagggggggcccgctcctcaggcgccgaggctccgaggctccggcccttcgcctctgggcgatgggcgacctgtgaggccggtccccatcgctgggggcgcgtgtgggaggaggcggccgcccgagtgaccgggagccgggccgcggccttccctcgcccgcctcggcccctcccactcctctgccccggggccgccaccgcccgggcgtcggacctggtcccgtgctcgcggtgccgccgccctctgggcctagcccgcccagctcggcgagcggcggcagtgggagccgcgtccgccgcatccgcctcgactcggtgccggcccctggccctcccctcatgactgcggcgcctctgctgccaccgcccgcccggccgccgctcgccgcaggatggatgcggaccgtgcggcgctaacccccgtggctcagctcccgaatcgcccgccttcgagccctcctcgtgagccgcagcagcctcggtgccagcccccgccgcagctgggcccagcggtccgcctgtccctcgttgcggcttgtcggtgctgagtgaggcgtcgtccgggtcggcgcgaacccgcccggccgcggtgccctgcagacctctgcgcgggcggctcggcccttcacgcccttttcgttcacgaatccgagcccgctcgcctctctccagcgaaccgaccatgtctggcggcgccgcagagaagcagagcagcactcccggttccctgttcctctcgccgccggctcctgcccccaagaatggctccagctccgattcctccgtgggggagaaactgggagccgcggccgccgacgctgtgaccggcaggaccgaggagtacaggcgccgccgccacactatggacaaggacagccgtggggcggccgcgaccactaccaccactgagcaccgcttcttccgccggagcgtcatctgcgactccaatgccactgcactggagcttcccggccttcctctttccctgccccagcccagcatccccgcggctgtcccgcagagtgctccaccggagccccaccgggaagagaccgtgaccgccaccgccacttcccaggtagcccagcagcctccagccgctgccgcccctggggaacaggccgtcgcgggccctgccccctcgactgtccccagcagtaccagcaaagaccgcccagtgtcccagcctagccttgtggggagcaaagaggagccgccgccggcgagaagtggcagcggcggcggcagcgccaaggagccacaggaggaacggagccagcagcaggatgatatcgaagagctggagaccaaggccgtgggaatgtctaacgatggccgctttctcaagtttgacatcgaaatcggcagaggctcctttaagacggtctacaaaggtctggacactgaaaccaccgtggaagtcgcctggtgtgaactgcaggatcgaaaattaacaaagtctgagaggcagagatttaaagaagaagctgaaatgttaaaaggtcttcagcatcccaatattgttagattttatgattcctgggaatccacagtaaaaggaaagaagtgcattgttttggtgactgaacttatgacgtctggaacacttaaaacgtatctgaaaaggtttaaagtgatgaagatcaaagttctaagaagctggtgccgtcagatccttaaaggtcttcagtttcttcatactcgaactccacctatcattcaccgcgatcttaaatgtgacaacatctttatcaccggccctactggctcagtcaagattggagacctcggtctggcaaccctgaagcgggcttcttttgccaagagtgtgataggtatgtttcaggtgtaccttggagcctgactggctttctgacattccttttatttagaatcctggctctgtcagagttttaagtgatataaaccttaagaaattcatagcttgaactcaggaggtgatccattgtacttatgagatataggattctctatatttgtgcttcttggaatcatcttagagactattggtaacattacgttacaagaaataaagtgaactttgttgataaaacctaatg

SEQ ID NO: 284730 - DNA, 568 bp, Homo sapiens
atgctgcggtcgttctagaggatcccgtgtgtacgagataggatagaaccaacaaggggctgagtagctgagaaaggggccacccaagagtgaaacatactttataccagaggagcagtggagcctcatgcagcacattatcatttgttatttgggtttaataataattttgacatcttttcactcatacacaaaaaaagtcagaactggtgttatttactgttgatttcatcctcctgtgtatgaaataacaagcctagaggaatgaactagtgctactgaactgtttaaattatttttgtgttaatagtacactttgagtatctttttccacattaaaaactttctgaattataaatgttttccttacattatttaacaatgtacactgttaaaaataaaaataaaaattcaaactttgggggtttctcagcagccgttaattgtacattttgcactaactctgggtgttgcgcttcttgtaagattgcgctttgtgcttcagtttgttacctttgtagacttatttaatgaaaccattcaaataaaccaaacttgcttttgttga

SEQ ID NO: 284731 - DNA, 309 bp, Homo sapiens
ggagcaagaaaaaaaaaagcaggaagagagcagtctcaaacagcaggtagaacaatccagtgcttcccagacaggaatcaagcagctcccttctgctagcaccggcatacctactgcttctaccacttcagcttcagtttctacacaagtagaacctgaagaacctgaggcagatcaacatcaacaactacagtaccagcaacccagtatatctgtgttatgtacgtatcttgggaagtggacagataggctaatgattctcctaattggtttttttagcttcttgttattttgcactggctttttggt

SEQ ID NO: 284732 - DNA, 519 bp, Homo sapiens
gtaaattctacagtgcctctgctatgttgaaagcttaatcataaagcagtaatttatgatgacacagataataaaaaagaatagaaaactgaagttataaccaacagataaacatatgggagagggaaatagatgaagaatacagagaattacagaaaaagccaagaagcacggccataccaagatatagtctgtataatagatattgtagtatgtgtttatttctgcacttagtactgttgtctatgttttaagattactccatattttttatcaaaaacagatatttataggagctgacttaggctagcagacaatcttttgaatccatccttttaaaatcagctgattcttatctttttgtattcctttgcagttgctgcctctacagctcagagccctggaatgaacttgtctcactctgcatcatcccttagtctacaacaggccttttctgaacttagacgtgcccaaatgacagaaggacccaacacagcacctccaaactttagtcataca

SEQ ID NO: 284733 - DNA, 524 bp, Homo sapiens
atttgctattaatttaagaccttagtctgaggttgtttagcctccccagttactctctggccttcaagctcttttcattgttagagattactgtgatactgggggagaagggtacaagtaaacttaaaaggagtgtcaagttatcagactttgtaaagatgttgaagttttaaatgggaaagcccttttgagctttgctgtaaagccgctgtattgtgctctctttcaggtgggatgtgtgtgggctgaaattccgagctgcggttgtgcatgagaatacacccttcgtggtaccccatctccgggacgttctcggctctgtgcgttcagtccctcaggaaccgtggaccttaatttaccttgctaagttcagaccttctcttcctttcctttcctttcctctcctgcccattttcctgttcttctgtccttcaatacttctgtagcttcccattcatgttctcttctcccagcaggcctcattgtgtgcagaaactgtggtgggggctgtgctgtctcctccc

SEQ ID NO: 284734 - DNA, 500 bp, Homo sapiens
acctgacaggtgcgcggcccgggccggctgggctctcagagccgagaggtggggccccgacctggccgtggggctgggcccgctccgtcgccccgaccccgcgtggtccgccaactccctcctgcgcgcggagaggacgggcattgttctcggggccccggagagcgcgagagcggcctgagcctggaggccatcctgcctgagattctacccttagagcttcattcttttgtgactttcacacctttcagaaacttggagaaagatctgcccccaggtgaggtttgggtaactcctccactcccatccccacctcagaggaggcttgctccacctccactgcccctcaggcccaagctcctgtctgggtcctcagcctctgtggagttgaggtctgtagcatatctcaagggcactggggaggtgccgctgccctgcatcctcccaaaccccacagctcctctcaccccttttggtctcccttttgccccccacctcca

SEQ ID NO: 284735 - DNA, 530 bp, Homo sapiens
actatgagccaggataaacacattactctcttctttaacaaaaagagcatggttaactccaaagacttctctagaccagcctggatggtacctaaactttaatcaaccaatgctcaagtaaaagagcagtatccagccccagcacacctaactgttttgcataacatagtgctcctgactggagagcccaggctgagatggtgttaaatgcttttaccacgtgggctcctggcaccaaatgagcaagatctcaccccacaggccttggaaacctgaggcagtattcttctgggatgtttccaactaggcttcccatgaggatgttagagccagcctggctggtgaattttacttctctcacctctcagaggtaagaggtctgagaggctcaggcccttccagcttttgaggattccagcatagtagaaacataaaaaggtccaaagggaattacaaaaataatctattttcagttcttatacttaacaagtcaattcttattaaaaaaataaatcaatcaaacttttgtt

SEQ ID NO: 284736 - DNA, 801 bp, Homo sapiens
  misc_feature (45)..(45): n is a, c, g, or t
  misc_feature (91)..(91): n is a, c, g, or t
  misc_feature (179)..(179): n is a, c, g, or t
  misc_feature (250)..(250): n is a, c, g, or t
  misc_feature (310)..(310): n is a, c, g, or t
  misc_feature (390)..(390): n is a, c, g, or t
  misc_feature (757)..(757): n is a, c, g, or t
  misc_feature (774)..(774): n is a, c, g, or t
  misc_feature (793)..(793): n is a, c, g, or t
  misc_feature (797)..(798): n is a, c, g, or t
ctcctctctccacaatttccaggccaggccaacccaggggacaangcaggcctccctgaaagcccaccctctccccagtccctatcacctnaaggatcatgcctgcacaccccgcttctctctcggatgcagtagcactgcactgggcatcagagggcataggactgagcataagctcngcttggcttctaactgactgagggattttggacaagtcacctccctactctgagcttcaatttggccaccngtaaaacatgagagttgaacttcatttcgaatcgtgggaatctgggtttgagctggggantgtggggttggccatgggtgttcttcttggtgaacagagcaaggagcagagtagagacccctaggagatattactggtcnagaagagaagatgtatgtgtatttgctatgagtgtatttatgatcatatatagtatgtgacgtgtacatatacatgtggaagcataaatacacatgtaagggtgtgtgtgtgtttttgtgtgtgtgtgtttacggcagcagctaattgatccctgcctcccagttgctgtgggggaaggggccgagaaggcagtcactcattagaggcaactaatgggcccaaatggccttgtcagcaaaggctgagcttagatgagcttcctcccgaagtggggaaggaaaaagatgtgaaatagaaaaaggaggggagaagagagcaaagaaggcgggcagaggcctcagaaagaatgaggcttccccaggaganactacaaggattgcagnatcctcactttatccctgnaatnnata

SEQ ID NO: 284737 - DNA, 1035 bp, Homo sapiens
atgtaagtggaatcccacagctgcacccttttgtatctggctgcttttgttcagcatagtgtttttgagattcatctatattgatgccactatcattagtgtatacctctcattgtttcttcaacaaaatcagtccaagcagacagaaaaattttgccattcacaagtatgagacaccagggaacccaaaaatcagatgttccacctttgacaactaagggtaaaaaggcaacaggaaacatcgatcataaagaaaaatcaactgaaataaatcatgaaattcctcactgtgtgaataaactaccaaagcaagaggattctaagagaaaatatgaagatttatcaggggaagagaaacatttggaagtccaaatactgctggagaatactggaagacaaaaagacaaaaaagaagaccaagaaaagaaaaacatttttgtgaaagaagagcaagaactaccaccaaaaataattgaagttattcatcctgaaagagaaagcaatcaagaagatgttctagtaagagaaaagtttaaaagaagcatgcagagaaatggtgtggatgacacacttggcaaaggcactgctccctacacgaaaggccccctcagacaaagaagacattactcattcacagaagcaactgaaaacctgcatcatgggcttcctgcttcaggggggccagccaatgccggcaacatgaggtacagtcatagtacaggcaagcatctcagtaacagagaggaaatggagctagagcattctgacagtgggtatgagccctcatttggtaagtcttccagaataaaagtgaaggatacaactttcagagataagaaaagcagtctcatggaagaactctttggatcaggctatgtcttgaaaactgaccaatcaagtcctggtgttgcaaaaggctcagaggagcctttgcaaagtaaggagtcgcatcccctgcctcccagtcaggcctccaccagccatgctttcggagactctaaagtaactgtggtaaattctattaagccatcgtca

SEQ ID NO: 284738 - DNA, 721 bp, Homo sapiens
agcggggacgcgccggcgctgcggcgttggcgcagtcgtgggaacagcgcggagcagagaagcaccaaaagaggcaaactgagatgcagacaaatgatcatccgtatgctgatcattttgaatagttttttaaaatatattctttctttaaaaagagaccaaaacctgtcaaaaaaatactaccgtggaaagctcataaatactacagtgtgaagaaccctgtgcttatcttcagtttatcatcagacatcttagggaagtttaataaagaacaccaggagaattgagaattaaatgaaaaggtaaatccttttaaagacctcagaagatggatctgtttgtttcaatctgcttttgaggttgtttgctatgtctttggctgatctaacaaaaacaaatatagatgagcatttcttcggcgtggcattagaaaacaataggaggtctgcagcatgcaagagaagcccaggcacaggcgatttttcacggaacagtaatgcttccaataagagtgttgattatagcagatctcagtgctcctgtggaagtttaagttctcagtatgattattcagaagactttctctgtgattgttcagaaaaggctattaatagaaattatttaaagcagcctgtggtaaaagaaaaggagaagaaaaagtataatgtttctaaaatctcccaatctaaaggtaaggagtaaaatttcccaagcaagacca

SEQ ID NO: 284739 - DNA, 2283 bp, Homo sapiens
agcggggacgcgccggcgctgcggcgttggcgcagtcgtgggaacagcgcggagcaggttttttaaaatatattctttctttaaaaagagaccaaaacctgtcaaaaaaatactaccgtggaaagctcataaatactacagtgtgaagaaccctgtgcttatcttcagtttatcatcagacatcttagggaagtttaataaagaacaccaggagaattgagaattaaatgaaaaggtaaatccttttaaagacctcagaagatggatctgtttgtttcaatctgcttttgaggttgtttgctatgtctttggctgatctaacaaaaacaaatatagatgagcatttcttcggcgtggcattagaaaacaataggaggtctgcagcatgcaagagaagcccaggcacaggcgatttttcacggaacagtaatgcttccaataagagtgttgattatagcagatctcagtgctcctgtggaagtttaagttctcagtatgattattcagaagactttctctgtgattgttcagaaaaggctattaatagaaattatttaaagcagcctgtggtaaaagaaaaggagaagaaaaagtataatgtttctaaaatctcccaatctaaaggccagaaggaaatatcagttgaaaaaaagcacacctggaatgcatcactctttaattctcaaatccatatgattgcccaaagaagagatgctatggctcatcgaatactctcagcaaggcttcataaaattaaaggactaaaaaatgaattagctgatatgcatcataaattggaagccatccttacagaaaaccaatttttgaaacaacttcagcttaggcatttgaaagctataggaaaatatgagaattcacaaaataatctacctcaaattatggctaaacatcagaatgaagtaaaaaatttaaggcaactacttaggaaatcccaggaaacaggaaagaactctatctaggaaacttagagaaactgacagccagttactgaagactaaagatatcttgcaggcactgcagaaactttctgaagacaaaaaccttgcagaaagggaagaactcactcataaattatctattatcacaacaaaaatggacgcaaatgacaaaaaaatacagagcttggaaaaacaactgaggttgaactgcagagcctttagccggcagctggctattgagactcggaagactttagcagctcagacagctaccaagactctgcaggtggaagtaaaacaccttcaacaaaaacttaaggaaaaggatcgtgagcttgaaattaaaaacatctatagtcatcgaatacttaaaaatttacatgacacagaggactatccaaaagtttcttcaacaaaatcagtccaagcagacagaaaaattttgccattcacaagtatgagacaccagggaacccaaaaatcagatgttccacctttgacaactaagggtaaaaaggcaacaggaaacatcgatcataaagaaaaatcaactgaaataaatcatgaaattcctcactgtgtgaataaactaccaaagcaagaggattctaagagaaaatatgaagatttatcaggggaagagaaacatttggaagtccaaatactgctggagaatactggaagacaaaaagacaaaaaagaagaccaagaaaagaaaaacatttttgtgaaagaagagcaagaactaccaccaaaaataattgaagttattcatcctgaaagagaaagcaatcaagaagatgttctagtaagagaaaagtttaaaagaagcatgcagagaaatggtgtggatgacacacttggcaaaggcactgctccctacacgaaaggccccctcagacaaagaagacattactcattcacagaagcaactgaaaacctgcatcatgggcttcctgcttcaggggggccagccaatgccggcaacatgaggtacagtcatagtacaggcaagcatctcagtaacagagaggaaatggagctagagcattctgacagtgggtatgagccctcatttggtaagtcttccagaataaaagtgaaggatacaactttcagagataagaaaagcagtctcatggaagaactctttggatcaggctatgtcttgaaaactgaccaatcaagtcctggtgttgcaaaaggctcagaggagcctttgcaaagtaaggagtcgcatcccctgcctcccagtcaggcctccaccagccatgctttcggagactctaaagtaactgtggtaaattctattaagccatcgtca

SEQ ID NO: 284740 - DNA, 1710 bp, Homo sapiens
agcggggacgcgccggcgctgcggcgttggcgcagtcgtgggaacagcgcggagcaggttttttaaaatatattctttctttaaaaagagaccaaaacctgtcaaaaaaatactaccgtggaaagctcataaatactacagtgtgaagaaccctgtgcttatcttcagtttatcatcagacatcttagggaagtttaataaagaacaccaggagaattgagaattaaatgaaaaggtaaatccttttaaagacctcagaagatggatctgtttgtttcaatctgcttttgaggttgtttgctatgtctttggctgatctaacaaaaacaaatatagatgagcatttcttcggcgtggcattagaaaacaataggaggtctgcagcatgcaagagaagcccaggcacaggcgatttttcacggaacagtaatgcttccaataagagtgttgattatagcagatctcagtgctcctgtggaagtttaagttctcagtatgattattcagaagactttctctgtgattgttcagaaaaggctattaatagaaattatttaaagcagcctgtggtaaaagaaaaggagaagaaaaagtataatgtttctaaaatctcccaatctaaaggccagaaggaaatatcagttgaaaaaaagcacacctggaatgcatcactctttaattctcaaatccatatgattgcccaaagaagagatgctatggctcatcgaatactctcagcaaggcttcataaaattaaaggactaaaaaatgaattagctgatatgcatcataaattggaagccatccttacagaaaaccaatttttgaaacaacttcagcttaggcatttgaaagctataggaaaatatgagaattcacaaaataatctacctcaaattatggctaaacatcagaatgaagtaaaaaatttaaggcaactacttaggaaatcccaggaaacaggaaagaactctatctaggaaacttagagaaactgacagccagttactgaagactaaagatatcttgcaggcactgcagaaactttctgaagacaaaaaccttgcagaaagggaagaactcactcataaattatctattatcacaacaaaaatggacgcaaatgacaaaaaaatacaggtctgtatttcaggggcccagacagtttaagattccaaagttaatagagagagggtgtgaattaatcatggatgcgccccctctgtaacaaagcattactaactgcttcacttggcgtgctgcactaaataattatgttgtctaatagagggcacagaaagggagtggtttgaaggaaaaacagaagcagctcaaactagaaatgttcatctgttgcagtgcacaagagttcactctgtggctggactggtttatctggaaatgaccattctctaagagagcacagctacagtgctaagggactttttccctgtgctgaaaagattgcattgtgttacgtgaaacctctctttgaagtcaaccctctaccttaaactgttgattaaaaggctacttccctaaaaacctactcagtgcatccgttcagggcctttgtattctccctcaccattttggccaggaattaccacacagacatttgtagttattttcaaaatagcagcttttcccagataatgttcctgggtagtagggaaggaaaaggaattaaaataattaaagagatgactg

SEQ ID NO: 284741 - DNA, 2466 bp, Homo sapiens
agcggggacgcgccggcgctgcggcgttggcgcagtcgtgggaacagcgcggagcaggttttttaaaatatattctttctttaaaaagagaccaaaacctgtcaaaaaaatactaccgtggaaagctcataaatactacagtgtgaagaaccctgtgcttatcttcagtttatcatcagacatcttagggaagtttaataaagaacaccagtgaggagattgtggactgcctaatatatttcatcagaagagaaggctggagaattaagcagatgcagcaaaaagcagaaactgacttcaaaaaaaaccctctcagtagagaaagtgatattagattcctattgcaaaggatctaatgccagttaaattctcttttgctttcttgataaaacaggagaattgagaattaaatgaaaaggtaaatccttttaaagacctcagaagatggatctgtttgtttcaatctgcttttgaggttgtttgctatgtctttggctgatctaacaaaaacaaatatagatgagcatttcttcggcgtggcattagaaaacaataggaggtctgcagcatgcaagagaagcccaggcacaggcgatttttcacggaacagtaatgcttccaataagagtgttgattatagcagatctcagtgctcctgtggaagtttaagttctcagtatgattattcagaagactttctctgtgattgttcagaaaaggctattaatagaaattatttaaagcagcctgtggtaaaagaaaaggagaagaaaaagtataatgtttctaaaatctcccaatctaaaggccagaaggaaatatcagttgaaaaaaagcacacctggaatgcatcactctttaattctcaaatccatatgattgcccaaagaagagatgctatggctcatcgaatactctcagcaaggcttcataaaattaaaggactaaaaaatgaattagctgatatgcatcataaattggaagccatccttacagaaaaccaatttttgaaacaacttcagcttaggcatttgaaagctataggaaaatatgagaattcacaaaataatctacctcaaattatggctaaacatcagaatgaagtaaaaaatttaaggcaactacttaggaaatcccaggaaacaggaaagaactctatctaggaaacttagagaaactgacagccagttactgaagactaaagatatcttgcaggcactgcagaaactttctgaagacaaaaaccttgcagaaagggaagaactcactcataaattatctattatcacaacaaaaatggacgcaaatgacaaaaaaatacagagcttggaaaaacaactgaggttgaactgcagagcctttagccggcagctggctattgagactcggaagactttagcagctcagacagctaccaagactctgcaggtggaagtaaaacaccttcaacaaaaacttaaggaaaaggatcgtgagcttgaaattaaaaacatctatagtcatcgaatacttaaaaatttacatgacacagaggactatccaaaagtttcttcaacaaaatcagtccaagcagacagaaaaattttgccattcacaagtatgagacaccagggaacccaaaaatcagatgttccacctttgacaactaagggtaaaaaggcaacaggaaacatcgatcataaagaaaaatcaactgaaataaatcatgaaattcctcactgtgtgaataaactaccaaagcaagaggattctaagagaaaatatgaagatttatcaggggaagagaaacatttggaagtccaaatactgctggagaatactggaagacaaaaagacaaaaaagaagaccaagaaaagaaaaacatttttgtgaaagaagagcaagaactaccaccaaaaataattgaagttattcatcctgaaagagaaagcaatcaagaagatgttctagtaagagaaaagtttaaaagaagcatgcagagaaatggtgtggatgacacacttggcaaaggcactgctccctacacgaaaggccccctcagacaaagaagacattactcattcacagaagcaactgaaaacctgcatcatgggcttcctgcttcaggggggccagccaatgccggcaacatgaggtacagtcatagtacaggcaagcatctcagtaacagagaggaaatggagctagagcattctgacagtgggtatgagccctcatttggtaagtcttccagaataaaagtgaaggatacaactttcagagataagaaaagcagtctcatggaagaactctttggatcaggctatgtcttgaaaactgaccaatcaagtcctggtgttgcaaaaggctcagaggagcctttgcaaagtaaggagtcgcatcccctgcctcccagtcaggcctccaccagccatgctttcggagactctaaagtaactgtggtaaattctattaagccatcgtca

SEQ ID NO: 284742 - DNA, 2558 bp, Homo sapiens
agcggggacgcgccggcgctgcggcgttggcgcagtcgtgggaacagcgcggagcaggtaacggccccgctgctgccgtcgtccccctcagccggttaccctgttacagccccagctctgggcccttccggaccctcctgctacgctctttctgggcttccagtatcgccggtcactcagtcctcgcccctgcctgcctctctggcgccccgccgtttcctcctcgcggcacagtttgccaaggaacagctaccccggctcggcagtgaccgggcgctccggcgacacacgtactctcaggcccgctgggcagggggacggcctgggccgaggttttttaaaatatattctttctttaaaaagagaccaaaacctgtcaaaaaaatactaccgtggaaagctcataaatactacagtgtgaagaaccctgtgcttatcttcagtttatcatcagacatcttagggaagtttaataaagaacaccaggagaattgagaattaaatgaaaaggtaaatccttttaaagacctcagaagatggatctgtttgtttcaatctgcttttgaggttgtttgctatgtctttggctgatctaacaaaaacaaatatagatgagcatttcttcggcgtggcattagaaaacaataggaggtctgcagcatgcaagagaagcccaggcacaggcgatttttcacggaacagtaatgcttccaataagagtgttgattatagcagatctcagtgctcctgtggaagtttaagttctcagtatgattattcagaagactttctctgtgattgttcagaaaaggctattaatagaaattatttaaagcagcctgtggtaaaagaaaaggagaagaaaaagtataatgtttctaaaatctcccaatctaaaggccagaaggaaatatcagttgaaaaaaagcacacctggaatgcatcactctttaattctcaaatccatatgattgcccaaagaagagatgctatggctcatcgaatactctcagcaaggcttcataaaattaaaggactaaaaaatgaattagctgatatgcatcataaattggaagccatccttacagaaaaccaatttttgaaacaacttcagcttaggcatttgaaagctataggaaaatatgagaattcacaaaataatctacctcaaattatggctaaacatcagaatgaagtaaaaaatttaaggcaactacttaggaaatcccaggaaacaggaaagaactctatctaggaaacttagagaaactgacagccagttactgaagactaaagatatcttgcaggcactgcagaaactttctgaagacaaaaaccttgcagaaagggaagaactcactcataaattatctattatcacaacaaaaatggacgcaaatgacaaaaaaatacagagcttggaaaaacaactgaggttgaactgcagagcctttagccggcagctggctattgagactcggaagactttagcagctcagacagctaccaagactctgcaggtggaagtaaaacaccttcaacaaaaacttaaggaaaaggatcgtgagcttgaaattaaaaacatctatagtcatcgaatacttaaaaatttacatgacacagaggactatccaaaagtttcttcaacaaaatcagtccaagcagacagaaaaattttgccattcacaagtatgagacaccagggaacccaaaaatcagatgttccacctttgacaactaagggtaaaaaggcaacaggaaacatcgatcataaagaaaaatcaactgaaataaatcatgaaattcctcactgtgtgaataaactaccaaagcaagaggattctaagagaaaatatgaagatttatcaggggaagagaaacatttggaagtccaaatactgctggagaatactggaagacaaaaagacaaaaaagaagaccaagaaaagaaaaacatttttgtgaaagaagagcaagaactaccaccaaaaataattgaagttattcatcctgaaagagaaagcaatcaagaagatgttctagtaagagaaaagtttaaaagaagcatgcagagaaatggtgtggatgacacacttggcaaaggcactgctccctacacgaaaggccccctcagacaaagaagacattactcattcacagaagcaactgaaaacctgcatcatgggcttcctgcttcaggggggccagccaatgccggcaacatgaggtacagtcatagtacaggcaagcatctcagtaacagagaggaaatggagctagagcattctgacagtgggtatgagccctcatttggtaagtcttccagaataaaagtgaaggatacaactttcagagataagaaaagcagtctcatggaagaactctttggatcaggctatgtcttgaaaactgaccaatcaagtcctggtgttgcaaaaggctcagaggagcctttgcaaagtaaggagtcgcatcccctgcctcccagtcaggcctccaccagccatgctttcggagactctaaagtaactgtggtaaattctattaagccatcgtca

SEQ ID NO: 284743 - DNA, 2350 bp, Homo sapiens
agcggggacgcgccggcgctgcggcgttggcgcagtcgtgggaacagcgcggagcagagaagcaccaaaagaggcaaactgagatgcagacaaatgatcatccgtatgctgatcattttgaatagttttttaaaatatattctttctttaaaaagagaccaaaacctgtcaaaaaaatactaccgtggaaagctcataaatactacagtgtgaagaaccctgtgcttatcttcagtttatcatcagacatcttagggaagtttaataaagaacaccaggagaattgagaattaaatgaaaaggtaaatccttttaaagacctcagaagatggatctgtttgtttcaatctgcttttgaggttgtttgctatgtctttggctgatctaacaaaaacaaatatagatgagcatttcttcggcgtggcattagaaaacaataggaggtctgcagcatgcaagagaagcccaggcacaggcgatttttcacggaacagtaatgcttccaataagagtgttgattatagcagatctcagtgctcctgtggaagtttaagttctcagtatgattattcagaagactttctctgtgattgttcagaaaaggctattaatagaaattatttaaagcagcctgtggtaaaagaaaaggagaagaaaaagtataatgtttctaaaatctcccaatctaaaggccagaaggaaatatcagttgaaaaaaagcacacctggaatgcatcactctttaattctcaaatccatatgattgcccaaagaagagatgctatggctcatcgaatactctcagcaaggcttcataaaattaaaggactaaaaaatgaattagctgatatgcatcataaattggaagccatccttacagaaaaccaatttttgaaacaacttcagcttaggcatttgaaagctataggaaaatatgagaattcacaaaataatctacctcaaattatggctaaacatcagaatgaagtaaaaaatttaaggcaactacttaggaaatcccaggaaacaggaaagaactctatctaggaaacttagagaaactgacagccagttactgaagactaaagatatcttgcaggcactgcagaaactttctgaagacaaaaaccttgcagaaagggaagaactcactcataaattatctattatcacaacaaaaatggacgcaaatgacaaaaaaatacagagcttggaaaaacaactgaggttgaactgcagagcctttagccggcagctggctattgagactcggaagactttagcagctcagacagctaccaagactctgcaggtggaagtaaaacaccttcaacaaaaacttaaggaaaaggatcgtgagcttgaaattaaaaacatctatagtcatcgaatacttaaaaatttacatgacacagaggactatccaaaagtttcttcaacaaaatcagtccaagcagacagaaaaattttgccattcacaagtatgagacaccagggaacccaaaaatcagatgttccacctttgacaactaagggtaaaaaggcaacaggaaacatcgatcataaagaaaaatcaactgaaataaatcatgaaattcctcactgtgtgaataaactaccaaagcaagaggattctaagagaaaatatgaagatttatcaggggaagagaaacatttggaagtccaaatactgctggagaatactggaagacaaaaagacaaaaaagaagaccaagaaaagaaaaacatttttgtgaaagaagagcaagaactaccaccaaaaataattgaagttattcatcctgaaagagaaagcaatcaagaagatgttctagtaagagaaaagtttaaaagaagcatgcagagaaatggtgtggatgacacacttggcaaaggcactgctccctacacgaaaggccccctcagacaaagaagacattactcattcacagaagcaactgaaaacctgcatcatgggcttcctgcttcaggggggccagccaatgccggcaacatgaggtacagtcatagtacaggcaagcatctcagtaacagagaggaaatggagctagagcattctgacagtgggtatgagccctcatttggtaagtcttccagaataaaagtgaaggatacaactttcagagataagaaaagcagtctcatggaagaactctttggatcaggctatgtcttgaaaactgaccaatcaagtcctggtgttgcaaaaggctcagaggagcctttgcaaagtaaggagtcgcatcccctgcctcccagtcaggcctccaccagccatgctttcggagactctaaagtaactgtggtaaattctattaagccatcgtca

SEQ ID NO: 284744 - DNA, 2490 bp, Homo sapiens
agcggggacgcgccggcgctgcggcgttggcgcagtcgtgggaacagcgcggagcagagaagcaccaaaagaggcaaactgagatgcagacaaatgatcatccgtatgctgatcattttgaataccttcagccatgcttctgccactgcctctgcaggaaagccacctgctttaaaaaaaagtcttcatggagtgcttatgagagggtcggctgttttctccagctcatttttccaaagcaaacaatcccaccagctatctcaggttttttaaaatatattctttctttaaaaagagaccaaaacctgtcaaaaaaatactaccgtggaaagctcataaatactacagtgtgaagaaccctgtgcttatcttcagtttatcatcagacatcttagggaagtttaataaagaacaccaggagaattgagaattaaatgaaaaggtaaatccttttaaagacctcagaagatggatctgtttgtttcaatctgcttttgaggttgtttgctatgtctttggctgatctaacaaaaacaaatatagatgagcatttcttcggcgtggcattagaaaacaataggaggtctgcagcatgcaagagaagcccaggcacaggcgatttttcacggaacagtaatgcttccaataagagtgttgattatagcagatctcagtgctcctgtggaagtttaagttctcagtatgattattcagaagactttctctgtgattgttcagaaaaggctattaatagaaattatttaaagcagcctgtggtaaaagaaaaggagaagaaaaagtataatgtttctaaaatctcccaatctaaaggccagaaggaaatatcagttgaaaaaaagcacacctggaatgcatcactctttaattctcaaatccatatgattgcccaaagaagagatgctatggctcatcgaatactctcagcaaggcttcataaaattaaaggactaaaaaatgaattagctgatatgcatcataaattggaagccatccttacagaaaaccaatttttgaaacaacttcagcttaggcatttgaaagctataggaaaatatgagaattcacaaaataatctacctcaaattatggctaaacatcagaatgaagtaaaaaatttaaggcaactacttaggaaatcccaggaaacaggaaagaactctatctaggaaacttagagaaactgacagccagttactgaagactaaagatatcttgcaggcactgcagaaactttctgaagacaaaaaccttgcagaaagggaagaactcactcataaattatctattatcacaacaaaaatggacgcaaatgacaaaaaaatacagagcttggaaaaacaactgaggttgaactgcagagcctttagccggcagctggctattgagactcggaagactttagcagctcagacagctaccaagactctgcaggtggaagtaaaacaccttcaacaaaaacttaaggaaaaggatcgtgagcttgaaattaaaaacatctatagtcatcgaatacttaaaaatttacatgacacagaggactatccaaaagtttcttcaacaaaatcagtccaagcagacagaaaaattttgccattcacaagtatgagacaccagggaacccaaaaatcagatgttccacctttgacaactaagggtaaaaaggcaacaggaaacatcgatcataaagaaaaatcaactgaaataaatcatgaaattcctcactgtgtgaataaactaccaaagcaagaggattctaagagaaaatatgaagatttatcaggggaagagaaacatttggaagtccaaatactgctggagaatactggaagacaaaaagacaaaaaagaagaccaagaaaagaaaaacatttttgtgaaagaagagcaagaactaccaccaaaaataattgaagttattcatcctgaaagagaaagcaatcaagaagatgttctagtaagagaaaagtttaaaagaagcatgcagagaaatggtgtggatgacacacttggcaaaggcactgctccctacacgaaaggccccctcagacaaagaagacattactcattcacagaagcaactgaaaacctgcatcatgggcttcctgcttcaggggggccagccaatgccggcaacatgaggtacagtcatagtacaggcaagcatctcagtaacagagaggaaatggagctagagcattctgacagtgggtatgagccctcatttggtaagtcttccagaataaaagtgaaggatacaactttcagagataagaaaagcagtctcatggaagaactctttggatcaggctatgtcttgaaaactgaccaatcaagtcctggtgttgcaaaaggctcagaggagcctttgcaaagtaaggagtcgcatcccctgcctcccagtcaggcctccaccagccatgctttcggagactctaaagtaactgtggtaaattctattaagccatcgtca

SEQ ID NO: 284745 - DNA, 2608 bp, Homo sapiens
agcggggacgcgccggcgctgcggcgttggcgcagtcgtgggaacagcgcggagcaggtaacggccccgctgctgccgtcgtccccctcagccggttaccctgttacagccccagctctgggcccttccggaccctcctgctacgctctttctgggcttccagtatcgccggtcactcagtcctcgcccctgcctgcctctctggcgccccgccgtttcctcctcgcggcacagtttgccaaggaacagctaccccggctcggcagtgaccgggcgctccggcgacacacgtactctcaggcccgctgggcagggggacggcctgggccgagtctgtcagcactgccttcaaaatgcacccagaatagattcgcaattctaccatttctctcaaccgccactgtcaccaccttggtccaggcccccatcatctgagaagcaccaaaagaggcaaactgagatgcagacaaatgatcatccgtatgctgatcattttgaataatgaaaagcggaatctaatttgcatttcattatgagagaattgagaattaaatgaaaaggtaaatccttttaaagacctcagaagatggatctgtttgtttcaatctgcttttgaggttgtttgctatgtctttggctgatctaacaaaaacaaatatagatgagcatttcttcggcgtggcattagaaaacaataggaggtctgcagcatgcaagagaagcccaggcacaggcgatttttcacggaacagtaatgcttccaataagagtgttgattatagcagatctcagtgctcctgtggaagtttaagttctcagtatgattattcagaagactttctctgtgattgttcagaaaaggctattaatagaaattatttaaagcagcctgtggtaaaagaaaaggagaagaaaaagtataatgtttctaaaatctcccaatctaaaggccagaaggaaatatcagttgaaaaaaagcacacctggaatgcatcactctttaattctcaaatccatatgattgcccaaagaagagatgctatggctcatcgaatactctcagcaaggcttcataaaattaaaggactaaaaaatgaattagctgatatgcatcataaattggaagccatccttacagaaaaccaatttttgaaacaacttcagcttaggcatttgaaagctataggaaaatatgagaattcacaaaataatctacctcaaattatggctaaacatcagaatgaagtaaaaaatttaaggcaactacttaggaaatcccaggaaacaggaaagaactctatctaggaaacttagagaaactgacagccagttactgaagactaaagatatcttgcaggcactgcagaaactttctgaagacaaaaaccttgcagaaagggaagaactcactcataaattatctattatcacaacaaaaatggacgcaaatgacaaaaaaatacagagcttggaaaaacaactgaggttgaactgcagagcctttagccggcagctggctattgagactcggaagactttagcagctcagacagctaccaagactctgcaggtggaagtaaaacaccttcaacaaaaacttaaggaaaaggatcgtgagcttgaaattaaaaacatctatagtcatcgaatacttaaaaatttacatgacacagaggactatccaaaagtttcttcaacaaaatcagtccaagcagacagaaaaattttgccattcacaagtatgagacaccagggaacccaaaaatcagatgttccacctttgacaactaagggtaaaaaggcaacaggaaacatcgatcataaagaaaaatcaactgaaataaatcatgaaattcctcactgtgtgaataaactaccaaagcaagaggattctaagagaaaatatgaagatttatcaggggaagagaaacatttggaagtccaaatactgctggagaatactggaagacaaaaagacaaaaaagaagaccaagaaaagaaaaacatttttgtgaaagaagagcaagaactaccaccaaaaataattgaagttattcatcctgaaagagaaagcaatcaagaagatgttctagtaagagaaaagtttaaaagaagcatgcagagaaatggtgtggatgacacacttggcaaaggcactgctccctacacgaaaggccccctcagacaaagaagacattactcattcacagaagcaactgaaaacctgcatcatgggcttcctgcttcaggggggccagccaatgccggcaacatgaggtacagtcatagtacaggcaagcatctcagtaacagagaggaaatggagctagagcattctgacagtgggtatgagccctcatttggtaagtcttccagaataaaagtgaaggatacaactttcagagataagaaaagcagtctcatggaagaactctttggatcaggctatgtcttgaaaactgaccaatcaagtcctggtgttgcaaaaggctcagaggagcctttgcaaagtaaggagtcgcatcccctgcctcccagtcaggcctccaccagccatgctttcggagactctaaagtaactgtggtaaattctattaagccatcgtca

SEQ ID NO: 284746 - DNA, 2445 bp, Homo sapiens
agcggggacgcgccggcgctgcggcgttggcgcagtcgtgggaacagcgcggagcaggtaacggccccgctgctgccgtcgtccccctcagccggttaccctgttacagccccagctctgggcccttccggaccctcctgctacgctctttctgggcttccagtatcgccggtcactcagtcctcgcccctgcctgcctctctggcgccccgccgtttcctcctcgcggcacagtttgccaaggaacagctaccccggctcggcagtgaccgggcgctccggcgacacacgtactctcaggcccgctgggcagggggacggcctgggccgagagaagcaccaaaagaggcaaactgagatgcagacaaatgatcatccgtatgctgatcattttgaataagaccaaaacctgtcaaaaaaatactaccgtggaaagctcataaatactacagtgtgaagaaccctgtgcttatcttcagtttatcatcagacatcttagggaagtttaataaagaacaccagtgaggagattgtggactgcctaatatatttcatcagaagagaaggctggagaattaagcagatgcagcaaaaagcagaaactgacttcaaaaaaaaccctctcagtagagaaagtgatattagattcctattgcaaaggatctaatgccagttaaattctcttttgctttcttgataaaacaggagaattgagaattaaatgaaaaggtaaatccttttaaagacctcagaagatggatctgtttgtttcaatctgcttttgaggccagaaggaaatatcagttgaaaaaaagcacacctggaatgcatcactctttaattctcaaatccatatgattgcccaaagaagagatgctatggctcatcgaatactctcagcaaggcttcataaaattaaaggactaaaaaatgaattagctgatatgcatcataaattggaagccatccttacagaaaaccaatttttgaaacaacttcagcttaggcatttgaaagctataggaaaatatgagaattcacaaaataatctacctcaaattatggctaaacatcagaatgaagtaaaaaatttaaggcaactacttaggaaatcccaggaaacaggaaagaactctatctaggaaacttagagaaactgacagccagttactgaagactaaagatatcttgcaggcactgcagaaactttctgaagacaaaaaccttgcagaaagggaagaactcactcataaattatctattatcacaacaaaaatggacgcaaatgacaaaaaaatacagagcttggaaaaacaactgaggttgaactgcagagcctttagccggcagctggctattgagactcggaagactttagcagctcagacagctaccaagactctgcaggtggaagtaaaacaccttcaacaaaaacttaaggaaaaggatcgtgagcttgaaattaaaaacatctatagtcatcgaatacttaaaaatttacatgacacagaggactatccaaaagtttcttcaacaaaatcagtccaagcagacagaaaaattttgccattcacaagtatgagacaccagggaacccaaaaatcagatgttccacctttgacaactaagggtaaaaaggcaacaggaaacatcgatcataaagaaaaatcaactgaaataaatcatgaaattcctcactgtgtgaataaactaccaaagcaagaggattctaagagaaaatatgaagatttatcaggggaagagaaacatttggaagtccaaatactgctggagaatactggaagacaaaaagacaaaaaagaagaccaagaaaagaaaaacatttttgtgaaagaagagcaagaactaccaccaaaaataattgaagttattcatcctgaaagagaaagcaatcaagaagatgttctagtaagagaaaagtttaaaagaagcatgcagagaaatggtgtggatgacacacttggcaaaggcactgctccctacacgaaaggccccctcagacaaagaagacattactcattcacagaagcaactgaaaacctgcatcatgggcttcctgcttcaggggggccagccaatgccggcaacatgaggtacagtcatagtacaggcaagcatctcagtaacagagaggaaatggagctagagcattctgacagtgggtatgagccctcatttggtaagtcttccagaataaaagtgaaggatacaactttcagagataagaaaagcagtctcatggaagaactctttggatcaggctatgtcttgaaaactgaccaatcaagtcctggtgttgcaaaaggctcagaggagcctttgcaaagtaaggagtcgcatcccctgcctcccagtcaggcctccaccagccatgctttcggagactctaaagtaactgtggtaaattctattaagccatcgtca

SEQ ID NO: 284747 - DNA, 1951 bp, Homo sapiens
agcggggacgcgccggcgctgcggcgttggcgcagtcgtgggaacagcgcggagcaggttttttaaaatatattctttctttaaaaagagaccaaaacctgtcaaaaaaatactaccgtggaaagctcataaatactacagtgtgaagaaccctgtgcttatcttcagtttatcatcagacatcttagggaagtttaataaagaacaccaggagaattgagaattaaatgaaaaggtaaatccttttaaagacctcagaagatggatctgtttgtttcaatctgcttttgaggccagaaggaaatatcagttgaaaaaaagcacacctggaatgcatcactctttaattctcaaatccatatgattgcccaaagaagagatgctatggctcatcgaatactctcagcaaggcttcataaaattaaaggactaaaaaatgaattagctgatatgcatcataaattggaagccatccttacagaaaaccaatttttgaaacaacttcagcttaggcatttgaaagctataggaaaatatgagaattcacaaaataatctacctcaaattatggctaaacatcagaatgaagtaaaaaatttaaggcaactacttaggaaatcccaggaaacaggaaagaactctatctaggaaacttagagaaactgacagccagttactgaagactaaagatatcttgcaggcactgcagaaactttctgaagacaaaaaccttgcagaaagggaagaactcactcataaattatctattatcacaacaaaaatggacgcaaatgacaaaaaaatacagagcttggaaaaacaactgaggttgaactgcagagcctttagccggcagctggctattgagactcggaagactttagcagctcagacagctaccaagactctgcaggtggaagtaaaacaccttcaacaaaaacttaaggaaaaggatcgtgagcttgaaattaaaaacatctatagtcatcgaatacttaaaaatttacatgacacagaggactatccaaaagtttcttcaacaaaatcagtccaagcagacagaaaaattttgccattcacaagtatgagacaccagggaacccaaaaatcagatgttccacctttgacaactaagggtaaaaaggcaacaggaaacatcgatcataaagaaaaatcaactgaaataaatcatgaaattcctcactgtgtgaataaactaccaaagcaagaggattctaagagaaaatatgaagatttatcaggggaagagaaacatttggaagtccaaatactgctggagaatactggaagacaaaaagacaaaaaagaagaccaagaaaagaaaaacatttttgtgaaagaagagcaagaactaccaccaaaaataattgaagttattcatcctgaaagagaaagcaatcaagaagatgttctagtaagagaaaagtttaaaagaagcatgcagagaaatggtgtggatgacacacttggcaaaggcactgctccctacacgaaaggccccctcagacaaagaagacattactcattcacagaagcaactgaaaacctgcatcatgggcttcctgcttcaggggggccagccaatgccggcaacatgaggtacagtcatagtacaggcaagcatctcagtaacagagaggaaatggagctagagcattctgacagtgggtatgagccctcatttggtaagtcttccagaataaaagtgaaggatacaactttcagagataagaaaagcagtctcatggaagaactctttggatcaggctatgtcttgaaaactgaccaatcaagtcctggtgttgcaaaaggctcagaggagcctttgcaaagtaaggagtcgcatcccctgcctcccagtcaggcctccaccagccatgctttcggagactctaaagtaactgtggtaaattctattaagccatcgtca

SEQ ID NO: 284748 - DNA, 2371 bp, Homo sapiens
agcggggacgcgccggcgctgcggcgttggcgcagtcgtgggaacagcgcggagcagagaagcaccaaaagaggcaaactgagatgcagacaaatgatcatccgtatgctgatcattttgaatagttttttaaaatatattctttctttaaaaagagaccaaaacctgtcaaaaaaatactaccgtggaaagctcataaatactacagtgtgaagaaccctgtgcttatcttcagtttatcatcagacatcttagggaagtttaataaagaacaccaggagaattgagaattaaatgaaaaggtaaatccttttaaagacctcagaagatggatctgtttgtttcaatctgcttttgaggttttacttttcttttattaggttgtttgctatgtctttggctgatctaacaaaaacaaatatagatgagcatttcttcggcgtggcattagaaaacaataggaggtctgcagcatgcaagagaagcccaggcacaggcgatttttcacggaacagtaatgcttccaataagagtgttgattatagcagatctcagtgctcctgtggaagtttaagttctcagtatgattattcagaagactttctctgtgattgttcagaaaaggctattaatagaaattatttaaagcagcctgtggtaaaagaaaaggagaagaaaaagtataatgtttctaaaatctcccaatctaaaggccagaaggaaatatcagttgaaaaaaagcacacctggaatgcatcactctttaattctcaaatccatatgattgcccaaagaagagatgctatggctcatcgaatactctcagcaaggcttcataaaattaaaggactaaaaaatgaattagctgatatgcatcataaattggaagccatccttacagaaaaccaatttttgaaacaacttcagcttaggcatttgaaagctataggaaaatatgagaattcacaaaataatctacctcaaattatggctaaacatcagaatgaagtaaaaaatttaaggcaactacttaggaaatcccaggaaacaggaaagaactctatctaggaaacttagagaaactgacagccagttactgaagactaaagatatcttgcaggcactgcagaaactttctgaagacaaaaaccttgcagaaagggaagaactcactcataaattatctattatcacaacaaaaatggacgcaaatgacaaaaaaatacagagcttggaaaaacaactgaggttgaactgcagagcctttagccggcagctggctattgagactcggaagactttagcagctcagacagctaccaagactctgcaggtggaagtaaaacaccttcaacaaaaacttaaggaaaaggatcgtgagcttgaaattaaaaacatctatagtcatcgaatacttaaaaatttacatgacacagaggactatccaaaagtttcttcaacaaaatcagtccaagcagacagaaaaattttgccattcacaagtatgagacaccagggaacccaaaaatcagatgttccacctttgacaactaagggtaaaaaggcaacaggaaacatcgatcataaagaaaaatcaactgaaataaatcatgaaattcctcactgtgtgaataaactaccaaagcaagaggattctaagagaaaatatgaagatttatcaggggaagagaaacatttggaagtccaaatactgctggagaatactggaagacaaaaagacaaaaaagaagaccaagaaaagaaaaacatttttgtgaaagaagagcaagaactaccaccaaaaataattgaagttattcatcctgaaagagaaagcaatcaagaagatgttctagtaagagaaaagtttaaaagaagcatgcagagaaatggtgtggatgacacacttggcaaaggcactgctccctacacgaaaggccccctcagacaaagaagacattactcattcacagaagcaactgaaaacctgcatcatgggcttcctgcttcaggggggccagccaatgccggcaacatgaggtacagtcatagtacaggcaagcatctcagtaacagagaggaaatggagctagagcattctgacagtgggtatgagccctcatttggtaagtcttccagaataaaagtgaaggatacaactttcagagataagaaaagcagtctcatggaagaactctttggatcaggctatgtcttgaaaactgaccaatcaagtcctggtgttgcaaaaggctcagaggagcctttgcaaagtaaggagtcgcatcccctgcctcccagtcaggcctccaccagccatgctttcggagactctaaagtaactgtggtaaattctattaagccatcgtca

SEQ ID NO: 284749 - DNA, 1920 bp, Homo sapiens
agcggggacgcgccggcgctgcggcgttggcgcagtcgtgggaacagcgcggagcagagaccaaaacctgtcaaaaaaatactaccgtggaaagctcataaatactacagtgtgaagaaccctgtgcttatcttcagtttatcatcagacatcttagggaagtttaataaagaacaccaggagaattgagaattaaatgaaaaggtaaatccttttaaagacctcagaagatggatctgtttgtttcaatctgcttttgaggccagaaggaaatatcagttgaaaaaaagcacacctggaatgcatcactctttaattctcaaatccatatgattgcccaaagaagagatgctatggctcatcgaatactctcagcaaggcttcataaaattaaaggactaaaaaatgaattagctgatatgcatcataaattggaagccatccttacagaaaaccaatttttgaaacaacttcagcttaggcatttgaaagctataggaaaatatgagaattcacaaaataatctacctcaaattatggctaaacatcagaatgaagtaaaaaatttaaggcaactacttaggaaatcccaggaaacaggaaagaactctatctaggaaacttagagaaactgacagccagttactgaagactaaagatatcttgcaggcactgcagaaactttctgaagacaaaaaccttgcagaaagggaagaactcactcataaattatctattatcacaacaaaaatggacgcaaatgacaaaaaaatacagagcttggaaaaacaactgaggttgaactgcagagcctttagccggcagctggctattgagactcggaagactttagcagctcagacagctaccaagactctgcaggtggaagtaaaacaccttcaacaaaaacttaaggaaaaggatcgtgagcttgaaattaaaaacatctatagtcatcgaatacttaaaaatttacatgacacagaggactatccaaaagtttcttcaacaaaatcagtccaagcagacagaaaaattttgccattcacaagtatgagacaccagggaacccaaaaatcagatgttccacctttgacaactaagggtaaaaaggcaacaggaaacatcgatcataaagaaaaatcaactgaaataaatcatgaaattcctcactgtgtgaataaactaccaaagcaagaggattctaagagaaaatatgaagatttatcaggggaagagaaacatttggaagtccaaatactgctggagaatactggaagacaaaaagacaaaaaagaagaccaagaaaagaaaaacatttttgtgaaagaagagcaagaactaccaccaaaaataattgaagttattcatcctgaaagagaaagcaatcaagaagatgttctagtaagagaaaagtttaaaagaagcatgcagagaaatggtgtggatgacacacttggcaaaggcactgctccctacacgaaaggccccctcagacaaagaagacattactcattcacagaagcaactgaaaacctgcatcatgggcttcctgcttcaggggggccagccaatgccggcaacatgaggtacagtcatagtacaggcaagcatctcagtaacagagaggaaatggagctagagcattctgacagtgggtatgagccctcatttggtaagtcttccagaataaaagtgaaggatacaactttcagagataagaaaagcagtctcatggaagaactctttggatcaggctatgtcttgaaaactgaccaatcaagtcctggtgttgcaaaaggctcagaggagcctttgcaaagtaaggagtcgcatcccctgcctcccagtcaggcctccaccagccatgctttcggagactctaaagtaactgtggtaaattctattaagccatcgtca

SEQ ID NO: 284750 - DNA, 1624 bp, Homo sapiens
agcggggacgcgccggcgctgcggcgttggcgcagtcgtgggaacagcgcggagcagagaagcaccaaaagaggcaaactgagatgcagacaaatgatcatccgtatgctgatcattttgaatagcaagaaacacataatccaaaaactttaattatttatgttcaactctgtactggaaagaaagagcaggcaggttttttaaaatatattctttctttaaaaagagaccaaaacctgtcaaaaaaatactaccgtggaaagctcataaatactacagtgtgaagaaccctgtgcttatcttcagtttatcatcagacatcttagggaagtttaataaagaacaccaggagaattgagaattaaatgaaaaggcactgcagaaactttctgaagacaaaaaccttgcagaaagggaagaactcactcataaattatctattatcacaacaaaaatggacgcaaatgacaaaaaaatacagagcttggaaaaacaactgaggttgaactgcagagcctttagccggcagctggctattgagactcggaagactttagcagctcagacagctaccaagactctgcaggtggaagtaaaacaccttcaacaaaaacttaaggaaaaggatcgtgagcttgaaattaaaaacatctatagtcatcgaatacttaaaaatttacatgacacagaggactatccaaaagtttcttcaacaaaatcagtccaagcagacagaaaaattttgccattcacaagtatgagacaccagggaacccaaaaatcagatgttccacctttgacaactaagggtaaaaaggcaacaggaaacatcgatcataaagaaaaatcaactgaaataaatcatgaaattcctcactgtgtgaataaactaccaaagcaagaggattctaagagaaaatatgaagatttatcaggggaagagaaacatttggaagtccaaatactgctggagaatactggaagacaaaaagacaaaaaagaagaccaagaaaagaaaaacatttttgtgaaagaagagcaagaactaccaccaaaaataattgaagttattcatcctgaaagagaaagcaatcaagaagatgttctagtaagagaaaagtttaaaagaagcatgcagagaaatggtgtggatgacacacttggcaaaggcactgctccctacacgaaaggccccctcagacaaagaagacattactcattcacagaagcaactgaaaacctgcatcatgggcttcctgcttcaggggggccagccaatgccggcaacatgaggtacagtcatagtacaggcaagcatctcagtaacagagaggaaatggagctagagcattctgacagtgggtatgagccctcatttggtaagtcttccagaataaaagtgaaggatacaactttcagagataagaaaagcagtctcatggaagaactctttggatcaggctatgtcttgaaaactgaccaatcaagtcctggtgttgcaaaaggctcagaggagcctttgcaaagtaaggagtcgcatcccctgcctcccagtcaggcctccaccagccatgctttcggagactctaaagtaactgtggtaaattctattaagccatcgtca

SEQ ID NO: 284751 - DNA, 2635 bp, Homo sapiens
agcggggacgcgccggcgctgcggcgttggcgcagtcgtgggaacagcgcggagcagtctgtcagcactgccttcaaaatgcacccagaatagattcgcaattctaccatttctctcaaccgccactgtcaccaccttggtccaggcccccatcatctgagaagcaccaaaagaggcaaactgagatgcagacaaatgatcatccgtatgctgatcattttgaatagttttttaaaatatattctttctttaaaaagagaccaaaacctgtcaaaaaaatactaccgtggaaagctcataaatactacagtgtgaagaaccctgtgcttatcttcagtttatcatcagacatcttagggaagtttaataaagaacaccagtgaggagattgtggactgcctaatatatttcatcagaagagaaggctggagaattaagcagatgcagcaaaaagcagaaactgacttcaaaaaaaaccctctcagtagagaaagtgatattagattcctattgcaaaggatctaatgccagttaaattctcttttgctttcttgataaaacaggagaattgagaattaaatgaaaaggtaaatccttttaaagacctcagaagatggatctgtttgtttcaatctgcttttgaggttgtttgctatgtctttggctgatctaacaaaaacaaatatagatgagcatttcttcggcgtggcattagaaaacaataggaggtctgcagcatgcaagagaagcccaggcacaggcgatttttcacggaacagtaatgcttccaataagagtgttgattatagcagatctcagtgctcctgtggaagtttaagttctcagtatgattattcagaagactttctctgtgattgttcagaaaaggctattaatagaaattatttaaagcagcctgtggtaaaagaaaaggagaagaaaaagtataatgtttctaaaatctcccaatctaaaggccagaaggaaatatcagttgaaaaaaagcacacctggaatgcatcactctttaattctcaaatccatatgattgcccaaagaagagatgctatggctcatcgaatactctcagcaaggcttcataaaattaaaggactaaaaaatgaattagctgatatgcatcataaattggaagccatccttacagaaaaccaatttttgaaacaacttcagcttaggcatttgaaagctataggaaaatatgagaattcacaaaataatctacctcaaattatggctaaacatcagaatgaagtaaaaaatttaaggcaactacttaggaaatcccaggaaacaggaaagaactctatctaggaaacttagagaaactgacagccagttactgaagactaaagatatcttgcaggcactgcagaaactttctgaagacaaaaaccttgcagaaagggaagaactcactcataaattatctattatcacaacaaaaatggacgcaaatgacaaaaaaatacagagcttggaaaaacaactgaggttgaactgcagagcctttagccggcagctggctattgagactcggaagactttagcagctcagacagctaccaagactctgcaggtggaagtaaaacaccttcaacaaaaacttaaggaaaaggatcgtgagcttgaaattaaaaacatctatagtcatcgaatacttaaaaatttacatgacacagaggactatccaaaagtttcttcaacaaaatcagtccaagcagacagaaaaattttgccattcacaagtatgagacaccagggaacccaaaaatcagatgttccacctttgacaactaagggtaaaaaggcaacaggaaacatcgatcataaagaaaaatcaactgaaataaatcatgaaattcctcactgtgtgaataaactaccaaagcaagaggattctaagagaaaatatgaagatttatcaggggaagagaaacatttggaagtccaaatactgctggagaatactggaagacaaaaagacaaaaaagaagaccaagaaaagaaaaacatttttgtgaaagaagagcaagaactaccaccaaaaataattgaagttattcatcctgaaagagaaagcaatcaagaagatgttctagtaagagaaaagtttaaaagaagcatgcagagaaatggtgtggatgacacacttggcaaaggcactgctccctacacgaaaggccccctcagacaaagaagacattactcattcacagaagcaactgaaaacctgcatcatgggcttcctgcttcaggggggccagccaatgccggcaacatgaggtacagtcatagtacaggcaagcatctcagtaacagagaggaaatggagctagagcattctgacagtgggtatgagccctcatttggtaagtcttccagaataaaagtgaaggatacaactttcagagataagaaaagcagtctcatggaagaactctttggatcaggctatgtcttgaaaactgaccaatcaagtcctggtgttgcaaaaggctcagaggagcctttgcaaagtaaggagtcgcatcccctgcctcccagtcaggcctccaccagccatgctttcggagactctaaagtaactgtggtaaattctattaagccatcgtca

SEQ ID NO: 284752 - DNA, 2502 bp, Homo sapiens
agcggggacgcgccggcgctgcggcgttggcgcagtcgtgggaacagcgcggagcagagaagcaccaaaagaggcaaactgagatgcagacaaatgatcatccgtatgctgatcattttgaataagaccaaaacctgtcaaaaaaatactaccgtggaaagctcataaatactacagtgtgaagaaccctgtgcttatcttcagtttatcatcagacatcttagggaagtttaataaagaacaccagtgaggagattgtggactgcctaatatatttcatcagaagagaaggctggagaattaagcagatgcagcaaaaagcagaaactgacttcaaaaaaaaccctctcagtagagaaagtgatattagattcctattgcaaaggatctaatgccagttaaattctcttttgctttcttgataaaacaggagaattgagaattaaatgaaaaggtaaatccttttaaagacctcagaagatggatctgtttgtttcaatctgcttttgaggttgtttgctatgtctttggctgatctaacaaaaacaaatatagatgagcatttcttcggcgtggcattagaaaacaataggaggtctgcagcatgcaagagaagcccaggcacaggcgatttttcacggaacagtaatgcttccaataagagtgttgattatagcagatctcagtgctcctgtggaagtttaagttctcagtatgattattcagaagactttctctgtgattgttcagaaaaggctattaatagaaattatttaaagcagcctgtggtaaaagaaaaggagaagaaaaagtataatgtttctaaaatctcccaatctaaaggccagaaggaaatatcagttgaaaaaaagcacacctggaatgcatcactctttaattctcaaatccatatgattgcccaaagaagagatgctatggctcatcgaatactctcagcaaggcttcataaaattaaaggactaaaaaatgaattagctgatatgcatcataaattggaagccatccttacagaaaaccaatttttgaaacaacttcagcttaggcatttgaaagctataggaaaatatgagaattcacaaaataatctacctcaaattatggctaaacatcagaatgaagtaaaaaatttaaggcaactacttaggaaatcccaggaaacaggaaagaactctatctaggaaacttagagaaactgacagccagttactgaagactaaagatatcttgcaggcactgcagaaactttctgaagacaaaaaccttgcagaaagggaagaactcactcataaattatctattatcacaacaaaaatggacgcaaatgacaaaaaaatacagagcttggaaaaacaactgaggttgaactgcagagcctttagccggcagctggctattgagactcggaagactttagcagctcagacagctaccaagactctgcaggtggaagtaaaacaccttcaacaaaaacttaaggaaaaggatcgtgagcttgaaattaaaaacatctatagtcatcgaatacttaaaaatttacatgacacagaggactatccaaaagtttcttcaacaaaatcagtccaagcagacagaaaaattttgccattcacaagtatgagacaccagggaacccaaaaatcagatgttccacctttgacaactaagggtaaaaaggcaacaggaaacatcgatcataaagaaaaatcaactgaaataaatcatgaaattcctcactgtgtgaataaactaccaaagcaagaggattctaagagaaaatatgaagatttatcaggggaagagaaacatttggaagtccaaatactgctggagaatactggaagacaaaaagacaaaaaagaagaccaagaaaagaaaaacatttttgtgaaagaagagcaagaactaccaccaaaaataattgaagttattcatcctgaaagagaaagcaatcaagaagatgttctagtaagagaaaagtttaaaagaagcatgcagagaaatggtgtggatgacacacttggcaaaggcactgctccctacacgaaaggccccctcagacaaagaagacattactcattcacagaagcaactgaaaacctgcatcatgggcttcctgcttcaggggggccagccaatgccggcaacatgaggtacagtcatagtacaggcaagcatctcagtaacagagaggaaatggagctagagcattctgacagtgggtatgagccctcatttggtaagtcttccagaataaaagtgaaggatacaactttcagagataagaaaagcagtctcatggaagaactctttggatcaggctatgtcttgaaaactgaccaatcaagtcctggtgttgcaaaaggctcagaggagcctttgcaaagtaaggagtcgcatcccctgcctcccagtcaggcctccaccagccatgctttcggagactctaaagtaactgtggtaaattctattaagccatcgtca

SEQ ID NO: 284753 - DNA, 1893 bp, Homo sapiens
agcggggacgcgccggcgctgcggcgttggcgcagtcgtgggaacagcgcggagcagagaagcaccaaaagaggcaaactgagatgcagacaaatgatcatccgtatgctgatcattttgaatagagaattgagaattaaatgaaaaggtaaatccttttaaagacctcagaagatggatctgtttgtttcaatctgcttttgaggccagaaggaaatatcagttgaaaaaaagcacacctggaatgcatcactctttaattctcaaatccatatgattgcccaaagaagagatgctatggctcatcgaatactctcagcaaggcttcataaaattaaaggactaaaaaacttggcgaaatttttaaggccgtggggaatgaattagctgatatgcatcataaattggaagccatccttacagaaaaccaatttttgaaacaacttcagcttaggcatttgaaagctataggaaaatatgagaattcacaaaataatctacctcaaattatggctaaacatcagaatgaagtaaaaaatttaaggcaactacttaggaaatcccaggaaacaggaaagaactctatctaggaaacttagagaaactgacagccagttactgaagactaaagatatcttgcaggcactgcagaaactttctgaagacaaaaaccttgcagaaagggaagaactcactcataaattatctattatcacaacaaaaatggacgcaaatgacaaaaaaatacagagcttggaaaaacaactgaggttgaactgcagagcctttagccggcagctggctattgagactcggaagactttagcagctcagacagctaccaagactctgcaggtggaagtaaaacaccttcaacaaaaacttaaggaaaaggatcgtgagcttgaaattaaaaacatctatagtcatcgaatacttaaaaatttacatgacacagaggactatccaaaagtttcttcaacaaaatcagtccaagcagacagaaaaattttgccattcacaagtatgagacaccagggaacccaaaaatcagatgttccacctttgacaactaagggtaaaaaggcaacaggaaacatcgatcataaagaaaaatcaactgaaataaatcatgaaattcctcactgtgtgaataaactaccaaagcaagaggattctaagagaaaatatgaagatttatcaggggaagagaaacatttggaagtccaaatactgctggagaatactggaagacaaaaagacaaaaaagaagaccaagaaaagaaaaacatttttgtgaaagaagagcaagaactaccaccaaaaataattgaagttattcatcctgaaagagaaagcaatcaagaagatgttctagtaagagaaaagtttaaaagaagcatgcagagaaatggtgtggatgacacacttggcaaaggcactgctccctacacgaaaggccccctcagacaaagaagacattactcattcacagaagcaactgaaaacctgcatcatgggcttcctgcttcaggggggccagccaatgccggcaacatgaggtacagtcatagtacaggcaagcatctcagtaacagagaggaaatggagctagagcattctgacagtgggtatgagccctcatttggtaagtcttccagaataaaagtgaaggatacaactttcagagataagaaaagcagtctcatggaagaactctttggatcaggctatgtcttgaaaactgaccaatcaagtcctggtgttgcaaaaggctcagaggagcctttgcaaagtaaggagtcgcatcccctgcctcccagtcaggcctccaccagccatgctttcggagactctaaagtaactgtggtaaattctattaagccatcgtca

SEQ ID NO: 284754 - DNA, 999 bp, Homo sapiens
agcggggacgcgccggcgctgcggcgttggcgcagtcgtgggaacagcgcggagcaggtaacggccccgctgctgccgtcgtccccctcagccggttaccctgttacagccccagctctgggcccttccggaccctcctgctacgctctttctgggcttccagtatcgccggtcactcagtcctcgcccctgcctgcctctctggcgccccgccgtttcctcctcgcggcacagtttgccaaggaacagctaccccggctcggcagtgaccgggcgctccggcgacacacgtactctcaggcccgctgggcagggggacggcctgggccgagtctgtcagcactgccttcaaaatgcacccagaatagattcgcaattctaccatttctctcaaccgccactgtcaccaccttggtccaggcccccatcatctgagaagcaccaaaagaggcaaactgagatgcagacaaatgatcatccgtatgctgatcattttgaatagcaagaaacacataatccaaaaactttaattatttatgttcaactctgtactggaaagaaagagcaggcaggtgagccacaagatcttttctgccaaaaacttgaaaaggcactgctgtgtatggctccttcaaatcttacttcaacatcactgtttgataatcacatccaagaatttcccaatcaactgccaacaggtgattcactttcatagagaaaaagccgcctgtggccaggtgcagtagctcacacctgtaatcccagcactttgggaggccaaggtgagtagatcacttgaggtcaggagtttgagaccagcctggccaacatgggtaaaaccccgtctgtactaaaaatacaaaaaatttagccgggcatggtggcgggcgctgtaatcccagctactcaggaggctgaggcaggagaattgcttgaacctgggaggcagaggttgcagtgagccaagaccacaccaatccataatacaagggaatatat

SEQ ID NO: 284755 - DNA, 509 bp, Homo sapiens
ctgatggtaaactcagctgactgatgtctggcaaagggatatttaatctgcttccaacagtctggaataaagatctcgtgactctcactgaggatgtttcagcagtgttactctggggacagtctctgccctgtctctctctccacggccacactcctacctactgtagcaaccagcaccaagtcttgaaccagctcctgcttctggatgacaaggatgcaagtggccacgttgggaaggtccacatggcaagaactgaggatggcctccagccaaaatccaggaagaaaccgaggccctcaatccaataacacacaagtaactgaatgctgtcaacaccacatgagcttagaagcagatccttccccagctgagcctccaatgagattgcagccccagctgacacctttgttgcacctttataagaccctgaagcagagaacccagctaaaccatgtccagtctcctaacccacagaaaatgagataataaatatgtgccactttaag

SEQ ID NO: 284756 - DNA, 1907 bp, Homo sapiens
ggcgcatacgcggtgcggccgctgcttcaggtcggcgggctccagggagacctgggtgggcagcgtcgccgtttctcctttcttgggcagtatttttcccagcgccacgcggaggctgggccattatgagctctgcatttccaggacctggtcactattcaggacacggttccagcgcagtgcgcgttagccatgtctcagggatgagtgacattccaagatgtggccattgacttctccaaggaagagtggggattcctgaaccctgctcagagagatttgtacacaactgtgatgctggagaattatcagaacctggtctggctgggactttccatttctaaatctgtgatttcactgttggagaaaaggaaactgccttggataatggcaaaagaagagataagaggcccattgccagatgtgccaggtgcagagattaaggagttatctgcaaagagggctattaatgaagtattatcgcagtttgacacagtgataaaatgtacaagaaacgtatgtaaggaatgtggaaatctatactgccacaatatgcagcttactctccataagagaaatcatacacaaaagaaatgcaatcagtgtttagattgtgggaaatacttcactcgtcaatcaactctcattcagcatcaaagaatccacacgggagagagaccctataaatgtaacgaatgtattaaaaccttcaaccagagggcacaccttacctagcatgagagaattcacactggtgagaaaccttacaaatgtaaggaatgcaggaaaaccttcagccagatgactcatctcacacagcatcagactacacatacgagagaaaagttccatgaatgcagtgaatgtggaaaggccttcagccgtgtctcagctcttatagatcaccagcgaattcatagtggagaaaagccgtatgaatgtaaggagtgtggaagagccttcactcaaagtgcccagctcattagacatcagaaaactcattctggagaaaaaccctatgagtgtagtaagtgtaagaaatcttttgtgcacctgtcttccctgattgaacattggagaattcacactggagaaaaaccatatcaatgtaaggactgcaaaaagaccttttgtcgtgtgatgcagttcactctgcacaggagaattcatactggtgaaaaaccctatgaatgcaaggaatgtggaaagtccttcagcgcccattcttctcttgttactcataagagaacacacagtggagaaaaaccgtataaatgcaaggaatgtggaaaagccttcagtgcgcactcttcccttgttactcataagagaacacacagtggagagaaaccctatacatgccatgcctgtgggaaggcctttaatacttcctccacactttgtcaacataatagaattcatactggtgaaaaaccctttcagtgcagtcaatgcgggaagtcctttagctgcagctctcaccttactcgacactgtagaatgtgtaatggaaaatttagcaaataaccaaaactcaaaatgttaattctgattattctgtatcatcaccagtactttgtactttgagtctttttaaatatgctctgttagtttgtatggaatgatatttcattgcacttttaatttaacttaaaaatgccttcccttgactgttgatatgtattttttgtgaagtgtgtgttgaagccttgcagattattttttaaattagaggtttatcactaggtatatctcctaatgctatccctcccccctccccctaatgtaaatgacgagttaatggtgcagcacaccaacatggcacatgtatacatatgtaacaaacctgcacgttgtgcacatggtaccctaaaacttaaagtataattaaaaaaaaaaattagagg

SEQ ID NO: 284757 - DNA, 1979 bp, Homo sapiens
ggcgcatacgcggtgcggccgctgcttcaggtcggcgggctccagggagacctgggtgggcagcgtcgccgtttctcctttcttgggcagtatttttcccagcgccacgcggaggctgggccattatgagctctgcatttccaggacctggtcactattcaggacacggttccagcgcagtgcgcgttagccatgtctcagggatgagtgacattccaagatgtggccattgacttctccaaggaagagtggggattcctgaaccctgctcagagagatttgtacacaactgtgatgctggagaattatcagaacctggtctggctgggactttccatttctaaatctgtgatttcactgttggagaaaaggaaactgccttggataatggcaaaagaagagataagaggcccattgccaggatatttcaaggtgtcagagatgaccatctcccaggagccaaaggcaaagactagaactctctttggaaaagatgtgccaggtgcagagattaaggagttatctgcaaagagggctattaatgaagtattatcgcagtttgacacagtgataaaatgtacaagaaacgtatgtaaggaatgtggaaatctatactgccacaatatgcagcttactctccataagagaaatcatacacaaaagaaatgcaatcagtgtttagattgtgggaaatacttcactcgtcaatcaactctcattcagcatcaaagaatccacacgggagagagaccctataaatgtaacgaatgtattaaaaccttcaaccagagggcacaccttacctagcatgagagaattcacactggtgagaaaccttacaaatgtaaggaatgcaggaaaaccttcagccagatgactcatctcacacagcatcagactacacatacgagagaaaagttccatgaatgcagtgaatgtggaaaggccttcagccgtgtctcagctcttatagatcaccagcgaattcatagtggagaaaagccgtatgaatgtaaggagtgtggaagagccttcactcaaagtgcccagctcattagacatcagaaaactcattctggagaaaaaccctatgagtgtagtaagtgtaagaaatcttttgtgcacctgtcttccctgattgaacattggagaattcacactggagaaaaaccatatcaatgtaaggactgcaaaaagaccttttgtcgtgtgatgcagttcactctgcacaggagaattcatactggtgaaaaaccctatgaatgcaaggaatgtggaaagtccttcagcgcccattcttctcttgttactcataagagaacacacagtggagaaaaaccgtataaatgcaaggaatgtggaaaagccttcagtgcgcactcttcccttgttactcataagagaacacacagtggagagaaaccctatacatgccatgcctgtgggaaggcctttaatacttcctccacactttgtcaacataatagaattcatactggtgaaaaaccctttcagtgcagtcaatgcgggaagtcctttagctgcagctctcaccttactcgacactgtagaatgtgtaatggaaaatttagcaaataaccaaaactcaaaatgttaattctgattattctgtatcatcaccagtactttgtactttgagtctttttaaatatgctctgttagtttgtatggaatgatatttcattgcacttttaatttaacttaaaaatgccttcccttgactgttgatatgtattttttgtgaagtgtgtgttgaagccttgcagattattttttaaattagaggtttatcactaggtatatctcctaatgctatccctcccccctccccctaatgtaaatgacgagttaatggtgcagcacaccaacatggcacatgtatacatatgtaacaaacctgcacgttgtgcacatggtaccctaaaacttaaagtataattaaaaaaaaaaattagagg

SEQ ID NO: 284758 - DNA, 1966 bp, Homo sapiens
ggcgcatacgcggtgcggccgctgcttcaggtcggcgggctccagggagacctgggtgggcagcgtcgccgtttctcctttcttgggcagtatttttcccagcgccacgcggaggctgggccattatgagctctgcatttccaggacctggtcactattcaggacacggttccagcgcagtgcgcgttagccatgtctcagctccagactgagaggacgcagcatagaaaatgcttatgagtggttcagactcagtaatgggatgagtgacattccaagatgtggccattgacttctccaaggaagagtggggattcctgaaccctgctcagagagatttgtacacaactgtgatgctggagaattatcagaacctggtctggctgggactttccatttctaaatctgtgatttcactgttggagaaaaggaaactgccttggataatggcaaaagaagagataagaggcccattgccagatgtgccaggtgcagagattaaggagttatctgcaaagagggctattaatgaagtattatcgcagtttgacacagtgataaaatgtacaagaaacgtatgtaaggaatgtggaaatctatactgccacaatatgcagcttactctccataagagaaatcatacacaaaagaaatgcaatcagtgtttagattgtgggaaatacttcactcgtcaatcaactctcattcagcatcaaagaatccacacgggagagagaccctataaatgtaacgaatgtattaaaaccttcaaccagagggcacaccttacctagcatgagagaattcacactggtgagaaaccttacaaatgtaaggaatgcaggaaaaccttcagccagatgactcatctcacacagcatcagactacacatacgagagaaaagttccatgaatgcagtgaatgtggaaaggccttcagccgtgtctcagctcttatagatcaccagcgaattcatagtggagaaaagccgtatgaatgtaaggagtgtggaagagccttcactcaaagtgcccagctcattagacatcagaaaactcattctggagaaaaaccctatgagtgtagtaagtgtaagaaatcttttgtgcacctgtcttccctgattgaacattggagaattcacactggagaaaaaccatatcaatgtaaggactgcaaaaagaccttttgtcgtgtgatgcagttcactctgcacaggagaattcatactggtgaaaaaccctatgaatgcaaggaatgtggaaagtccttcagcgcccattcttctcttgttactcataagagaacacacagtggagaaaaaccgtataaatgcaaggaatgtggaaaagccttcagtgcgcactcttcccttgttactcataagagaacacacagtggagagaaaccctatacatgccatgcctgtgggaaggcctttaatacttcctccacactttgtcaacataatagaattcatactggtgaaaaaccctttcagtgcagtcaatgcgggaagtcctttagctgcagctctcaccttactcgacactgtagaatgtgtaatggaaaatttagcaaataaccaaaactcaaaatgttaattctgattattctgtatcatcaccagtactttgtactttgagtctttttaaatatgctctgttagtttgtatggaatgatatttcattgcacttttaatttaacttaaaaatgccttcccttgactgttgatatgtattttttgtgaagtgtgtgttgaagccttgcagattattttttaaattagaggtttatcactaggtatatctcctaatgctatccctcccccctccccctaatgtaaatgacgagttaatggtgcagcacaccaacatggcacatgtatacatatgtaacaaacctgcacgttgtgcacatggtaccctaaaacttaaagtataattaaaaaaaaaaattagagg

SEQ ID NO: 284759 - DNA, 1400 bp, Homo sapiens
ggcgcatacgcggtgcggccgctgcttcaggtcggcgggctccagggagacctgggtgggcagcgtcgccgtttctcctttcttgggcagtatttttcccagcgccacgcggaggctgggccattatgagctctgcatttccaggacctggtcactattcaggacacggttccagcgcagtgcgcgttagccatgtctcagggatgagtgacattccaagatgtggccattgacttctccaaggaagagtggggattcctgaaccctgctcagagagatttgtacacaactgtgatgctggagaattatcagaacctggtctggctgggactttccatttctaaatctgtgatttcactgttggagaaaaggaaactgccttggataatggcaaaagaagagataagaggcccattgccagatgtgccaggtgcagagattaaggagttatctgcaaagagggctattaatgaagtattatcgcagtttgacacagtgataaaatgtacaagaaacgtatgtaaggaatgtggaaatctatactgccacaatatgcagcttactctccataagagaaatcatacacaaaagaaatgcaatcagtgtttagattgtgggaaatacttcactcgtcaatcaactctcattcagcatcaaagaatccacacgggagagagaccctataaatgtaacgaatgtattaaaaccagcgcccattcttctcttgttactcataagagaacacacagtggagaaaaaccgtataaatgcaaggaatgtggaaaagccttcagtgcgcactcttcccttgttactcataagagaacacacagtggagagaaaccctatacatgccatgcctgtgggaaggcctttaatacttcctccacactttgtcaacataatagaattcatactggtgaaaaaccctttcagtgcagtcaatgcgggaagtcctttagctgcagctctcaccttactcgacactgtagaatgtgtaatggaaaatttagcaaataaccaaaactcaaaatgttaattctgattattctgtatcatcaccagtactttgtactttgagtctttttaaatatgctctgttagtttgtatggaatgatatttcattgcacttttaatttaacttaaaaatgccttcccttgactgttgatatgtattttttgtgaagtgtgtgttgaagccttgcagattattttttaaattagaggtttatcactaggtatatctcctaatgctatccctcccccctccccctaatgtaaatgacgagttaatggtgcagcacaccaacatggcacatgtatacatatgtaacaaacctgcacgttgtgcacatggtaccctaaaacttaaagtataattaaaaaaaaaaattagagg

SEQ ID NO: 284760 - DNA, 1660 bp, Homo sapiens
ggcgcatacgcggtgcggccgctgcttcaggtcggcgggctccagggagacctgggtgggcagcgtcgccgtttctcctttcttgggcagtatttttcccagcgccacgcggaggctgggccattatgagctctgcatttccaggacctggtcactattcaggacacggttccagcgcagtgcgcgttagccatgtctcagggatgagtgacattccaagatgtggccattgacttctccaaggaagagtggggattcctgaaccctgctcagagagatttgtacacaactgtgatgctggagaattatcagaacctggtctggctgggactttccatttctaaatctgtgatttcactgttggagaaaaggaaactgccttggataatggcaaaagaagagataagaggcccattgccagatgtgccaggtgcagagattaaggagttatctgcaaagagggctattaatgaagtattatcgcagtttgacacagtgataaaatgtacaagaaacgtatgtaaggaatgtggaaatctatactgccacaatatgcagcttactctccataagagaaatcatacacaaaagaaatgcaatcagtgtttagattgtgggaaatacttcactcgtcaatcaactctcattcagcatcaaagaatccacacgggagagagaccctataaatgtaacgaatgtattaaaaccttcaaccagagggcacaccttacctagcatgagagaattcacactggtgagaaaccttacaaatgtaaggaatgcaggaaaaccttcagccagatgactcatctcacacagcatcagactacacatacgagagaaaagttccatgaatgcagtgaatgtggaaaggccttcagccgtgtctcagctcttatagatcaccagcgaattcatagtggagaaaagccgtatgaatgtaaggagtgtggaagagccttcactcaaagtgcccagctcattagacatcagaaaactcattctggagaaaaaccctatgagtgtagtaagtgtaagaaatcttttgtgcacctgtcttccctgattgaacattggagaattcacactggagaaaaaccatatcaatgtaaggactgcaaaaagaccttttgtcgtgtgatgcagttcactctgcacaggagaattcatactggtgaaaaaccctatgaatgcaaggaatgtggaaagtcctttcctttagctgcagctctcaccttactcgacactgtagaatgtgtaatggaaaatttagcaaataaccaaaactcaaaatgttaattctgattattctgtatcatcaccagtactttgtactttgagtctttttaaatatgctctgttagtttgtatggaatgatatttcattgcacttttaatttaacttaaaaatgccttcccttgactgttgatatgtattttttgtgaagtgtgtgttgaagccttgcagattattttttaaattagaggtttatcactaggtatatctcctaatgctatccctcccccctccccctaatgtaaatgacgagttaatggtgcagcacaccaacatggcacatgtatacatatgtaacaaacctgcacgttgtgcacatggtaccctaaaacttaaagtataattaaaaaaaaaaattagagg

SEQ ID NO: 284761 - DNA, 1459 bp, Homo sapiens
ggcgcatacgcggtgcggccgctgcttcaggtcggcgggctccagggagacctgggtgggcagcgtcgccgtttctcctttcttgggcagtatttttcccagcgccacgcggaggctgggccattatgagctctgcatttccaggacctggtcactattcaggacacggttccagcgcagtgcgcgttagccatgtctcagctccagactgagaggacgcagcatagaaaatgcttatgagtggttcagactcagtaatgggatgagtgacattccaagatgtggccattgacttctccaaggaagagtggggattcctgaaccctgctcagagagatttgtacacaactgtgatgctggagaattatcagaacctggtctggctgggactttccatttctaaatctgtgatttcactgttggagaaaaggaaactgccttggataatggcaaaagaagagataagaggcccattgccagatgtgccaggtgcagagattaaggagttatctgcaaagagggctattaatgaagtattatcgcagtttgacacagtgataaaatgtacaagaaacgtatgtaaggaatgtggaaatctatactgccacaatatgcagcttactctccataagagaaatcatacacaaaagaaatgcaatcagtgtttagattgtgggaaatacttcactcgtcaatcaactctcattcagcatcaaagaatccacacgggagagagaccctataaatgtaacgaatgtattaaaaccagcgcccattcttctcttgttactcataagagaacacacagtggagaaaaaccgtataaatgcaaggaatgtggaaaagccttcagtgcgcactcttcccttgttactcataagagaacacacagtggagagaaaccctatacatgccatgcctgtgggaaggcctttaatacttcctccacactttgtcaacataatagaattcatactggtgaaaaaccctttcagtgcagtcaatgcgggaagtcctttagctgcagctctcaccttactcgacactgtagaatgtgtaatggaaaatttagcaaataaccaaaactcaaaatgttaattctgattattctgtatcatcaccagtactttgtactttgagtctttttaaatatgctctgttagtttgtatggaatgatatttcattgcacttttaatttaacttaaaaatgccttcccttgactgttgatatgtattttttgtgaagtgtgtgttgaagccttgcagattattttttaaattagaggtttatcactaggtatatctcctaatgctatccctcccccctccccctaatgtaaatgacgagttaatggtgcagcacaccaacatggcacatgtatacatatgtaacaaacctgcacgttgtgcacatggtaccctaaaacttaaagtataattaaaaaaaaaaattagagg

SEQ ID NO: 284762 - DNA, 1164 bp, Homo sapiens
tgacttgaactaaaaacaattcaaaccactgggtcatgcacagtcaataagttaaaaaactataagaaaaaaaggcataagggcatgagtggaaaataaaccctatttaactaaggggtagggagtgggagcaagaaaaccacttagtattttgtatagaatggggaagagaggaagatattttcattatggctttaggatggaagcgcttcagatagtcccctgccccattcctccaaatcaaagccccagtggcagtgacagtaccaggaaacaatctagcctccccgcccaccccgcccccataaccgtgcccggcggctgctgtccagtcgcccgtgcttcccaaggctgccgaggaagcggctgctgctcattccagtagatccaacgcccaggctagggggtagagacacagcccttgtggtagggtagggcacgtcttcggcccaccgctcctgggcgccagtggcttcaagggaagaccttgggacctggatagggttctccctcgcaccagaagtcatcggcctgtggggtctccaggagccacacctctcgaggcaggtcacaggccgagctggaggcctccttgggcctgaccggctccagcacccggtaatagtggcagtcccggccatcgtccgggtcgtagggcggggccaggatgtccaggaaggcggcaggcccttccacggcgtcgatctggtgcaggttgtcccggtgcggtgtgaggatgcagggccgctggcctcggtgtactcggcccgcgaacgcagcacgcccggccgcacggcttctcgctcccggggctgcagcggcggctcgaactgctgctcgggcggcaatggccccgccgttgcccgccgcccgcgtctagcttgtccatgcagctgatgcgcacggtgccgtacagcaccttgacgatgccgtgcatgcccgggtggtcgtgcagcgggatggacgtgccgctcttgagcaggaacacgcccagctgaagccgtccgtctcgtagatgtgcatgtaggtgactggcggcaggttgggcggcagcggctgcagtgtggccttgccggggcgatgttcaagtcctcggcgcggagctgggtcaggaggctcttcagcttgctcaggttctcggggaagcccggctgcatcggcgcc

SEQ ID NO: 284763 - DNA, 1144 bp, Homo sapiens
tgacttgaactaaaaacaattcaaaccactgggtcatgcacagtcaataagttaaaaaactataagaaaaaaaggcataagggcatgagtggaaaataaaccctatttaactaaggggtagggagtgggagcaagaaaaccacttagtattttgtatagaatggggaagagaggaagatattttcattatggctttaggatggaagcgcttcagatagtcccctgccccattcctccaaatcaaagccccagtggcagtgacagtaccaggaaacaatctagcctccccgcccaccccgcccccataaccgtgcccggcggctgctgtccagtcgcccgtgcttcccaaggctgccgaggaagcggctgctgctcattccagtagatccaacgcccaggctagggggtagagacacagcccttgtggtagggtagggcacgtcttcggcccaccgctcctgggcgccagtggcttcaagggaagaccttgggacctggatagggttctccctcgcaccagaagtcatcggcctgtggggtctccaggagccacacctctcgaggcaggtcacaggccgagctggaggcctccttgggcctgaccggctccagcacccgagacagactttcaccatgttgcccaagctggtcccacattcctgggctcaagggatccacctgccttggcctctcgaagtgctggtattacaggcatgagccactatgcccaggcaatccttcaggaagaagaccctggcgaaaattaccttgcatatcaagagttggcggatgaacacgaagcaatcaccttgggaaaaggagtgatgaaagtagaaagcactaaagagattctttatagttcttgatgggtagcctgagttgctcttgccatgtttttgtttgttttttttcactcctcaccgtatctttaaatcctatttttaaaaaaagtaatgaagaggtagccaagatgttcttcaacagatgaaaggataaataaatggtggtacatccagataatggaatattaatcagttataaaaaggaatgagctactaagccatgaaaagacatggaggaaacttaatccatgttactaaattaaagaacccaatctaaaaaggctgcatactgtgtaattcca

SEQ ID NO: 284764 - DNA, 475 bp, Homo sapiens
cggcgcacgaccacctcatgcggggcgacaaagcaacgtgaccttgctctgttgcccagctggagtgcagtggtgcaatcacggctcactgcaaccttgaactcctgggctcgggcaaccctccttcgtctgcctcccaagtagcctggactacagccgctcaaactcctctcgaatttcagcaggggttctcctcctttccacaacctatgcacagaatcaagatgggaagacagttgaggacccaggagaaacaggtttgctagctgctgagaattaaaatcctggactcaaaccctgtaggagaaaaaagaaaacaaagcctggaaagtgtgaagcttcacaaaggctgcagcaggaaaagattcattttcaggaattttagctgtttcatctttgaagactgaactaacagctgaaaattactttctctctgttacattctgtgatgaattacgaacgcaaataatccaaa

SEQ ID NO: 284765 - DNA, 493 bp, Homo sapiens
ttttttttgagacagagtcttgctctgtcgccacccaggctggagtacagtggcttacacctgtaatgccagcactttgggaggccaaggcaggtggatcatttgaggtcaggagttccagacctgcctggccaacatggtgaaaccccatctctactaaaaatacaaaaattagcagcgtgtagtggatacatgcctgtaatcccagctacttgggaggaaggaaggaaagaaggaaggaaggaaagacagacatctaagatatatcaaatgtatctgtgggtacaagagggtaggtgcggcacagagggagtgggaaaatcactataaagggtaaaagtagcaaaatacaatgagaggggccttgtgcagcccatatgtaataatgtgctaagaagtgattagaaattttgaatcactcaactccctatacctgaggcccccctttaaaaagctcacccttcttatatatgaagaaaccaagacactaagt

SEQ ID NO: 284766 - DNA, 989 bp, Homo sapiens
  misc_feature (1)..(3): n is a, c, g, or t
  misc_feature (252)..(252): n is a, c, g, or t
  misc_feature (321)..(321): n is a, c, g, or t
  misc_feature (510)..(510): n is a, c, g, or t
  misc_feature (536)..(536): n is a, c, g, or t
  misc_feature (539)..(539): n is a, c, g, or t
  misc_feature (576)..(576): n is a, c, g, or t
  misc_feature (585)..(585): n is a, c, g, or t
  misc_feature (714)..(714): n is a, c, g, or t
nnnggatattgcaggggatggacccagagggatgcgggggaagagggtctggttctctctagggtggttctggtcccctctgcgtcatgcttgggagtggccagagcctcctggcatagtcaacatgagcagtggtcccggttcctttcttttctcctctccccaagtgctatcctgttcatgcctgtgctcagagcttcctcccttctctcctgggctgtagctgaggcttggaaaggagaaggtccctgnttcctgcagctgatctgatctggagacacccccgtgtagactctggttacagccagatgctcaggttgncgagggactgccgtatgatgacaacataatgagcaaagtgaggagctctgagccattaatacggctgcccggctgaggtaccaaactgattgaacaatacttgaaaggctgaggctggggaggccagtggggctgggtggccctgcaaccacgtggctgcctgttgtcttccttcaactgctggagganttaaacaatgttcttcaaatgaggtnctngtgctcaaggacaggggctgccccaggcaaggagagnagcctgggnagttaccggaaaagcacctactgaatcacccagctacaggagcggagcgagggagcaggtgtgcaccatcaccccaggtgtctcagatgtaggctccatgaatgcaggggcaagaacggaggcccagcncccaggacttgaggtacgtgcggatgcgcttgcgggcccgctcctggaactcagggaactgccggctgcaggactcgatgatggcctggatcttctccttgggctgcttggagatgggcaccatgcggtccaggttctcgtccacaaagagacgcacaaacatctgtggagacacgggccatgggaagggctggccctggccttgcccccatcccaccccacctgtttccggccggtgctcacgttgaaggccttaagacgctcagggtccatgc

SEQ ID NO: 284767 - DNA, 1517 bp, Homo sapiens
gcgcaggccggcccgggccggggagggagcagcagcgcgggcaccctcctgcaacgtgggctgggggtccccagggccggggagggggccccggggaggaactgagagggggcgcgccccgggaaggctcggggcggctccggggggctcccagggcgcccccgccccttcccccgcggccccggggcgcccccgcggtgccggagtcggggcggggcgtgcacgtcagccggggctagaaaaggcggcggggctgggcccagcgaggtgacagcctcgcttggacgcagagcccggcccgacgccgccatgagcgccgcgctcttcagcctggacggcccggcgcgcggcgcgccctggcctgcggagcctgcgcccttctacgaaccgggccgggcgggcaagccgggccgcggggccgagccaggggccctaggcgagccaggcgccgccgcccccgccatgtacgacgacgagagcgccatcgacttcagcgcctacatcgactccatggccgccgtgcccaccctggagctgtgccacgacgagctcttcgccgacctcttcaacagcaatcacaaggcgggcggcgcggggcccctggagcttcttcccggcggccccgcgcgccccttgggcccgggccctgccgctccccgcctgctcaagcgcgagcccgactggggcgacggcgacgcgcccggctcgctgttgcccgcgcaggtggccgcgtgcgcacagaccgtggtgagcttggcggccgcagggcagcccaccccgcccacgtcgccggagccgccgcgcagcagccccaggcagacccccgcgcccggccccgcccgggagaagagcgccggcaagaggggcccggaccgcggcagccccgagtaccggcagcggcgcgagcgcaacaacatcgccgtgcgcaagagccgcgacaaggccaagcggcgcaaccaggagatgcagcagaagttggtggagctgtcggctgagaacgagaagctgcaccagcgcgtggagcagctcacgcgggacctggccggcctccggcagttcttcaagcagctgcccagcccgcccttcctgccggccgccgggacagcagactgccggtaacgcgcggccggggcgggagagactcagcaacgacccatacctcagacccgacggcccggagcggagcgcgccctgccctggcgcagccagagccgccgggtgcccgctgcagtttcttgggacataggagcgcaaagaagctacagcctggacttaccaccactaaactgcgagagaagctaaacgtgtttattttcccttaaattatttttgtaatggtagctttttctacatcttactcctgttgatgcagctaaggtacatttgtaaaaagaaaaaaaaccagacttttcagacaaaccctttgtattgtagataagaggaaaagactgagcatgctcacttttttatattaatttttacagtatttgtaagaataaagcagcatttgaaatcgc

SEQ ID NO: 284768 - DNA, 1523 bp, Homo sapiens
  misc_feature (460)..(460): n is a, c, g, or t
  misc_feature (650)..(650): n is a, c, g, or t
gcgcaggccggcccgggccggggagggagcagcagcgcgggcaccctcctgcaacgtgggctgggggtccccagggccggggagggggccccggggaggaactgagagggggcgcgccccgggaaggctcggggcggctccggggggctcccagggcgcccccgccccttcccccgcggccccggggcgcccccgcggtgccggagtcggggcggggcgtgcacgtcagccggggctagaaaaggcggcggggctgggcccagcgaggtgacagcctcgcttggacgcagagcccggcccgacgccgccatgagcgccgcgctcttcagcctggacggcccggcgcgcggcgcgccctggcctgcggagcctgcgcccaaccacagccaaagcctttgcaaacaaatcgcattaccacaaaagtcgctgttctataatagcccgattttctattctagancattgcggcgcttcccccatgccaatatcgacggacgatgagcgccagtcgagctttcagctgcctacagtcgagctccattgtgccggcgcgtggccccaccctggggagctatggtggccactgtatcaacagctagcagacacccatagccacgatacaaacaaacagacagcactgatgatttganattcagaggatctggttgacctctcgatgggaggtcaggccataccggctggctggtcttccgcagcggctgcgcccgaataggggtgccccctgtgtgcctctagctgctcgaacctgcccgttctccgaggtgtgaccagagttcttcgtaaatgtcgtgcctttattctatatgtttagcctggagctggtgtgtatatcttcagcctcgctaatcgggcatctatgagtttccccgtcttcttgggtattgtctcctgttttgattcactatctgatcgcctcgagatttggacttcattgtcgagaactcatcatcgaaatggaagtatattactccctgatttgaatatttaggatccccaaattggctgaattgattgtgccataaagccctctcagggtcaaaacactgaattttttttccaagattttaaagatactcgccgtggattaaattgtgatattgttgctttgtgagtggatgagataattgccttcaaagaagccagccagaacgcccgccagtgggggcgaggggagaaggcggagtgcggtagtgctttggttataatgctatgttgtttttttatattattggaatgtgccgaatttggcatttgggggaggaataccggattgtgttttaccatcagacattcctctataaatcgcttgttcaattttgtttttaattattgtgccatctgggcttgatggttggcttccatttttggcaaaatgcgccattaatacttggctttactttgtaatttttgggggttttttctagattctttttgtatatgcttctgtttcgagtatgtgttggttgttggggctgaaacggcggttaggggatgagattggc

SEQ ID NO: 284769 - DNA, 1283 bp, Homo sapiens
gcgcaggccggcccgggccggggagggagcagcagcgcgggcaccctcctgcaacgtgggctgggggtccccagggccggggagggggccccggggaggaactgagagggggcgcgccccgggaaggctcggggcggctccggggggctcccagggcgcccccgccccttcccccgcggccccggggcgcccccgcggtgccggagtcggggcggggcgtgcacgtcagccggggctagaaaaggcggcggggctgggcccagcgaggtgacagcctcgcttggacgcagagcccggcccgacgccgccatgagcgccgcgctcttcagcctggacggcccggcgcgcggcgcgccctggcctgcggagcctgcgcccttctacgaaccgggccgggcgggcaagccgggccctgccgctccccgcctgctcaagcgcgagcccgactggggcgacggcgacgcgcccggctcgctgttgcccgcgcaggtggccgcgtgcgcacagaccgtggtgagcttggcggccgcagggcagcccaccccgcccacgtcgccggagccgccgcgcagcagccccaggcagacccccgcgcccggccccgcccgggagaagagcgccggcaagaggggcccggaccgcggcagccccgagtaccggcagcggcgcgagcgcaacaacatcgccgtgcgcaagagccgcgacaaggccaagcggcgcaaccaggagatgcagcagaagttggtggagctgtcggctgagaacgagaagctgcaccagcgcgtggagcagctcacgcgggacctggccggcctccggcagttcttcaagcagctgcccagcccgcccttcctgccggccgccgggacagcagactgccggtaacgcgcggccggggcgggagagactcagcaacgacccatacctcagacccgacggcccggagcggagcgcgccctgccctggcgcagccagagccgccgggtgcccgctgcagtttcttgggacataggagcgcaaagaagctacagcctggacttaccaccactaaactgcgagagaagctaaacgtgtttattttcccttaaattatttttgtaatggtagctttttctacatcttactcctgttgatgcagctaaggtacatttgtaaaaagaaaaaaaaccagacttttcagacaaaccctttgtattgtagataagaggaaaagactgagcatgctcacttttttatattaatttttacagtatttgtaagaataaagcagcatttgaaatcgc

SEQ ID NO: 284770 - DNA, 1545 bp, Homo sapiens
gcgcaggccggcccgggccggggagggagcagcagcgcgggcaccctcctgcaacgtgggctgggggtccccagggccggggagggggccccggggaggaactgagagggggcgcgccccgggaaggctcggggcggctccggggggctcccagggcgcccccgccccttcccccgcggccccggggcgcccccgcggtgccggagtcggggcggggcgtgcacgtcagccggggctagaaaaggcggcggggctgggcccagcgaggtgacagcctcgcttggacgcagagcccggcccgacgccgccatgagcgccgcgctcttcagcctggacggcccggcgcgcggcgcgccctggcctgcggagcctgcgcccttctacgaaccgggccgggcgggcaagccgggccgcggggccgagccaggggccctaggcgagccaggcgccgccgcccccgccatgtacgacgacgagagcgccatcgacttcagcgcctacatcgactccatggccgccgtgcccaccctggagctgtgccacgacgagctcttcgccgacctcttcaacagcaatcacaaggcgggcggcgcggggcccctggagcttcttcccggcggccccgcgcgccccttgggcccgggccctgccgctccccgcctgctcaagcgcgagcccgactggggcgacggcgacgcgcccggctcgctgttgcccgcgcaggtggccgcgtgcgcacagaccgtggtgagcttggcggccgcagggcagcccaccccgcccacgtcgccggagccgccgcgcagcagccccaggcagacccccgcgcccggccccgcccgggagaagagcgccggcaagaggggcccggaccgcggcagccccgagtaccggcagcggcgcgagcgcaacaacatcgccgtgcgcaagagccgcgacaaggccaagcggcgcaaccaggagatgcagcagaagttggtggagctgtcggctgagaacgagaagctgcaccagcgcgtggagcagctcacgcgggacctggccggcctccggcagttcttcaagcagctgcccagcccgcccttcctgccggccgccgggacagcagactgccggtaacgcgcggccggggcgggagagactcagcaacgacccatacctcagacccgacggcccggagcggagcgcgccctgccctggcgcagccagagccgccgggtgcccgctgcagtttcttgggacataggagcgcaaagaagctacagcctggacttaccaccactaaactgcgagagaagctaaacgtgtttattttcccttaaattatttttgtaatggtagctttttctacatcttactcctgttgatgcagctaaggtacatttgtaaaaagaaaaaaaaccagacttttcagacaaaccctttgtattgtagataagaggaaaagactgagcatgctcacttttttatattaatttttacagtatttgtaagaataaagcagcatttgaaatcgcaaaaaaaaaaaataaatataaaccatgt

SEQ ID NO: 284771 - DNA, 2119 bp, Homo sapiens
gcgcaggccggcccgggccggggagggagcagcagcgcgggcaccctcctgcaacgtgggctgggggtccccagggccggggagggggccccggggaggaactgagagggggcgcgccccgggaaggctcggggcggctccggggggctcccagggcgcccccgccccttcccccgcggccccggggcgcccccgcggtgccggagtcggggcggggcgtgcacgtcagccggggctagaaaaggcggcggggctgggcccagcgaggtgacagcctcgcttggacgcagagcccggcccgacgccgccatgagcgccgcgctcttcagcctggacggcccggcgcgcggcgcgccctggcctgcggagcctgcgcccttctacgaaccgggccgggcgggcaagccgggccgcggggccgagccaggggccctaggcgagccaggcgccgccgcccccgccatgtacgacgacgagagcgccatcgacttcagcgcctacatcgactccatggccgccgtgcccaccctggagctgtgccacgacgagctcttcgccgacctcttcaacagcaatcacaaggcgggcggcgcggggcccctggagcttcttcccggcggccccgcgcgccccttgggcccgggccctgccgctccccgcctgctcaagcgcgagcccgactggggcgacggcgacgcgcccggctcgctgttgcccgcgcaggtggccgcgtgcgcacagaccgtggtgagcttggcggccgcagggcagcccaccccgcccacgtcgccggagccgccgcgcagcagccccaggcagacccccgcgcccggccccgcccgggagaagagcgccggcaagaggggcccggaccgcggcagccccgagtaccggcagcggcgcgagcgcaacaacatcgccgtgcgcaagagccgcgacaaggccaagcggcgcaaccaggagatgcagcagaagttggtggagctgtcggctgagaacgagaagctgcaccagcgcgtggagcagctcacgcgggacctggccggcctccggcagttcttcaagcagctgcccagcccgcccttcctgccggccgccgggacagcagactgccggtaacgcgcggccggggcgggagagactcagcaacgacccatacctcagacccgacggcccggagcggagcgcgccctgccctggcgcagccagagccgccgggtgcccgctgcagtttcttgggacataggagcgcaaagaagctacagcctggacttaccaccactaaactgcgagagaagctaaacgtgtttattttcccttaaattatttttgtaatggtagctttttctacatcttactcctgttgatgcagctaaggtacatttgtaaaaagaaaaaaaaccagacttttcagacaaaccctttgtattgtagataagaggaaaagactgagcatgctcacttttttatattaatttttacagtatttgtaagaataaagcagcatttgaaatcgcaatcgcccctgcttcctatattcgcagtgactcccgcccgcccgccggtggcgcaggacccggctcgggaagggtgcgttccggacccgcagccagcgagcaccagggagcccgggcgccaggtgtgtgtgtggggggggcggggggatggggcgcaggcccgagctactcaggagagagggtctgtcgcttttaaaacgcattaaaggctctctcctggccttatttaacttgcctaagctaggtggagcacggctgagctcaggtaagctagcagctttccagcagaaggtgttctcccgaagaacgcagacctggggaagggttgactttttgggggcccctgctgagaacagttcaagagctccctaactgtagaggctgctggaggggcgaggggcagaaccccgggctgaatcatctcccgctttcccgggactttgctttcactttcctcagtcttgtggacagagtcaagtagattttcaaaagtgctccagaaaggccggaatagtcatgtagtggatgaaaagggcagtcacaaaactgcttaagaccagctgtcttgccagtaattgcagtgctttaagatttaattaaaa

SEQ ID NO: 284772 - DNA, 2485 bp, Homo sapiens
gcgcaggccggcccgggccggggagggagcagcagcgcgggcaccctcctgcaacgtgggctgggggtccccagggccggggagggggccccggggaggaactgagagggggcgcgccccgggaaggctcggggcggctccggggggctcccagggcgcccccgccccttcccccgcggccccggggcgcccccgcggtgccggagtcggggcggggcgtgcacgtcagccggggctagaaaaggcggcggggctgggcccagcgaggtgacagcctcgcttggacgcagagcccggcccgacgccgccatgagcgccgcgctcttcagcctggacggcccggcgcgcggcgcgccctggcctgcggagcctgcgcccttctacgaaccgggccgggcgggcaagccgggccgcggggccgagccaggggccctaggcgagccaggcgccgccgcccccgccatgtacgacgacgagagcgccatcgacttcagcgcctacatcgactccatggccgccgtgcccaccctggagctgtgccacgacgagctcttcgccgacctcttcaacagcaatcacaaggcgggcggcgcggggcccctggagcttcttcccggcggccccgcgcgccccttgggcccgggccctgccgctccccgcctgctcaagcgcgagcccgactggggcgacggcgacgcgcccggctcgctgttgcccgcgcaggtggccgcgtgcgcacagaccgtggtgagcttggcggccgcagggcagcccaccccgcccacgtcgccggagccgccgcgcagcagccccaggcagacccccgcgcccggccccgcccgggagaagagcgccggcaagaggggcccggaccgcggcagccccgagtaccggcagcggcgcgagcgcaacaacatcgccgtgcgcaagagccgcgacaaggccaagcggcgcaaccaggagatgcagcagaagttggtggagctgtcggctgagaacgagaagctgcaccagcgcgtggagcagctcacgcgggacctggccggcctccggcagttcttcaagcagctgcccagcccgcccttcctgccggccgccgggacagcagactgccggtaacgcgcggccggggcgggagagactcagcaacgacccatacctcagacccgacggcccggagcggagcgcgccctgccctggcgcagccagagccgccgggtgcccgctgcagtttcttgggacataggagcgcaaagaagctacagcctggacttaccaccactaaactgcgagagaagctaaacgtgtttattttcccttaaattatttttgtaatggtagctttttctacatcttactcctgttgatgcagctaaggtacatttgtaaaaagaaaaaaaaccagacttttcagacaaaccctttgtattgtagataagaggaaaagactgagcatgctcacttttttatattaatttttacagtatttgtaagaataaagcagcatttgaaatcgcaatcgcccctgcttcctatattcgcagtgactcccgcccgcccgccggtggcgcaggacccggctcgggaagggtgcgttccggacccgcagccagcgagcaccagggagcccgggcgccagggtctctcgctctgtcatccaggctggagtggagcaatcatggctcactgaggccaaccctacggctgttttcaagtcttccacactctttaaaggaaggccaccccgacatgtcacgagtcaatgaaatgtaagaggcactttctgagaacatgttctcacttataaaaaagcccttggagacacccctcaagagagatagagtaaggatgggggcaccacatcacttacatctcatgagggccccatggagagactgagactgggctgtactggagatgagggccacgcggaaggagtcctgccaactcacgtcctccagggctgagcctgcacactactcccaaccccatgatgtgcaggtgatgtgcatttgctcagaggaaagctggctgcagacttggggatagaaaggacactgtccaccttccacggcagaaattctgaatctctctcagcttcatcttcctcccttgtaggattctgtgattctctaattcctagtgctgctgctatccctcgctgacatgtgcctctgtttgaggaggaaagacagttccaaagtctccagtgctaggtgtgggtgctgaagcagacacctttctatgagagtgtggcagcatggggcgctagaaacaaccagccatctgtgataagtgccttctgcaggctgacaggtgagcttggctgactgaagactttttgtgttacaaagtgctctctggtgcaaagcagaattgcacctgaacatttccaatctatttgtaaagaaaaatttacaaagacagagccattaactttaattttaaaaacatttccaaatttgctgttttagtaattaccaga

SEQ ID NO: 284773 - DNA, 1772 bp, Homo sapiens
  misc_feature (1602)..(1602): n is a, c, g, or t
gcgcaggccggcccgggccggggagggagcagcagcgcgggcaccctcctgcaacgtgggctgggggtccccagggccggggagggggccccggggaggaactgagagggggcgcgccccgggaaggctcggggcggctccggggggctcccagggcgcccccgccccttcccccgcggccccggggcgcccccgcggtgccggagtcggggcggggcgtgcacgtcagccggggctagaaaaggcggcggggctgggcccagcgaggtgacagcctcgcttggacgcagagcccggcccgacgccgccatgagcgccgcgctcttcagcctggacggcccggcgcgcggcgcgccctggcctgcggagcctgcgcccttctacgaaccgggccgggcgggcaagccgggccgcggggccgagccaggggccctaggcgagccaggcgccgccgcccccgccatgtacgacgacgagagcgccatcgacttcagcgcctacatcgactccatggccgccgtgcccaccctggagctgtgccacgacgagctcttcgccgacctcttcaacagcaatcacaaggcgggcggcgcggggcccctggagcttcttcccggcggccccgcgcgccccttgggcccgggccctgccgctccccgcctgctcaagcgcgagcccgactggggcgacggcgacgcgcccggctcgctgttgcccgcgcaggtggccgcgtgcgcacagaccgtggtgagcttggcggccgcagggcagcccaccccgcccacgtcgccggagccgccgcgcagcagccccaggcagacccccgcgcccggccccgcccgggagaagagcgccggcaagaggggcccggaccgcggcagccccgagtaccggcagcggcgcgagcgcaacaacatcgccgtgcgcaagagccgcgacaaggccaagcggcgcaaccaggagatgcagcagaagttggtggagctgtcggctgagaacgagaagctgcaccagcgcgtggagcagctcacgcgggacctggccggcctccggcagttcttcaagcagctgcccagcccgcccttcctgccggccgccgggacagcagactgccggtaacgcgcggccggggcgggagagactcagcaacgacccatacctcagacccgacggcccggagcggagcgcgccctgccctggcgcagccagagccgccgggtgcccgctgcagtttcttgggacataggagcgcaaagaagctacagcctggacttaccaccactaaactgcgagagaagctaaacgtgtttattttcccttaaattatttttgtaatggtagctttttctacatcttactcctgttgatgcagctaaggtacatttgtaaaaagaaaaaaaaccagacttttcagacaaaccctttgtattgtagataagaggaaaagactaatcgcccctgcttcctatattcgcagtgactcccgcccgcccgccggtggcgcaggacccggctcgggaagggtgcgttccggacccgcagccagcgagcaccagggagcccgggcgccaggtgtgtgtgtggggggggcggggggattgngttaaggactttggctggtaatgactgactcagtgttgcatttatctttcagccatgaatcgcacggctatagcatggcttgcaccgatctacgtctgcttagtgcttgccatgaggaggtgaaggtctgcgtttgaacggagatgctcaaggggtaggactgtgcttgc

SEQ ID NO: 284774 - DNA, 1466 bp, Homo sapiens
gcgcaggccggcccgggccggggagggagcagcagcgcgggcaccctcctgcaacgtgggctgggggtccccagggccggggagggggccccggggaggaactgagagggggcgcgccccgggaaggctcggggcggctccggggggctcccagggcgcccccgccccttcccccgcggccccggggcgcccccgcggtgccggagtcggggcggggcgtgcacgtcagccggggctagaaaaggcggcggggctgggcccagcgaggtgacagcctcgcttggacgcagagcccggcccgacgccgccatgagcgccgcgctcttcagcctggacggcccggcgcgcggcgcgccctggcctgcggagcctgcgcccttctacgaaccgggccgggcgggcaagccgggccgcggggccgagccaggggccctaggcgagccaggcgccgccgcccccgccatgtacgacgacgagagcgccatcgacttcagcgcctacatcgactccatggccgccgtgcccaccctggagctgtgccacgacgagctcttcgccgacctcttcaacagcaatcacaaggcgggcggcgcggggcccctggagcttcttcccggcggccccgcgcgccccttgggcccgggccctgccgctccccgcctgctcaagcgcgagcccgactggggcgacggcgacgcgcccggctcgctgttgcccgcgcaggtggccgcgtgcgcacagaccgtggtgagcttggcggccgcagggcagcccaccccgcccacgtcgccggagccgccgcgcagcagccccaggcagacccccgcgcccggccccgcccgggagaagagcgccggcaagaggggcccggaccgcggcagccccgagtaccggcagcggcgcgagcgcaacaacatcgccgtgcgcaagagccgcgacaaggccaagcggcgcaaccaggagatgcagcagaagttggtggagctgtcggctgagaacgagaagctgcaccagcgcgtggagcagctcacgcgggacctggccggcctccggcagttcttcaagcagctgcccagcccgcccttcctgccggccgccgggacagcagactgccggtaacgcgcggccggggcgggagagactcagcaacgacccatacctcagacccgacggcccggagcggagcgcgccctgccctggcgcagccagagccgccgggtgcccgctgcagtttcttgggacataggagcgcaaagaagctacagcctggacttaccaccactaaactgcgagagaagctaaacgtgtttattttcccttaaattatttttgtaatggtagctttttctacatcttactcctgttgatgcagctaaggtacatttgtaaaaagaaaaaagagcatgctcacttttttatattaatttttacagtatttgtaagaataaagcagcatttgaaatcgc

SEQ ID NO: 284775 - DNA, 1456 bp, Homo sapiens
gcgcaggccggcccgggccggggagggagcagcagcgcgggcaccctcctgcaacgtgggctgggggtccccagggccggggagggggccccggggaggaactgagagggggcgcgccccgggaaggctcggggcggctccggggggctcccagggcgcccccgccccttcccccgcggccccggggcgcccccgcggtgccggagtcggggcggggcgtgcacgtcagccggggctagaaaaggcggcggggctgggcccagcgaggtgacagcctcgcttggacgcagagcccggcccgacgccgccatgagcgccgcgctcttcagcctggacggcccggcgcgcggcgcgccctggcctgcggagcctgcgcccttctacgaaccgggccgggcgggcaagccgggccgcggggccgagccaggggccctaggcgagccaggcgccgccgcccccgccatgtacgacgacgagagcgccatcgacttcagcgcctacatcgactccatggccgccgtgcccaccctggagctgtgccacgacgagctcttcgccgacctcttcaacagcaatcacaaggcgggcggcgcggggcccctggagcttcttcccggcggccccgcgcgccccttgggcccgggccctgccgctccccgcctgctcaagcgcgagcccgactggggcgacggcgacgcgcccggctcgctgttgcccgcgcaggtggccgcgtgcgcacagaccgtggtgagcttggcggccgcagggcagcccaccccgcccacgtcgccggagccgccgcgcagcagccccaggcagacccccgcgcccggccccgcccgggagaagagcgccggcaagaggggcccggaccgcggcagccccgagtaccggcagcggcgcgagcgcaacaacatcgccgtgcgcaagagccgcgacaaggccaagcggcgcaaccaggagatgcagcagaagttggtggagctgtcggctgagaacgagaagctgcaccagcgcgtggagcagctcacgcgggacctggccggcctccggcagttcttcaagcagctgcccagcccgcccttcctgccggccgccgggacagcagactgccggtaacgcgcggccggggcgggagagactcacagagccgccgggtgcccgctgcagtttcttgggacataggagcgcaaagaagctacagcctggacttaccaccactaaactgcgagagaagctaaacgtgtttattttcccttaaattatttttgtaatggtagctttttctacatcttactcctgttgatgcagctaaggtacatttgtaaaaagaaaaaaaaccagacttttcagacaaaccctttgtattgtagataagaggaaaagactgagcatgctcacttttttatattaatttttacagtatttgtaagaataaagcagcatttgaaatcgc

SEQ ID NO: 284776 - DNA, 1415 bp, Homo sapiens
gcgcaggccggcccgggccggggagggagcagcagcgcgggcaccctcctgcaacgtgggctgggggtccccagggccggggagggggccccggggaggaactgagagggggcgcgccccgggaaggctcggggcggctccggggggctcccagggcgcccccgccccttcccccgcggccccggggcgcccccgcggtgccggagtcggggcggggcgtgcacgtcagccggggctagaaaaggcggcggggctgggcccagcgaggtgacagcctcgcttggacgcagagcccggcccgacgccgccatgagcgccgcgctcttcagcctggacggcccggcgcgcggcgcgccctggcctgcggagcctgcgcccttctacgaaccgggccgggcgggcaagccgggccgcggggccgagccaggggccctaggcgagccaggcgccgccgcccccgccatgtacgacgacgagagcgccatcgacttcagcgcctacatcgactccatggccgccgtgcccaccctggagctgtgccacgacgagctcttcgccgacctcttcaacagcaatcacaaggcgggcggcgcggggcccctggagcttcttcccggcggccccgcgcgccccttgggcccgggccctgccgctccccgcctgctcaagcgcgagcccgactggggcgacggcgacgcgcccggctcgctgttgcccgcgcaggtggccgcgtgcgcacagaccgtggtgagcttggcggccgcagggcagcccaccccgcccacgtcgccggagccgccgcgcagcagccccaggcagacccccaagagccgcgacaaggccaagcggcgcaaccaggagatgcagcagaagttggtggagctgtcggctgagaacgagaagctgcaccagcgcgtggagcagctcacgcgggacctggccggcctccggcagttcttcaagcagctgcccagcccgcccttcctgccggccgccgggacagcagactgccggtaacgcgcggccggggcgggagagactcagcaacgacccatacctcagacccgacggcccggagcggagcgcgccctgccctggcgcagccagagccgccgggtgcccgctgcagtttcttgggacataggagcgcaaagaagctacagcctggacttaccaccactaaactgcgagagaagctaaacgtgtttattttcccttaaattatttttgtaatggtagctttttctacatcttactcctgttgatgcagctaaggtacatttgtaaaaagaaaaaaaaccagacttttcagacaaaccctttgtattgtagataagaggaaaagactgagcatgctcacttttttatattaatttttacagtatttgtaagaataaagcagcatttgaaatcgc

SEQ ID NO: 284777 - DNA, 728 bp, Homo sapiens
cagggccgcagaccttctttcacaggcggacgccagagccccgtcctgcccggaagaacagggcccccaggagggccggcgccgcttaatcgggtactgctgctaggaggactgcgctgcagctggggcgggcgctggaagagccgcgacaaggccaagcggcgcaaccaggagatgcagcagaagttggtggagctgtcggctgagaacgagaagctgcaccagcgcgtggagcagctcacgcgggacctggccggcctccggcagttcttcaagcagctgcccagcccgcccttcctgccggccgccgggacagcagactgccggtaacgcgcggccggggcgggagagactcagcaacgacccatacctcagacccgacggcccggagcggagcgcgccctgccctggcgcagccagagccgccgggtgcccgctgcagtttcttgggacataggagcgcaaagaagctacagcctggacttaccaccactaaactgcgagagaagctaaacgtgtttattttcccttaaattatttttgtaatggtagctttttctacatcttactcctgttgatgcagctaaggtacatttgtaaaaagaaaaaaaaccagacttttcagacaaaccctttgtattgtagataagaggaaaagactgagcatgctcacttttttatattaatttttacagtatttgtaagaataaagcagcatttgaaatcgc

SEQ ID NO: 284778 - DNA, 1353 bp, Homo sapiens
gcgcaggccggcccgggccggggagggagcagcagcgcgggcaccctcctgcaacgtgggctgggggtccccagggccggggagggggccccggggaggaactgagagggggcgcgccccgggaaggctcggggcggctccggggggctcccagggcgcccccgccccttcccccgcggccccggggcgcccccgcggtgccggagtcggggcggggcgtgcacgtcagccggggctagaaaaggcggcggggctgggcccagcgaggtgacagcctcgcttggacgcagagcccggcccgacgccgccatgagcgccgcgctcttcagcctggacggcccggcgcgcggcgcgccctggcctgcggagcctgcgcccttctacgaaccgggccgggcgggcaagccgggccgcggggccgagccaggggccctaggcgagccaggcgccgccgcccccgccatgtacgacgacgagagcgccatcgacttcagcgcctacatcgactccatggccgccgtgcccaccctggagctgtgccacgacgagctcttcgccgacctcttcaacagcaatcacaaggcgggcggcgcggggcccctggagcttcttcccggcggccccgcgcgccccttgggcccgggccctgccgctccccgcctgctcaagcgcgagcccgactggggcgacggcgacgcgcccggctcgctgttgcccgcgcaggtggccgcgtgcgcacagaccgtggtgagcttggcggccgcagggcagcccaccccgcccacgtcgccggagccgccgcgcagcagccccaggcagacccccgcgcccggccccgcccgggagaagagcgccggcaagaggggcccggaccgcggcagccccgagtaccggcagcggcgcgagcgcaacaacatcgccgtgcgcggccgccgggacagcagactgccggtaacgcgcggccggggcgggagagactcagcaacgacccatacctcagacccgacggcccggagcggagcgcgccctgccctggcgcagccagagccgccgggtgcccgctgcagtttcttgggacataggagcgcaaagaagctacagcctggacttaccaccactaaactgcgagagaagctaaacgtgtttattttcccttaaattatttttgtaatggtagctttttctacatcttactcctgttgatgcagctaaggtacatttgtaaaaagaaaaaaaaccagacttttcagacaaaccctttgtattgtagataagaggaaaagactgagcatgctcacttttttatattaatttttacagtatttgtaagaataaagcagcatttgaaatcgc

SEQ ID NO: 284779 - DNA, 1251 bp, Homo sapiens
gcgcaggccggcccgggccggggagggagcagcagcgcgggcaccctcctgcaacgtgggctgggggtccccagggccggggagggggccccggggaggaactgagagggggcgcgccccgggaaggctcggggcggctccggggggctcccagggcgcccccgccccttcccccgcggccccggggcgcccccgcggtgccggagtcggggcggggcgtgcacgtcagccggggctagaaaaggcggcggggctgggcccagcgaggtgacagcctcgcttggacgcagagcccggcccgacgccgccatgagcgccgcgctcttcagcctggacggcccggcgcgcggcgcgccctggcctgcggagcctgcgcccttctacgaaccgggccgggcgggcaagccgggccgcggggccgagccaggggccctaggcgagccaggcgccgccgcccccgccatgtacgacgacgagagcgccatcgacttcagcgcctacatcgactccatggccgccgtgcccaccctggagctgtgccacgacgagctcttcgccgacctcttcaacagcaatcacaaggcgggcggcgcggggcccctggagcttcttcccggcggccccgcgcgccccttgggcccgggccctgccgctccccgcctgctcaagcgcgagcccgactggggcgacggcgacgcgcccggctcgctgttgcccgcgcaggtggccgcgtgcgcacagaccgtggtgagcttggcggccgcagggcagcccaccccgcccacgtcgccggagccgccgcgcagcagccccaggcagacccccggccgccgggacagcagactgccggtaacgcgcggccggggcgggagagactcagcaacgacccatacctcagacccgacggcccggagcggagcgcgccctgccctggcgcagccagagccgccgggtgcccgctgcagtttcttgggacataggagcgcaaagaagctacagcctggacttaccaccactaaactgcgagagaagctaaacgtgtttattttcccttaaattatttttgtaatggtagctttttctacatcttactcctgttgatgcagctaaggtacatttgtaaaaagaaaaaaaaccagacttttcagacaaaccctttgtattgtagataagaggaaaagactgagcatgctcacttttttatattaatttttacagtatttgtaagaataaagcagcatttgaaatcgc

SEQ ID NO: 284780 - DNA, 1137 bp, Homo sapiens
  misc_feature (1103)..(1103): n is a, c, g, or t
gcgcaggccggcccgggccggggagggagcagcagcgcgggcaccctcctgcaacgtgggctgggggtccccagggccggggagggggccccggggaggaactgagagggggcgcgccccgggaaggctcggggcggctccggggggctcccagggcgcccccgccccttcccccgcggccccggggcgcccccgcggtgccggagtcggggcggggcgtgcacgtcagccggggctagaaaaggcggcggggctgggcccagcgaggtgacagcctcgcttggacgcagagcccggcccgacgccgccatgagcgccgcgctcttcagcctggacggcccggcgcgcggcgcgccctggcctgcggagcctgcgcccttctacgaaccgggccgggcgggcaagccgggccgcggggccgagccaggggccctaggcgagccaggcgccgccgcccccgccatgtacgacgacgagagcgccatcgacttcagcgcctacatcgactccatggccgccgtgcccaccctggagctgtgccacgacgagctcttcgccgacctcttcaacagcaatcacaaggcgggcggcgcggggcccctggagcttcttcccggcggccccgcgcgccccttgggcccgggccctgccgctccccgcctgctcaagcgcgagcccgactggggcgacggcgacgcgcccggctcgctgttgcccgcgcaggtggccgcgtgcgcacagaccgtggtgagcttggcggccgcagggcagcccaccccgcccacgtcgccggagccgccgcgcagcagccccaggcagacccccgcgcccggccccgcccgggagaagagcgccggcaagaggggcccggaccgcggcagccccgagtaccggcagcggcgcgagcgcaacaacatcgccgtgcgcaagagccgcgacaaggccaagcggcgcaaccaggagatgcagcagaagttggtggagctgtcggctgagaacgagaagctgcaccagcgcgtggagcagctcacgcgggacctggccggcctccggcagttcttcaagcagctgcccagcccgcccttcctgccagccaaaggggnaaaaccttttggtccccccggggggtttttaaaa

SEQ ID NO: 284781 - DNA, 1349 bp, Homo sapiens
gcgcaggccggcccgggccggggagggagcagcagcgcgggcaccctcctgcaacgtgggctgggggtccccagggccggggagggggccccggggaggaactgagagggggcgcgccccgggaaggctcggggcggctccggggggctcccagggcgcccccgccccttcccccgcggccccggggcgcccccgcggtgccggagtcggggcggggcgtgcacgtcagccggggctagaaaaggcggcggggctgggcccagcgaggtgacagcctcgcttggacgcagagcccggcccgacgccgccatgagcgccgcgctcttcagcctggacggcccggcgcgcggcgcgccctggcctgcggagcctgcgcccttctacgaaccgggccgggcgggcaagccgggccgcggggccgagccaggggccctaggcgagccaggcgccgccgcccccgccatgtacgacgacgagagcgccatcgacttcagcgcctacatcgactccatggccgccgtgcccaccctggagctgtgccacgacgagctcttcgccgacctcttcaacagcaatcacaaggcgggcggcgcggggcccctggagcttcttcccggcggccccgcgcgccccttgggcccgggccctgccgctccccgcctgctcaagcgcgagcccgactggggcgacggcgacgcgcccggctcgctgttgcccgcgcaggtggccgcgtgcgcacagaccgtggtgagcttggcggccgcagggcagcccaccccgcccacgtcgccggagccgccgcgcagcagccccaggcagacccccgcgcccggccccgcccgggagaagagcgccggcaagaggggcccggaccgcggcagccccgagtaccggcagcggcgcgagcgcaacaacatcgccgtgcgcaagagccgcgacaaggccaagcggcgcaaccaggagatgcagcagaagttggtggagctgtcggctgagaacgagaagctgcaccagcgcgtggagcagctcacgcgggaccagagccgccgggtgcccgctgcagtttcttgggacataggagcgcaaagaagctacagcctggacttaccaccactaaactgcgagagaagctaaacgtgtttattttcccttaaattatttttgtaatggtagctttttctacatcttactcctgttgatgcagctaaggtacatttgtaaaaagaaaaaaaaccagacttttcagacaaaccctttgtattgtagataagaggaaaagactgagcatgctcacttttttatattaatttttacagtatttgtaagaataaagcagcatttgaaatcgc

SEQ ID NO: 284782 - DNA, 1168 bp, Homo sapiens
gcgcaggccggcccgggccggggagggagcagcagcgcgggcaccctcctgcaacgtgggctgggggtccccagggccggggagggggccccggggaggaactgagagggggcgcgccccgggaaggctcggggcggctccggggggctcccagggcgcccccgccccttcccccgcggccccggggcgcccccgcggtgccggagtcggggcggggcgtgcacgtcagccggggctagaaaaggcggcggggctgggcccagcgaggtgacagcctcgcttggacgcagagcccggcccgacgccgccatgagcgccgcgctcttcagcctggacggcccggcgcgcggcgcgccctggcctgcggagcctgcgcccttctacgaaccgggccgggcgggcaagccgggccgcggggccgagccaggggccctaggcgagccaggcgccgccgcccccgccatgtacgacgacgagagcgccatcgacttcagcgcctacatcgactccatggccgccgtgcccaccctggagctgtgccacgacgagctcttcgccgacctcttcaacagcaatcacaaggcgggcggcgcggggcccctggagcttcttcccggcggccccgcgcgccccttgggcccgggccctgccgctccccgcctgctcaagcgcgagcccgactggggcgacggcgacgcgcccggctcgctgttgcccgcgcaggtggccgcgtgcgcacagaccgtggtgagcttggcggccgcagggcagcccaccccgcccacgtcgccggagccgccgcgcagcagccccaggcagacccccccggagcggagcgcgccctgccctggcgcagccagagccgccgggtgcccgctgcagtttcttgggacataggagcgcaaagaagctacagcctggacttaccaccactaaactgcgagagaagctaaacgtgtttattttcccttaaattatttttgtaatggtagctttttctacatcttactcctgttgatgcagctaaggtacatttgtaaaaagaaaaaaaaccagacttttcagacaaaccctttgtattgtagataagaggaaaagactgagcatgctcacttttttatattaatttttacagtatttgtaagaataaagcagcatttgaaatcgc

SEQ ID NO: 284783 - DNA, 1278 bp, Homo sapiens
gcgcaggccggcccgggccggggagggagcagcagcgcgggcaccctcctgcaacgtgggctgggggtccccagggccggggagggggccccggggaggaactgagagggggcgcgccccgggaaggctcggggcggctccggggggctcccagggcgcccccgccccttcccccgcggccccggggcgcccccgcggtgccggagtcggggcggggcgtgcacgtcagccggggctagaaaaggcggcggggctgggcccagcgaggtgacagcctcgcttggacgcagagcccggcccgacgccgccatgagcgccgcgctcttcagcctggacggcccggcgcgcggcgcgccctggcctgcggagcctgcgcccttctacgaaccgggccgggcgggcaagccgggccgcggggccgagccaggggccctaggcgagccaggcgccgccgcccccgccatgtacgacgacgagagcgccatcgacttcagcgcctacatcgactccatggccgccgtgcccaccctggagctgtgccacgacgagctcttcgccgacctcttcaacagcaatcacaaggcgggcggcgcggggcccctggagcttcttcccggcggccccgcgcgccccttgggcccgggccctgccgctccccgcctgctcaagcgcgagcccgactggggcgacggcgacgcgcccggctcgctgttgcccgcgcaggtggccgcgtgcgcacagaccgtggtgagcttggcggccgcagggcagcccaccccgcccacgtcgccggagccgccgcgcagcagccccaggcagacccccgcgcccggccccgcccgggagaagagcgccggcaagaggggcccggaccgcggcagccccgagtaccggcagcggcgcgagcgcaacaacatcgccgtgcgcaagagccgcgacaaggccaagcggcgcaaccaggagatgccagagccgccgggtgcccgctgcagtttcttgggacataggagcgcaaagaagctacagcctggacttaccaccactaaactgcgagagaagctaaacgtgtttattttcccttaaattatttttgtaatggtagctttttctacatcttactcctgttgatgcagctaaggtacatttgtaaaaagaaaaaaaaccagacttttcagacaaaccctttgtattgtagataagaggaaaagactgagcatgctcacttttttatattaatttttacagtatttgtaagaataaagcagcatttgaaatcgc

SEQ ID NO: 284784 - DNA, 1253 bp, Homo sapiens
gcgcaggccggcccgggccggggagggagcagcagcgcgggcaccctcctgcaacgtgggctgggggtccccagggccggggagggggccccggggaggaactgagagggggcgcgccccgggaaggctcggggcggctccggggggctcccagggcgcccccgccccttcccccgcggccccggggcgcccccgcggtgccggagtcggggcggggcgtgcacgtcagccggggctagaaaaggcggcggggctgggcccagcgaggtgacagcctcgcttggacgcagagcccggcccgacgccgccatgagcgccgcgctcttcagcctggacggcccggcgcgcggcgcgccctggcctgcggagcctgcgcccttctacgaaccgggccgggcgggcaagccgggccgcggggccgagccaggggccctaggcgagccaggcgccgccgcccccgccatgtacgacgacgagagcgccatcgacttcagcgcctacatcgactccatggccgccgtgcccaccctggagctgtgccacgacgagctcttcgccgacctcttcaacagcaatcacaaggcgggcggcgcggggcccctggagcttcttcccggcggccccgcgcgccccttgggcccgggccctgccgctccccgcctgctcaagcgcgagcccgactggggcgacggcgacgcgcccggctcgctgttgcccgcgcaggtggccgcgtgcgcacagaccgtggtgagcttggcggccgcagggcagcccaccccgcccacgtcgccggagccgccgcgcagcagccccaggcagacccccgcgcccggccccgcccgggagaagagcgccggcaagaggggcccggaccgcggcagccccgagtaccggcagcggcgcgagcgcaacaacatcgccgtgcgcaagagccgcgacaaggccaagcggcgcaaccaggagatgctttcttgggacataggagcgcaaagaagctacagcctggacttaccaccactaaactgcgagagaagctaaacgtgtttattttcccttaaattatttttgtaatggtagctttttctacatcttactcctgttgatgcagctaaggtacatttgtaaaaagaaaaaaaaccagacttttcagacaaaccctttgtattgtagataagaggaaaagactgagcatgctcacttttttatattaatttttacagtatttgtaagaataaagcagcatttgaaatcgc

SEQ ID NO: 284785 - DNA, 932 bp, Homo sapiens
gaactgcttgaagaactgccggaggccggccaggtcccgcgtgagctgctccacgcgctggtgcagcttctcgtcctcagccgacagctccaccaacttctgcgagagaagctaaacgtgtttattttcccttaaattatttttgtaatggtagctttttctacatcttactcctgttgatgcagctaaggtacatttgtaaaaagaaaaaaaaccagacttttcagacaaaccctttgtattgtagataagaggaaaagactgagcatgctcacttttttatattaatttttacagtatttgtaagaataaagcagcatttgaaatcgcaatcgcccctgcttcctatattcgcagtgactcccgcccgcccgccggtggcgcaggacccggctcgggaagggtgcgttccggacccgcagccagcgagcaccagggagcccgggcgccaggtgtgtgtgtggggggggcggggggatggggcgcaggcccgagctactcaggagagagggtctgtcgcttttaaaacgcattaaaggctctctcctggccttatttaacttgcctaagctaggtggagcacggctgagctcaggtaagctagcagctttccagcagaaggtgttctcccgaagaacgcagacctggggaagggttgactttttgggggcccctgctgagaacagttcaagagctccctaactgtagaggctgctggaggggcgaggggcagaaccccgggctgaatcatctcccgctttcccgggactttgctttcactttcctcagtcttgtggacagagtcaagtagattttcaaaagtgctccagaaaggccggaatagtcatgtagtggatgaaaagggcagtcacaaaactgcttaagaccagctgtcttgccagtaattgcagtgctttaagatttaattaaaa

SEQ ID NO: 284786 - DNA, 2563 bp, Homo sapiens
  misc_feature (1)..(1): n is a, c, g, or t
  misc_feature (368)..(368): n is a, c, g, or t
natccctgcagtggaagtgaggaggaagaaaggtgaactccttttctcaagcacttctgctctcctctaccagaatcactcagaatgcttcccgggtgtatattcttgatgattttactcattcctcaggttaaagaaaagttcatccttggagtagagggtcaacaactggttcgtcctaaaaagcttcctctgatacagaagcgagatactggacacacccatgatgatgacatactgaaaacgtatgaagaagaattgttgtatgaaataaaactaaatagaaaaaccttagtccttcatcttctaagatccagggagttcctaggctcaaattacagtgaaacattctactccatgaaaggagnagcgttcaccaggcatcctcagatcatggatcattgtttttaccaaggatccatagtacacgaatatgattcagctgccagtatcagtacgtgtaatggtctaaggggattcttcagaataaacgaccaaagatacctcattgaaccagtgaaatactcagatgagggagaacatttggtgttcaaatataacctgagggtgccgtatggtgccaattattcctgtacagagcttaattttaccagaaaaactgttccaggggataatgaatctgaagaagactccaaaataaaaggcatccatgatgaaaagtatgttgaattgttcattgttgctgatgatactgtgtatcgcagaaatggtcatcctcacaataaactaaggaaccgaatttggggaatggtcaattttgtcaacatgatttataaaaccttaaacatccatgtgacgttggttggcattgaaatatggacacatgaagataaaatagaactatattcaaatatagaaactaccttattgcgtttttcattttggcaagaaaagatccttaaaacacggaaggattttgatcatgttgtattactcagtgggaagtggctctactcacatgtgcaaggaatttcttatccagggggtatgtgcctgccctattattccaccagtatcattaaggatcttttacctgacacaaacataattgcaaacagaatggcacatcaactggggcataaccttgggatgcagcatgacgagttcccatgcacctgtccttcaggaaaatgcgtgatggacagtgatggaagcattcctgcactgaaattcagtaaatgcagccaaaaccaataccaccagtacttgaaggattataagccaacatgcatgctcaacattccatttccttacaattttcatgatttccaattttgtggaaacaagaagttggatgagggtgaagagtgtgactgtggccctgctcaggagtgtactaatccttgctgtgatgcacacacatgtgtactgaagccaggatttacttgtgcagaaggagaatgctgtgaatcttgtcagataaaaaaagcagggtccatatgcagaccggcgaaagatgaatgtgattttcctgagatgtgcactggccactcgcctgcctgtcctaaggaccagttcagggtcaatggatttccttgcaagaactcagaaggctactgtttcatggggaaatgtccaactcgtgaggatcagtgctctgaactatttgatgatgaggcaatagagagtcatgatatctgctacaagatgaatacaaaaggaaataaatttggatactgcaaaaacaaggaaaacagatttcttccctgtgaggagaaagatgtcagatgtggaaagatctactgcactggaggggagctttcctctctccttggagaagacaagacttatcaccttaaggatccccagaagaatgctactgtcaaatgcaaaactatttttttataccatgattctacagacattggcctggtggcgtcaggaacaaaatgtggagagggaatggtgtgcaacaatggtgaatgtctaaacatggaaaaggtctatatctcaaccaattgcccctctcagtgcaatgaaaatcctgtggatggccacggactccagtgccactgtgaggaaggacaggcacctgtagcctgtgaagaaaccttacatgttaccaatatcaccatcttggttgttgtgcttgtcctggttattgtcggtatcggagttcttatactattagttcgttaccgaaaatgtatcaagttgaagcaagttcagagcccacctacagaaaccctgggagtggagaacaaaggatactttggtgatgagcagcagataaggactgagccaatcctgccagaaattcatttcctaaataaacctgcaagtaaagattcaagaggaatcgcagatcccaatcaaagtgccaagtgagcttgaagttggatatccaaaatggccgtgcaagcttaggctggggattctggatgcaacgtctttacaaccttacctagatatctgctactcacatttttggtagtgtttcaaacgttctttatccagacagacaatgtttaagagaaacaacttatttctgttaatatttaccggtagaattcacaccctctatcataaacatatgctgcag

SEQ ID NO: 284787 - DNA, 1930 bp, Homo sapiens
agcggggtttgccctcgtagctatttcctggagggaaggggtagctacagtttcctgtccctcttcagcacttctccagctccatatcgcagaaatggtcatcctcacaataaactaaggaaccgaatttggggaatggtcaattttgtcaacatgatttataaaaccttaaacatccatgtgacgttggttggcattgaaatatggacacatgaagataaaatagaactatattcaaatatagaaactaccttattgcgtttttcattttggcaagaaaagatccttaaaacacggaaggattttgatcatgttgtattactcagtgggaagtggctctactcacatgtgcaaggaatttcttatccagggggtatgtgcctgccctattattccaccagtatcattaaggatcttttacctgacacaaacataattgcaaacagaatggcacatcaactggggcataaccttgggatgcagcatgacgagttcccatgcacctgtccttcaggaaaatgcgtgatggacagtgatggaagcattcctgcactgaaattcagtaaatgcagccaaaaccaataccaccagtacttgaaggattataagccaacatgcatgctcaacattccatttccttacaattttcatgatttccaattttgtggaaacaagaagttggatgagggtgaagagtgtgactgtggccctgctcaggagtgtactaatccttgctgtgatgcacacacatgtgtactgaagccaggatttacttgtgcagaaggagaatgctgtgaatcttgtcagataaaaaaagcagggtccatatgcagaccggcgaaagatgaatgtgattttcctgagatgtgcactggccactcgcctgcctgtcctaaggaccagttcagggtcaatggatttccttgcaagaactcagaaggctactgtttcatggggaaatgtccaactcgtgaggatcagtgctctgaactatttgatgatgaggcaatagagagtcatgatatctgctacaagatgaatacaaaaggaaataaatttggatactgcaaaaacaaggaaaacagatttcttccctgtgaggagaaagatgtcagatgtggaaagatctactgcactggaggggagctttcctctctccttggagaagacaagacttatcaccttaaggatccccagaagaatgctactgtcaaatgcaaaactatttttttataccatgattctacagacattggcctggtggcgtcaggaacaaaatgtggagagggaatggtgtgcaacaatggtgaatgtctaaacatggaaaaggtctatatctcaaccaattgcccctctcagtgcaatgaaaatcctgtggatggccacggactccagtgccactgtgaggaaggacaggcacctgtagcctgtgaagaaaccttacatgttaccaatatcaccatcttggttgttgtgcttgtcctggttattgtcggtatcggagttcttatactattagttcgttaccgaaaatgtatcaagttgaagcaagttcagagcccacctacagaaaccctgggagtggagaacaaaggatactttggtgatgagcagcagataaggactgagccaatcctgccagaaattcatttcctaaataaacctgcaagtaaagattcaagaggaatcgcagatcccaatcaaagtgccaagtgagcttgaagttggatatccaaaatggccgtgcaagcttaggctggggattctggatgcaacgtctttacaaccttacctagatatctgctactcacatttttggtagtgtttcaaacgttctttatccagacagacaatgtttaagagaaacaacttatttctgttaatatttaccggtagaattcacaccctctatcataaacatatgctgcag

SEQ ID NO: 284788 - DNA, 384 bp, Homo sapiens
actgcttaattagcaatggctagggagatctataaaagcatgaataaatgtaggactacagaacacagaaaggttattctaattagtagatataaatgagtaatggaaatacatggttcacagatttcataggaaacaatctatttttaaccatctgtttctatttagagcttgaagttggatatccaaaatggccgtgcaagcttaggctggggattctggatgcaacgtctttacaaccttacctagatatctgctactcacatttttggtagtgtttcaaacgttctttatccagacagacaatgtttaagagaaacaacttatttctgttaatatttaccggtagaattcacaccctctatcataaacatatgctgcaga

SEQ ID NO: 284789 - DNA, 1005 bp, Homo sapiens
atgcgccgacccggcgccattttggtggccgggcgcggaggtgattccacactgaggcgagcgcggcggccggggtggtagtggcagtgttcgtgtgctcaggtctgaatcgccgagggaggaggcggtggaggaagaggtggcggcggtggcggtggtcgtagcggtggcggaggaggcgggtacgaatcagctgcgggcggagacatggccaacatcgcggtgcagcgaatcaagcgggagttcaaggaggtgctgaagagcgaggagacgagcaaaaatcaaattaaagtagatcttgtagatgagaattttacagaattaagaggagaaatagcaggacctccagacacaccatatgaaggaggaagataccaactagagataaaaataccagaaacatacccatttaatccccctaaggtccggtttatcactaaaatatggcatcctaatattagttccgtcacaggggctatttgtttggatatcctgaaagatcaatgggcagctgcaatgactctccgcacggtattattgtcattgcaagcactattggcagctgcagagccagatgatccacaggatgctgtagtagcaaatcagtacaaacaaaatcccgaaatgttcaaacagacagctcgactttgggcacatgtgtatgctggagcaccagtttctagtccagaatacaccaaaaaaatagaaaacctatgtgctatgggctttgataggaatgcagtaatagtggccttgtcttcaaaatcatgggatgtagagactgcaacagaattgcttctgagtaactgaggcatagagagctgctgatatagtcaagcttgcctcttcttgaggagcaccaacatctgttatttttaggattctgcatagatttcttttaaactggcattcttgcctaatgatgttatctaggcaccattggagactgaaaaaaaaaaatccctgctctgtaaataaagctaattaaacgtctgtgtaaattta

SEQ ID NO: 284790 - DNA, 603 bp, Homo sapiens
acaggggctatttgtttggatatcctgaaagatcaatgttttaggccggttgctggccggatgtggtggctgatgcctgtaatcccagcagtttgggaggccgaggcagctgcaatgactctccgcacggtattattgtcattgcaagcactattggcagctgcagagccagatgatccacaggatgctgtagtagcaaatcagtacaaacaaaatcccgaaatgttcaaacagacagctcgactttgggcacatgtgtatgctggagcaccagtttctagtccagaatacaccaaaaaaatagaaaacctatgtgctatgggctttgataggaatgcagtaatagtggccttgtcttcaaaatcatgggatgtagagactgcaacagaattgcttctgagtaactgaggcatagagagctgctgatatagtcaagcttgcctcttcttgaggagcaccaacatctgttatttttaggattctgcatagatttcttttaaactggcattcttgcctaatgatgttatctaggcaccattggagactgaaaaaaaaaaatccctgctctgtaaataaagctaattaaacgtctgtgtaaattta

SEQ ID NO: 284791 - DNA, 955 bp, Homo sapiens
  misc_feature (770)..(770): n is a, c, g, or t
atgcgccgacccggcgccattttggtggccgggcgcggaggtgattccacactgaggcgagcgcggcggccggggtggtagtggcagtgttcgtgtgctcaggtctgaatcgccgagggaggaggcggtggaggaagaggtggcggcggtggcggtggtcgtagcggtggcggaggaggcgggtacgaatcagctgcgggcggagacatggccaacatcgcggtgcagcgaatcaagcgggagttcaaggaggtgctgaagagcgaggagacgagcaaaaatcaaattaaagtagatcttgtagatgagaattttacagaattaagaggagaaatagcaggacctccagacacaccatatgaaggaggaagataccaactagagataaaaataccagaaacatacccatttaatccccctaaggtccggtttatcactaaaatatggcatcctaatattagttccgtcacaggggctatttgtttggatatcctgaaagatcaatgggcagctgcaatgactctccgcacggtattattgtcattgcaagcactattggcagctgcagagccagatgatccacaggatgctgtagtagcaaatcagtacaaacaaaatcccgaaatgttcaaacagacagctcgactttgggcacatgtgtatgctggagcaccagtttctagtccagaatacaccaaaaaaatagaaaacctatgtgctatgggctttgataggaatgcgtatagtggcttgtttcaaatctgggtgtnagatggacagattggtctgagaatagggtataagcgggtgatataggtcctttgaagggccaatcggtttagatcggaaatttaacggatctcaagtttttgcctggaggaaaacgtgtatactgtttaagggggcgcagataatcggaggacgccgcactgtgcgtctaattattatatagggt

SEQ ID NO: 284792 - DNA, 477 bp, Homo sapiens
gtggcggtggtcgtagcggtggcggaggaggcgggtacgaatcagctgcgggcggagacatggccaacatcgcggtgcagcgaatcaagcgggagttcaaggaggtgctgaagagcgaggagacgagcaaaaatcaaattaaagtagatcttgtagatgagaattttacagaattaagaggagaaatagcaggacctccagacacaccatatgaaggaggaagataccaactagagataaaaataccagaaacatacccatttaatccccctaagccggttaacactaaaatatggcatcctaatattagacttgaacaaacaaaacacccaacaaaaaagaacaagagaataatttaaaagttgaatcattacttgactaacagacttcggtccaccatgtccttttcacagccctcttctggaacagtcaccttgttaattttattttggaaaattattttcccactctgccctt

SEQ ID NO: 284793 - DNA, 5196 bp, Homo sapiens
atgcgccgacccggcgccattttggtggccgggcgcggaggtgattccacactgaggcgagcgcggcggccggggtggtagtggcagtgttcgtgtgctcaggtctgaatcgccgagggaggaggcggtggaggaagaggtggcggcggtggcggtggtcgtagcggtggcggaggaggcgggtacgaatcagctgcgggcggagacatggccaacatcgcggtgcagcgaatcaagcgggagttcaaggaggtgctgaagagcgaggagacgagcaaaaatcaaattaaagtagatcttgtagatgagaattttacagaattaagaggagaaatagcaggacctccagacacaccatatgaaggaggaagataccaactagagataaaaataccagaaacatacccatttaatccccctaaggtccggtttatcactaaaatatggcatcctaatattagttccgtcacaggggctatttgtttggatatcctgaaagatcaatgggcagctgcaatgactctccgcacggtattattgtcattgcaagcactattggcagctgcagagccagatgatccacaggatgctgtagtagcaaatcagtacaaacaaaatcccgaaatgttcaaacagacagctcgactttgggcacatgtgtatgctggagcaccagtttctagtccagaatacaccaaaaaaatagaaaacctatgtgctatgggctttgataggaatgcagtaatagtggccttgtcttcaaaatcatgggatgtagagactgcaacagaattgcttctgagtaactgaggcatagagagctgctgatatagtcaagcttgcctcttcttgaggagcaccaacatctgttatttttaggattctgcatagatttcttttaaactggcattcttgcctaatgatgttatctaggcaccattggagactgaaaaaaaaaaatccctgctctgtaaataaagctaattaaacgtctgtgtaaatttaaaaaggggaaatactttaattttttttcttaatagtgtaaaaattccctgagctaagctaaaaccatggaagaaacatgctactttagtgtttagcagtgtaccaagactagcaagagtttgcttcaggattttgttgaataattaagataatattttgagtgtgtcagggccattcaaattgttggtgttgcatcacagctaccttaactgtttttaacatggatcctctgtgcctgtgaatttacttgcatgcttgtacttgacttcttaggatgggtagctgaaaagaccaccattttaagcatttgagaattcttaaatatgaaatttattcagaattgaagatggtgacctattcagagcctttttgtccttgtcaacagactgggacagtgtctgattcccccttcacccccccccacccccgccttgccacacacagctaatattctaatggtaaatttctctgtatcaggtggggaaatgtgctgaaggacagtatgtatcccttgcttcatttttaggtcgtaggtttggaatgtcttgtcccagttcttcaaacactcttaaatttttcttaagtaatgtaaaaatggaactgccaattttatttctcttgcaaaaatagtaaatacttgatgttacattattcccaggtttaatgaaagaacccaacttagtttttcagtgaatttgacacctattttttagtgatgaaatttttctttgagaactggcaaggatgcagtcagctgtttgcagtttttagcctgattttggggtctatagagattgctttattggatacttcaagtcattcttgcttgcacttcccctattgacacatgaaagctgtgttggtgttttattgtacatacttcagatgcacataggaatagaagtgtgttataaatctagctttctttatgatgtttctgataatacgagaattgaaaactttaccttctcttgtacatagtcagactatttgtattaaatttacatttcattctaagttcaaaagtttgaaaattattagttttgcaagatcacacactaatgtaaccattttatgaaggttgaagtggatttatgcaggcagttctatatatagaaatacaattctttttaaatttttaggaccaatacaaaataacaaaaatgtaatggaatcagactgaattaaagtaaggctgtatattgaaagtcatattataaaaggtttgctttctttaagtgttatttatcttaaattataatcgttaaatgtttggaagataatttttgaatcataacgtcagcataacttcatttgacttctcaataatcttgatactagaagcaataaaagaaccattattaaatatattgtaatgttaaagatgtgaaggttcttccaaaaatttgtaaggctttcctaattaacagtaaactcttatagctgatattattacatactaaacacaagttgctgttttttccccatatgtttgcttacgcatgtctttatacaatcacctctttttattgctgtagtttattttctaaagatgccaaaggaaacaagatttttctttatttattttaaatacctgaaacctcgtactttatattttgaagtaaggtgggattgtgtgaaaatgtggatggtttttctccagtgttggttagaactactttttttaagtggagggcaacttggtagtattagtagaatttgggtttaaaaatatcagacacatctacccagtttattttttgcctgtattatcagggtatatttaattgtcctgtggttaaacaaaggtgagagagctcagaggtttctaaaggtcaagcattttacatatatacatacatacatgctcttggaggcagctatatcctgctttgatttttatgcacatgagccctatagggttatatactcatctaactacacttcagcatccccagtgcccaagaaattggaaagtacaatatttggtttgagacattcttcataaaagattctttattataaaaatttacctcatttacatttaatgtgatgatcttttttttcctttctggtatatttcccactgtactgtttggtttttgttattctcttgtctgtgggtagatttagttacccaaacatagaaactaaagcaattgcttttttcctctggtcttaaatatgtttggacaaaaagacactaaaaggtcaggcctaggggaaaagtaccctggtggaaattatttttgtaattcttaatatttttgagttggctccgtttgtcagttttaaaagcctcaaaaattatgttaaaaaaaaaatccagtgaaatcccatttagggcaggccgatttgttagaagtcactgatgctccagtaggcttttgttataatcaggcctgtttcctgagtatgtgcctcttttaaaagaagaaataattagctgtatagtatttcagtactgatgaatgaatgaatgaatgaatgggcagttagtggacccaaataagtattcagtggtatataaatatttgaggaactaggtactgaattaggtgctctgagttggcaccccgaaatgtttggaatcacgactatgatttacttaaacacgtaacacattcaaggatatataaatggagtctaagtattttgcttttgaagagaataatctatgaaatggaagacttgattttttttttcattttttagaagtaatacacatttatgattgttggcacataaaactatgcaaaataattctttttaagtatctgtaagaaagaattggcagtttaaacggattttgcttatttatgcactacagaatgcagcatactgtattactgttgaggctgcttaataagtttaccaatgtgaaaagcagatcttgggtataagtgtatgcctgatttgagcttttaaaactgtgcagtaggtgtatggtaatgttttacaatcctatgtagcaaaataggaaattatgaatttttgttgttattgttttaaagatttaagatggattggggtagggaacagctggagccaggtataccttctagtatgtagagggaaacaatgtttagataggaaaaaggaagccgtctgtttacagttaactttatttcatggacttctacaaaatgttgtattaatcactttttctagttcaaggaatttcaattccagggtacaaaccattgatttaaaaattacgtttccattctttttagtatcagtttaaagtaaatgcttaccatcagccagttgctgtcactgggaagaaggcaacttgaagtatttactgataaaatagcctttattcccaagtgtgacttttcttcagtgtctacatattatgtcacacgttctatttgcactgctgcaatatagatcaaagatcttgtggcataggggtaggggagtgttagtatctcccttgtcccatttgttctgttactgcttcattggactgatataccctcatgaacttgcaatcacctaaatggaagtcttgaatgtgtcaccttttgcttggttatttcaaccatgctgctatatataatcaggtgtggcacagtttgtcagtttgattataggtgtgagtggatagaaatcattacactgtgctgttaacgatccttgtctgcttgctgttacctactttttacaggcatcataataaaagctagactatttctttggggggaaagagacttatttaatgtaatttaaaaaacttttccaatagaaaatgaaatattattgaaaataatatctattttttagctttcagcaattgatggtgctttgttgtggtgtctgctggaagtctactgccattatagggaaccttgcttgttagcttctctagatctctattctaaacaatctgttagtgatgataaattctgtaggagggtctattctgagccgttaacttcctgtaaggggaaaatgggtgggttaccagaaataccattgaagcagggtgggctgtggggtggaaggttggggtatttgtcttgagaattaaaaactacgaaacacttttgtacacaactgattttttaaaaaataaacacatttttaaagatgttgaatttttccccccttattgggaattcttaaaaataaatgcatgcatgttttcccctgaaaaaaaataaaatgatgaaacaaaaaact

SEQ ID NO: 284794 - DNA, 5101 bp, Homo sapiens
atgcgccgacccggcgccattttggtggccgggcgcggaggtgattccacactgaggcgagcgcggcggccggggtggtagtggcagtgttcgtgtgctcaggtctgaatcgccgagggaggaggcggtggaggaagaggtggcggcggtggcggtggtcgtagcggtggcggaggaggcgggtacgaatcagctgcgggcggagacatggccaacatcgcggtgcagcgaatcaagcgggagttcaaggaggtgctgaagagcgaggagacgagcaaaaatcaaattaaagtagatcttgtagatgagaattttacagaattaagaggagaaatagcaggacctccagacacaccatatgaaggaggaagataccaactagagataaaaataccagaaacatacccatttaatccccctaaggtccggtttatcactaaaatatggcatcctaatattagttccgtcacaggggctatttgtttggatatcctgaaagatcaatgggcagctgcaatgactctccgcacggtattattgtcattgcaagcactattggcagctgcagagccagatgatccacaggatgctgtagtagcaaatcagtacaaacaaaatcccgaaatgttcaaacagacagctcgactttgggcacatgtgtatgctggagcaccagtttctagtccagaatacaccaaaaaaatagaaaacctatgtgctatgggctttgataggaatgcagtaatagtggccttgtcttcaaaatcatgggatgtagagactgcaacagaattgcttctgagtaactgaggcatagagagctgctgatatagtcaagcttgcctcttcttgaggagcaccaacatctgttatttttaggattctgcatagatttcttttaaactggcattcttgcctaatgatgttatctaggcaccattggagactgaaaaaaaaaaatccctgctctgtaaataaagctaattaaacgtctgtgtaaatttaaaaaggggaaatactttaattttttttcttaatagtgtaaaaattccctgagctaagctaaaaccatggaagaaacatgctactttagtgtttagcagtgtaccaagactagcaagagtttgcttcaggattttgttgaataattaagataatattttgagtgtgtcagggccattcaaattgttggtgttgcatcacagctaccttaactgtttttaacatggatcctctgtgcctgtgaatttacttgcatgcttgtacttgacttcttaggatgggtagctgaaaagaccaccattttaagcatttgagaattcttaaatatgaaatttattcagaattgaagatggtgacctattcagagcctttttgtccttgtcaacagactgggacagtgtctgattcccccttcacccccccccacccccgccttgccacacacagctaatattctaatggtaaatttctctgtatcaggtggggaaatgtgctgaaggacagtatgtatcccttgcttcatttttaggtcgtaggtttggaatgtcttgtcccagttcttcaaacactcttaaatttttcttaagtaatgtaaaaatggaactgccaattttatttctcttgcaaaaatagtaaatacttgatgttacattattcccaggtttaatgaaagaacccaacttagtttttcagtgaatttgacacctattttttagtgatgaaatttttctttgagaactggcaaggatgcagtcagctgtttgcagtttttagcctgattttggggtctatagagattgctttattggatacttcaagtcattcttgcttgcacttcccctattgacacatgaaagctgtgttggtgttttattgtacatacttcagatgcacataggaatagaagtgtgttataaatctagctttctttatgatgtttctgataatacgagaattgaaaactttaccttctcttgtacatagtcagactatttgtattaaatttacatttcattctaagttcaaaagtttgaaaattattagttttgcaagatcacacactaatgtaaccattttatgaaggttgaagtggatttatgcaggcagttctatatatagaaatacaattctttttaaatttttaggaccaatacaaaataacaaaaatgtaatggaatcagactgaattaaagtaaggctgtatattgaaagtcatattataaaaggtttgctttctttaagtgttatttatcttaaattataatcgttaaatgtttggaagataatttttgaatcataacgtcagcataacttcatttgacttctcaataatcttgatactagaagcaataaaagaaccattattaaatatattgtaatgttaaagatgtgaaggttcttccaaaaatttgtaaggctttcctaattaacagtaaactcttatagctgatattattacatactaaacacaagttgctgttttttccccatatgtttgcttacgcatgtctttatacaatcacctctttttattgctgtagtttattttctaaagatgccaaaggaaacaagatttttctttatttattttaaatacctgaaacctcgtactttatattttgaagtaaggtgggattgtgtgaaaatgtggatggtttttctccagtgttggttagaactactttttttaagtggagggcaacttggtagtattagtagaatttgggtttaaaaatatcagacacatctacccagtttattttttgcctgtattatcagggtatatttaattgtcctgtggttaaacaaaggtgagagagctcagaggtttctaaaggtcaagcattttacatatatacatacatacatgctcttggaggcagctatatcctgctttgatttttatgcacatgagccctatagggttatatactcatctaactacacttcagcatccccagtgcccaagaaattggaaagtacaatatttggtttgagacattcttcataaaagattctttattataaaaatttacctcatttacatttaatgtgatgatcttttttttcctttctggtatatttcccactgtactgtttggtttttgttattctcttgtctgtgggtagatttagttacccaaacatagaaactaaagcaattgcttttttcctctggtcttaaatatgtttggacaaaaagacactaaaaggtcaggcctaggggaaaagtaccctggtggaaattatttttgtaattcttaatatttttgagttggctccgtttgtcagttttaaaagcctcaaaaattatgttaaaaaaaaaatccagtgaaatcccatttagggcaggccgatttgttagaagtcactgatgctccagtaggcttttgttataatcaggcctgtttcctgagtatgtgcctcttttaaaagaagaaataattagctgtatagtatttcagtactgatgaatgaatgaatgaatgaatgggcagttagtggacccaaataagtattcagtggtatataaatatttgaggaactaggtactgaattaggtgctctgagttggcaccccgaaatgtttggaatcacgactatgatttacttaaacacgtaacacattcaaggatatataaatggagtctaagtattttgcttttgaagagaataatctatgaaatggaagacttgattttttttttcattttttagaagtaatacacatttatgattgttggcacataaaactatgcaaaataattctttttaagtatctgtaagaaagaattggcagtttaaacggattttgcttatttatgcactacagaatgcagcatactgtattactgttgaggctgcttaataagtttaccaatgtgaaaagcagatcttgggtataagtgtatgcctgatttgagcttttaaaactgtgcagtaggtgtatggtaatgttttacaatcctatgtagcaaaataggaaattatgaatttttgttgttattgttttaaagatttaagatggattggggtagggaacagctggagccaggtataccttctagtatgtagagggaaacaatgtttagataggaaaaaggaagccgtctgtttacagttaactttatttcatggacttctacaaaatgttgtattaatcactttttctagttcaaggaatttcaattccagggtacaaaccattgatttaaaaattacgtttccattctttttagtatcagtttaaagtaaatgcttaccatcagccagttgctgtcactgggaagaaggcaacttgaagtatttactgataaaatagcctttattcccaagtgtgacttttcttcagtgtctacatattatgtcacacgttctatttgcactgctgcaatatagatcaaagatcttgtggcataggggtaggggagtgttagtatctcccttgtcccatttgttctgttactgcttcattggactgatataccctcatgaacttgcaatcacctaaatggaagtcttgaatgtgtcaccttttgcttggttatttcaaccatgctgctatatataatcaggtgtggcacagtttgtcagtttgattataggtgtgagtggatagaaatcattacactgtgctgttaacgatccttgtctgcttgctgttacctactttttacaggcatcataataaaagctagactatttctttggggggaaagagacttatttaatgtaatttaaaaaacttttccaatagaaaatgaaatattattgaaaataatatctattttttagctttcagcaattgatggtgctttgttgtggtgtctgctggaagtctactgccattatagggaaccttgcttgttagcttctctagatctctattctaaacaatctgttagtgatgataaattctgtaggagggtctattctgagccgttaacttcctgtaaggggaaaatgggtgggttaccagaaataccattgaagcagggtgggctgtggggtggaaggttggggtatttgtcttgagaattaaaaactacgaaacacttttgtacacaactgattttttaaaaaataaacacatttttaa

SEQ ID NO: 284795 - DNA, 4746 bp, Homo sapiens
atgcgccgacccggcgccattttggtggccgggcgcggaggtgattccacactgaggcgagcgcggcggccggggtggtagtggcagtgttcgtgtgctcaggtctgaatcgccgagggaggaggcggtggaggaagaggtggcggcggtggcggtggtcgtagcggtggcggaggaggcgggtacgaatcagctgcgggcggagacatggccaacatcgcggtgcagcgaatcaagcgggagttcaaggaggtgctgaagagcgaggagacgagcaaaaatcaaattaaagtagatcttgtagatgagaattttacagaattaagaggagaaatagcaggacctccagacacaccatatgaaggaggaagataccaactagagataaaaataccagaaacatacccatttaatccccctaaggtccggtttatcactaaaatatggcatcctaatattagttccgtcacaggggctatttgtttggatatcctgaaagatcaatgggcagctgcaatgactctccgcacggtattattgtcattgcaagcactattggcagctgcagagccagatgatccacaggatgctgtagtagcaaatcagtacaaacaaaatcccgaaatgttcaaacagacagctcgactttgggcacatgtgtatgctggagcaccagtttctagtccagaatacaccaaaaaaatagaaaacctatgtgctatgggctttgataggaatgcagtaatagtggccttgtcttcaaaatcatgggatgtagagactgcaacagaattgcttctgagtaactgaggcatagagagctgctgatatagtcaagcttgcctcttcttgaggagcaccaacatctgttatttttaggattctgcatagatttcttttaaactggcattcttgcctaatgatgttatctaggcaccattggagactgaaaaaaaaaaatccctgctctgtaaataaagctaattaaacgtctgtgtaaatttaaaaaggggaaatactttaattttttttcttaatagtgtaaaaattccctgagctaagctaaaaccatggaagaaacatgctactttagtgtttagcagtgtaccaagactagcaagagtttgcttcaggattttgttgaataattaagataatattttgagtgtgtcagggccattcaaattgttggtgttgcatcacagctaccttaactgtttttaacatggatcctctgtgcctgtgaatttacttgcatgcttgtacttgacttcttaggatgggtagctgaaaagaccaccattttaagcatttgagaattcttaaatatgaaatttattcagaattgaagatggtgacctattcagagcctttttgtccttgtcaacagactgggacagtgtctgattcccccttcacccccccccacccccgccttgccacacacagctaatattctaatggtaaatttctctgtatcaggtggggaaatgtgctgaaggacagtatgtatcccttgcttcatttttaggtcgtaggtttggaatgtcttgtcccagttcttcaaacactcttaaatttttcttaagtaatgtaaaaatggaactgccaattttatttctcttgcaaaaatagtaaatacttgatgttacattattcccaggtttaatgaaagaacccaacttagtttttcagtgaatttgacacctattttttagtgatgaaatttttctttgagaactggcaaggatgcagtcagctgtttgcagtttttagcctgattttggggtctatagagattgctttattggatacttcaagtcattcttgcttgcacttcccctattgacacatgaaagctgtgttggtgttttattgtacatacttcagatgcacataggaatagaagtgtgttataaatctagctttctttatgatgtttctgataatacgagaattgaaaactttaccttctcttgtacatagtcagactatttgtattaaatttacatttcattctaagttcaaaagtttgaaaattattagttttgcaagatcacacactaatgtaaccattttatgaaggttgaagtggatttatgcaggcagttctatatatagaaatacaattctttttaaatttttaggaccaatacaaaataacaaaaatgtaatggaatcagactgaattaaagtaaggctgtatattgaaagtcatattataaaaggtttgctttctttaagtgttatttatcttaaattataatcgttaaatgtttggaagataatttttgaatcataacgtcagcataacttcatttgacttctcaataatcttgatactagaagcaataaaagaaccattattaaatatattgtaatgttaaagatgtgaaggttcttccaaaaatttgtaaggctttcctaattaacagtaaactcttatagctgatattattacatactaaacacaagttgctgttttttccccatatgtttgcttacgcatgtctttatacaatcacctctttttattgctgtagtttattttctaaagatgccaaaggaaacaagatttttctttatttattttaaatacctgaaacctcgtactttatattttgaagtaaggtgggattgtgtgaaaatgtggatggtttttctccagtgttggttagaactactttttttaagtggagggcaacttggtagtattagtagaatttgggtttaaaaatatcagacacatctacccagtttattttttgcctgtattatcagggtatatttaattgtcctgtggttaaacaaaggtgagagagctcagaggtttctaaaggtcaagcattttacatatatacatacatacatgctcttggaggcagctatatcctgctttgatttttatgcacatgagccctatagggttatatactcatctaactacacttcagcatccccagtgcccaagaaattggaaagtacaatatttggtttgagacattcttcataaaagattctttattataaaaatttacctcatttacatttaatgtgatgatcttttttttcctttctggtatatttcccactgtactgtttggtttttgttattctcttgtctgtgggtagatttagttacccaaacatagaaactaaagcaattgcttttttcctctggtcttaaatatgtttggacaaaaagacactaaaaggtcaggcctaggggaaaagtaccctggtggaaattatttttgtaattcttaatatttttgagttggctccgtttgtcagttttaaaagcctcaaaaattatgttaaaaaaaaaatccagtgaaatcccatttagggcaggccgatttgttagaagtcactgatgctccagtaggcttttgttataatcaggcctgtttcctgagtatgtgcctcttttaaaagaagaaataattagctgtatagtatttcagtactgatgaatgaatgaatgaatgaatgggcagttagtggacccaaataagtattcagtggtatataaatatttgaggaactaggtactgaattaggtgctctgagttggcaccccgaaatgtttggaatcacgactatgatttacttaaacacgtaacacattcaaggatatataaatggagtctaagtattttgcttttgaagagaataatctatgaaatggaagacttgattttttttttcattttttagaagtaatacacatttatgattgttggcacataaaactatgcaaaataattctttttaagtatctgtaagaaagaattggcagtttaaacggattttgcttatttatgcactacagaatgcagcatactgtattactgttgaggctgcttaataagtttaccaatgtgaaaagcagatcttgggtataagtgtatgcctgatttgagcttttaaaactgtgcagtaggtgtatggtaatgttttacaatcctatgtagcaaaataggaaattatgaatttttgttgttattgttttaaagatttaagatggattggggtagggaacagctggagccaggtataccttctagtatgtagagggaaacaatgtttagataggaaaaaggaagccgtctgtttacagttaactttatttcatggacttctacaaaatgttgtattaatcactttttctagttcaaggaatttcaattccagggtacaaaccattgatttaaaaattacgtttccattctttttagtatcagtttaaagtaaatgcttaccatcagccagttgctgtcactgggaagaaggcaacttgaagtatttactgataaaatagcctttattcccaagtgtgacttttcttcagtgtctacatattatgtcacacgttctatttgcactgctgcaatatagatcaaagatcttgtggcataggggtaggggagtgttagtatctcccttgtcccatttgttctgttactgcttcattggactgatataccctcatgaacttgcaatcacctaaatggaagtcttgaatgtgtcaccttttgcttggttatttcaaccatgctgctatatataatcaggtgtggcacagtttgtcagtttgattataggtgtgagtggatagaaatcattacactgtgctgttaacgatccttgtctgcttgctgttacctactttttacaggcatcataataaaagctagactatttacaagaaaaaataaaatttgagtttttagatttattgtt

SEQ ID NO: 284796 - DNA, 5807 bp, Homo sapiens
taggtttgagaatataagtggagagcccatttgctggcaggcacttatgaatgttaatgtgagtcccactggatggttttctgaatcatttaaggttatcatggctctgagaatggactgtcataaggttaagagactcagtaatgctatagataggaaagtacttggagtagtttaaagtgcaaaataagtcaatgtagataaatttaaagtagaaatctggttttttgaagtaggtagttgccgttttaataaactaagcagaaaaacaaattgaagaaggccttttcttttgaggcatttagtcctctggaatttttcatggaaaggagaatctgttaggtagctagagctttcaccattctggtggatagtgtactatttcagtcagttaaactaaacatttaaagttgttatggttagttcaagtgagagtttatggcctaaatggcttttaatgaccctgaattttctgtttaagcagaacccatgtatcgtgggggtatagtgcagaatataatatcttagtgttcatctgtggatgattagatttatcgctttggacctgatatacatggaattggcaaacataaaatagcttttatactatttttccctaataacattcctagaaagtcaagaagccattgtattgttgttcatagtggtgttatttcgtttaaaacaatgaagttagaatttattagtttgttttaaatattcttaaaactggataattaagtcctagaaaagccgagacttattttactagagcagataatcaggcttatgaacagagggggtttcaagatttttataggtaatactttaggcgtttttcttgctgacataactaacatttatttcctgtttatcttaagacgagcaaaaatcaaattaaagtagatcttgtagatgagaattttacagaattaagaggagaaatagcaggacctccagacacaccatatgaaggaggaagataccaactagagataaaaataccagaaacatacccatttaatccccctaaggtccggtttatcactaaaatatggcatcctaatattagttccgtcacaggggctatttgtttggatatcctgaaagatcaatgggcagctgcaatgactctccgcacggtattattgtcattgcaagcactattggcagctgcagagccagatgatccacaggatgctgtagtagcaaatcagtacaaacaaaatcccgaaatgttcaaacagacagctcgactttgggcacatgtgtatgctggagcaccagtttctagtccagaatacaccaaaaaaatagaaaacctatgtgctatgggctttgataggaatgcagtaatagtggccttgtcttcaaaatcatgggatgtagagactgcaacagaattgcttctgagtaactgaggcatagagagctgctgatatagtcaagcttgcctcttcttgaggagcaccaacatctgttatttttaggattctgcatagatttcttttaaactggcattcttgcctaatgatgttatctaggcaccattggagactgaaaaaaaaaaatccctgctctgtaaataaagctaattaaacgtctgtgtaaatttaaaaaggggaaatactttaattttttttcttaatagtgtaaaaattccctgagctaagctaaaaccatggaagaaacatgctactttagtgtttagcagtgtaccaagactagcaagagtttgcttcaggattttgttgaataattaagataatattttgagtgtgtcagggccattcaaattgttggtgttgcatcacagctaccttaactgtttttaacatggatcctctgtgcctgtgaatttacttgcatgcttgtacttgacttcttaggatgggtagctgaaaagaccaccattttaagcatttgagaattcttaaatatgaaatttattcagaattgaagatggtgacctattcagagcctttttgtccttgtcaacagactgggacagtgtctgattcccccttcacccccccccacccccgccttgccacacacagctaatattctaatggtaaatttctctgtatcaggtggggaaatgtgctgaaggacagtatgtatcccttgcttcatttttaggtcgtaggtttggaatgtcttgtcccagttcttcaaacactcttaaatttttcttaagtaatgtaaaaatggaactgccaattttatttctcttgcaaaaatagtaaatacttgatgttacattattcccaggtttaatgaaagaacccaacttagtttttcagtgaatttgacacctattttttagtgatgaaatttttctttgagaactggcaaggatgcagtcagctgtttgcagtttttagcctgattttggggtctatagagattgctttattggatacttcaagtcattcttgcttgcacttcccctattgacacatgaaagctgtgttggtgttttattgtacatacttcagatgcacataggaatagaagtgtgttataaatctagctttctttatgatgtttctgataatacgagaattgaaaactttaccttctcttgtacatagtcagactatttgtattaaatttacatttcattctaagttcaaaagtttgaaaattattagttttgcaagatcacacactaatgtaaccattttatgaaggttgaagtggatttatgcaggcagttctatatatagaaatacaattctttttaaatttttaggaccaatacaaaataacaaaaatgtaatggaatcagactgaattaaagtaaggctgtatattgaaagtcatattataaaaggtttgctttctttaagtgttatttatcttaaattataatcgttaaatgtttggaagataatttttgaatcataacgtcagcataacttcatttgacttctcaataatcttgatactagaagcaataaaagaaccattattaaatatattgtaatgttaaagatgtgaaggttcttccaaaaatttgtaaggctttcctaattaacagtaaactcttatagctgatattattacatactaaacacaagttgctgttttttccccatatgtttgcttacgcatgtctttatacaatcacctctttttattgctgtagtttattttctaaagatgccaaaggaaacaagatttttctttatttattttaaatacctgaaacctcgtactttatattttgaagtaaggtgggattgtgtgaaaatgtggatggtttttctccagtgttggttagaactactttttttaagtggagggcaacttggtagtattagtagaatttgggtttaaaaatatcagacacatctacccagtttattttttgcctgtattatcagggtatatttaattgtcctgtggttaaacaaaggtgagagagctcagaggtttctaaaggtcaagcattttacatatatacatacatacatgctcttggaggcagctatatcctgctttgatttttatgcacatgagccctatagggttatatactcatctaactacacttcagcatccccagtgcccaagaaattggaaagtacaatatttggtttgagacattcttcataaaagattctttattataaaaatttacctcatttacatttaatgtgatgatcttttttttcctttctggtatatttcccactgtactgtttggtttttgttattctcttgtctgtgggtagatttagttacccaaacatagaaactaaagcaattgcttttttcctctggtcttaaatatgtttggacaaaaagacactaaaaggtcaggcctaggggaaaagtaccctggtggaaattatttttgtaattcttaatatttttgagttggctccgtttgtcagttttaaaagcctcaaaaattatgttaaaaaaaaaatccagtgaaatcccatttagggcaggccgatttgttagaagtcactgatgctccagtaggcttttgttataatcaggcctgtttcctgagtatgtgcctcttttaaaagaagaaataattagctgtatagtatttcagtactgatgaatgaatgaatgaatgaatgggcagttagtggacccaaataagtattcagtggtatataaatatttgaggaactaggtactgaattaggtgctctgagttggcaccccgaaatgtttggaatcacgactatgatttacttaaacacgtaacacattcaaggatatataaatggagtctaagtattttgcttttgaagagaataatctatgaaatggaagacttgattttttttttcattttttagaagtaatacacatttatgattgttggcacataaaactatgcaaaataattctttttaagtatctgtaagaaagaattggcagtttaaacggattttgcttatttatgcactacagaatgcagcatactgtattactgttgaggctgcttaataagtttaccaatgtgaaaagcagatcttgggtataagtgtatgcctgatttgagcttttaaaactgtgcagtaggtgtatggtaatgttttacaatcctatgtagcaaaataggaaattatgaatttttgttgttattgttttaaagatttaagatggattggggtagggaacagctggagccaggtataccttctagtatgtagagggaaacaatgtttagataggaaaaaggaagccgtctgtttacagttaactttatttcatggacttctacaaaatgttgtattaatcactttttctagttcaaggaatttcaattccagggtacaaaccattgatttaaaaattacgtttccattctttttagtatcagtttaaagtaaatgcttaccatcagccagttgctgtcactgggaagaaggcaacttgaagtatttactgataaaatagcctttattcccaagtgtgacttttcttcagtgtctacatattatgtcacacgttctatttgcactgctgcaatatagatcaaagatcttgtggcataggggtaggggagtgttagtatctcccttgtcccatttgttctgttactgcttcattggactgatataccctcatgaacttgcaatcacctaaatggaagtcttgaatgtgtcaccttttgcttggttatttcaaccatgctgctatatataatcaggtgtggcacagtttgtcagtttgattataggtgtgagtggatagaaatcattacactgtgctgttaacgatccttgtctgcttgctgttacctactttttacaggcatcataataaaagctagactatttctttggggggaaagagacttatttaatgtaatttaaaaaacttttccaatagaaaatgaaatattattgaaaataatatctattttttagctttcagcaattgatggtgctttgttgtggtgtctgctggaagtctactgccattatagggaaccttgcttgttagcttctctagatctctattctaaacaatctgttagtgatgataaattctgtaggagggtctattctgagccgttaacttcctgtaaggggaaaatgggtgggttaccagaaataccattgaagcagggtgggctgtggggtggaaggttggggtatttgtcttgagaattaaaaactacgaaacacttttgtacacaactgattttttaaaaaataaacacatttttaaagatgttgaatttttccccccttattgggaattcttaaaaataaatgcatgcatgttttcccctgaaaaaaaataaaatgatgaaacaaaaaact

SEQ ID NO: 284797 - DNA, 5048 bp, Homo sapiens
gtggcggtggtcgtagcggtggcggaggaggcgggtacgaatcagctgcgggcggagacatggccaacatcgcggtgcagcgaatcaagcgggagttcaaggaggtgctgaagagcgaggagacgagcaaaaatcaaattaaagtagatcttgtagatgagaattttacagaattaagaggagaaatagcaggacctccagacacaccatatgaaggaggaagataccaactagagataaaaataccagaaacatacccatttaatccccctaaggtccggtttatcactaaaatatggcatcctaatattagttccgtcacaggggctatttgtttggatatcctgaaagatcaatgggcagctgcaatgactctccgcacggtattattgtcattgcaagcactattggcagctgcagagccagatgatccacaggatgctgtagtagcaaatcagtacaaacaaaatcccgaaatgttcaaacagacagctcgactttgggcacatgtgtatgctggagcaccagtttctagtccagaatacaccaaaaaaatagaaaacctatgtgctatgggctttgataggaatgcagtaatagtggccttgtcttcaaaatcatgggatgtagagactgcaacagaattgcttctgagtaactgaggcatagagagctgctgatatagtcaagcttgcctcttcttgaggagcaccaacatctgttatttttaggattctgcatagatttcttttaaactggcattcttgcctaatgatgttatctaggcaccattggagactgaaaaaaaaaaatccctgctctgtaaataaagctaattaaacgtctgtgtaaatttaaaaaggggaaatactttaattttttttcttaatagtgtaaaaattccctgagctaagctaaaaccatggaagaaacatgctactttagtgtttagcagtgtaccaagactagcaagagtttgcttcaggattttgttgaataattaagataatattttgagtgtgtcagggccattcaaattgttggtgttgcatcacagctaccttaactgtttttaacatggatcctctgtgcctgtgaatttacttgcatgcttgtacttgacttcttaggatgggtagctgaaaagaccaccattttaagcatttgagaattcttaaatatgaaatttattcagaattgaagatggtgacctattcagagcctttttgtccttgtcaacagactgggacagtgtctgattcccccttcacccccccccacccccgccttgccacacacagctaatattctaatggtaaatttctctgtatcaggtggggaaatgtgctgaaggacagtatgtatcccttgcttcatttttaggtcgtaggtttggaatgtcttgtcccagttcttcaaacactcttaaatttttcttaagtaatgtaaaaatggaactgccaattttatttctcttgcaaaaatagtaaatacttgatgttacattattcccaggtttaatgaaagaacccaacttagtttttcagtgaatttgacacctattttttagtgatgaaatttttctttgagaactggcaaggatgcagtcagctgtttgcagtttttagcctgattttggggtctatagagattgctttattggatacttcaagtcattcttgcttgcacttcccctattgacacatgaaagctgtgttggtgttttattgtacatacttcagatgcacataggaatagaagtgtgttataaatctagctttctttatgatgtttctgataatacgagaattgaaaactttaccttctcttgtacatagtcagactatttgtattaaatttacatttcattctaagttcaaaagtttgaaaattattagttttgcaagatcacacactaatgtaaccattttatgaaggttgaagtggatttatgcaggcagttctatatatagaaatacaattctttttaaatttttaggaccaatacaaaataacaaaaatgtaatggaatcagactgaattaaagtaaggctgtatattgaaagtcatattataaaaggtttgctttctttaagtgttatttatcttaaattataatcgttaaatgtttggaagataatttttgaatcataacgtcagcataacttcatttgacttctcaataatcttgatactagaagcaataaaagaaccattattaaatatattgtaatgttaaagatgtgaaggttcttccaaaaatttgtaaggctttcctaattaacagtaaactcttatagctgatattattacatactaaacacaagttgctgttttttccccatatgtttgcttacgcatgtctttatacaatcacctctttttattgctgtagtttattttctaaagatgccaaaggaaacaagatttttctttatttattttaaatacctgaaacctcgtactttatattttgaagtaaggtgggattgtgtgaaaatgtggatggtttttctccagtgttggttagaactactttttttaagtggagggcaacttggtagtattagtagaatttgggtttaaaaatatcagacacatctacccagtttattttttgcctgtattatcagggtatatttaattgtcctgtggttaaacaaaggtgagagagctcagaggtttctaaaggtcaagcattttacatatatacatacatacatgctcttggaggcagctatatcctgctttgatttttatgcacatgagccctatagggttatatactcatctaactacacttcagcatccccagtgcccaagaaattggaaagtacaatatttggtttgagacattcttcataaaagattctttattataaaaatttacctcatttacatttaatgtgatgatcttttttttcctttctggtatatttcccactgtactgtttggtttttgttattctcttgtctgtgggtagatttagttacccaaacatagaaactaaagcaattgcttttttcctctggtcttaaatatgtttggacaaaaagacactaaaaggtcaggcctaggggaaaagtaccctggtggaaattatttttgtaattcttaatatttttgagttggctccgtttgtcagttttaaaagcctcaaaaattatgttaaaaaaaaaatccagtgaaatcccatttagggcaggccgatttgttagaagtcactgatgctccagtaggcttttgttataatcaggcctgtttcctgagtatgtgcctcttttaaaagaagaaataattagctgtatagtatttcagtactgatgaatgaatgaatgaatgaatgggcagttagtggacccaaataagtattcagtggtatataaatatttgaggaactaggtactgaattaggtgctctgagttggcaccccgaaatgtttggaatcacgactatgatttacttaaacacgtaacacattcaaggatatataaatggagtctaagtattttgcttttgaagagaataatctatgaaatggaagacttgattttttttttcattttttagaagtaatacacatttatgattgttggcacataaaactatgcaaaataattctttttaagtatctgtaagaaagaattggcagtttaaacggattttgcttatttatgcactacagaatgcagcatactgtattactgttgaggctgcttaataagtttaccaatgtgaaaagcagatcttgggtataagtgtatgcctgatttgagcttttaaaactgtgcagtaggtgtatggtaatgttttacaatcctatgtagcaaaataggaaattatgaatttttgttgttattgttttaaagatttaagatggattggggtagggaacagctggagccaggtataccttctagtatgtagagggaaacaatgtttagataggaaaaaggaagccgtctgtttacagttaactttatttcatggacttctacaaaatgttgtattaatcactttttctagttcaaggaatttcaattccagggtacaaaccattgatttaaaaattacgtttccattctttttagtatcagtttaaagtaaatgcttaccatcagccagttgctgtcactgggaagaaggcaacttgaagtatttactgataaaatagcctttattcccaagtgtgacttttcttcagtgtctacatattatgtcacacgttctatttgcactgctgcaatatagatcaaagatcttgtggcataggggtaggggagtgttagtatctcccttgtcccatttgttctgttactgcttcattggactgatataccctcatgaacttgcaatcacctaaatggaagtcttgaatgtgtcaccttttgcttggttatttcaaccatgctgctatatataatcaggtgtggcacagtttgtcagtttgattataggtgtgagtggatagaaatcattacactgtgctgttaacgatccttgtctgcttgctgttacctactttttacaggcatcataataaaagctagactatttctttggggggaaagagacttatttaatgtaatttaaaaaacttttccaatagaaaatgaaatattattgaaaataatatctattttttagctttcagcaattgatggtgctttgttgtggtgtctgctggaagtctactgccattatagggaaccttgcttgttagcttctctagatctctattctaaacaatctgttagtgatgataaattctgtaggagggtctattctgagccgttaacttcctgtaaggggaaaatgggtgggttaccagaaataccattgaagcagggtgggctgtggggtggaaggttggggtatttgtcttgagaattaaaaactacgaaacacttttgtacacaactgattttttaaaaaataaacacatttttaaagatgttgaatttttccccccttattgggaattcttaaaaataaatgcatgcatgttttcccctgaaaaaaaataaaatgatgaaacaaaaaact

SEQ ID NO: 284798 - DNA, 2549 bp, Homo sapiens
  misc_feature (2377)..(2380): n is a, c, g, or t
  misc_feature (2403)..(2403): n is a, c, g, or t
  misc_feature (2444)..(2444): n is a, c, g, or t
  misc_feature (2456)..(2456): n is a, c, g, or t
  misc_feature (2492)..(2492): n is a, c, g, or t
  misc_feature (2516)..(2516): n is a, c, g, or t
atgcgccgacccggcgccattttggtggccgggcgcggaggtgattccacactgaggcgagcgcggcggccggggtggtagtggcagtgttcgtgtgctcaggtctgaatcgccgagggaggaggcggtggaggaagaggtggcggcggtggcggtggtcgtagcggtggcggaggaggcgggtacgaatcagctgcgggcggagacatggccaacatcgcggtgcagcgaatcaagcgggagttcaaggaggtgctgaagagcgaggagacgagcaaaaatcaaattaaagtagatcttgtagatgagaattttacagaattaagaggagaaatagcaggacctccagacacaccatatgaaggaggaagataccaactagagataaaaataccagaaacatacccatttaatccccctaaggtccggtttatcactaaaatatggcatcctaatattagttccgtcacaggggctatttgtttggatatcctgaaagatcaatgggcagctgcaatgactctccgcacggtattattgtcattgcaagcactattggcagctgcagagccagatgatccacaggatgctgtagtagcaaatcagtacaaacaaaatcccgaaatgttcaaacagacagctcgactttgggcacatgtgtatgctggagcaccagtttctagtccagaatacaccaaaaaaatagaaaacctatgtgctatgggctttgataggaatgcagtaatagtggccttgtcttcaaaatcatgggatgtagagactgcaacagaattgcttctgagtaactgaggcatagagagctgctgatatagtcaagcttgcctcttcttgaggagcaccaacatctgttatttttaggattctgcatagatttcttttaaactggcattcttgcctaatgatgttatctaggcaccattggagactgaaaaaaaaaaatccctgctctgtaaataaagctaattaaacgtctgtgtaaatttaaaaaggggaaatactttaattttttttcttaatagtgtaaaaattccctgagctaagctaaaaccatggaagaaacatgctactttagtgtttagcagtgtaccaagactagcaagagtttgcttcaggattttgttgaataattaagataatattttgagtgtgtcagggccattcaaattgttggtgttgcatcacagctaccttaactgtttttaacatggatcctctgtgcctgtgaatttacttgcatgcttgtacttgacttcttaggatgggtagctgaaaagaccaccattttaagcatttgagaattcttaaatatgaaatttattcagaattgaagatggtgacctattcagagcctttttgtccttgtcaacagactgggacagtgtctgattcccccttcacccccccccacccccgccttgccacacacagctaatattctaatggtaaatttctctgtatcaggtggggaaatgtgctgaaggacagtatgtatcccttgcttcatttttaggtcgtaggtttggaatgtcttgtcccagttcttcaaacactcttaaatttttcttaagtaatgtaaaaatggaactgccaattttatttctcttgcaaaaatagtaaatacttgatgttacattattcccaggtttaatgaaagaacccaacttagtttttcagtgaatttgacacctattttttagtgatgaaatttttctttgagaactggcaaggatgcagtcagctgtttgcagtttttagcctgattttggggtctatagagattgctttattggatacttcaagtcattcttgcttgcacttcccctattgacacatgaaagctgtgttggtgttttattgtacatacttcagatgcacataggaatagaagtgtgttataaatctagctttctttatgatgtttctgataatacgagaattgaaaactttaccttctcttgtacatagtcagactatttgtattaaatttacatttcattctaagttcaaaagtttgaaaattattagttttgcaagatcacacactaatgtaaccattttatgaaggttgaagtggatttatgcaggcagttctatatatagaaatacaattctttttaaatttttaggaccaatacaaaataacaaaaatgtaatggaatcagactgaattaaagtaaggctgtatattgaaagtcatattataaaaggtttgctttctttaagtgttatttatcttaaattataatcgttaaatgtttggaagataatttttgaatcataacgtcagcataacttcatttgacttctcaataatcttgatactagaagcaataaaagaaccattattaaatataannnntaaaaaaaaaaactcgtcgaaanaaatatacctttaagcattttaataaaatgttatgcttctnagcatattcctnatatatactagtgaagaggaacatgttctccttgcntgagagctctattcattatatgtntgtgctcaattgtatacagcatcactgtgatgt

SEQ ID NO: 284799 - DNA, 5043 bp, Homo sapiens
atgcgccgacccggcgccattttggtggccgggcgcggaggtgattccacactgaggcgagcgcggcggccggggtggtagtggcagtgttcgtgtgctcaggtctgaatcgccgagggaggaggcggtggaggaagaggtggcggcggtggcggtggtcgtagcggtggcggaggaggcgggtacgaatcagctgcgggcggagacatggccaacatcgcggtgcagcgaatcaagcgggagttcaaggaggtgctgaagagcgaggaggtccggtttatcactaaaatatggcatcctaatattagttccgtcacaggggctatttgtttggatatcctgaaagatcaatgggcagctgcaatgactctccgcacggtattattgtcattgcaagcactattggcagctgcagagccagatgatccacaggatgctgtagtagcaaatcagtacaaacaaaatcccgaaatgttcaaacagacagctcgactttgggcacatgtgtatgctggagcaccagtttctagtccagaatacaccaaaaaaatagaaaacctatgtgctatgggctttgataggaatgcagtaatagtggccttgtcttcaaaatcatgggatgtagagactgcaacagaattgcttctgagtaactgaggcatagagagctgctgatatagtcaagcttgcctcttcttgaggagcaccaacatctgttatttttaggattctgcatagatttcttttaaactggcattcttgcctaatgatgttatctaggcaccattggagactgaaaaaaaaaaatccctgctctgtaaataaagctaattaaacgtctgtgtaaatttaaaaaggggaaatactttaattttttttcttaatagtgtaaaaattccctgagctaagctaaaaccatggaagaaacatgctactttagtgtttagcagtgtaccaagactagcaagagtttgcttcaggattttgttgaataattaagataatattttgagtgtgtcagggccattcaaattgttggtgttgcatcacagctaccttaactgtttttaacatggatcctctgtgcctgtgaatttacttgcatgcttgtacttgacttcttaggatgggtagctgaaaagaccaccattttaagcatttgagaattcttaaatatgaaatttattcagaattgaagatggtgacctattcagagcctttttgtccttgtcaacagactgggacagtgtctgattcccccttcacccccccccacccccgccttgccacacacagctaatattctaatggtaaatttctctgtatcaggtggggaaatgtgctgaaggacagtatgtatcccttgcttcatttttaggtcgtaggtttggaatgtcttgtcccagttcttcaaacactcttaaatttttcttaagtaatgtaaaaatggaactgccaattttatttctcttgcaaaaatagtaaatacttgatgttacattattcccaggtttaatgaaagaacccaacttagtttttcagtgaatttgacacctattttttagtgatgaaatttttctttgagaactggcaaggatgcagtcagctgtttgcagtttttagcctgattttggggtctatagagattgctttattggatacttcaagtcattcttgcttgcacttcccctattgacacatgaaagctgtgttggtgttttattgtacatacttcagatgcacataggaatagaagtgtgttataaatctagctttctttatgatgtttctgataatacgagaattgaaaactttaccttctcttgtacatagtcagactatttgtattaaatttacatttcattctaagttcaaaagtttgaaaattattagttttgcaagatcacacactaatgtaaccattttatgaaggttgaagtggatttatgcaggcagttctatatatagaaatacaattctttttaaatttttaggaccaatacaaaataacaaaaatgtaatggaatcagactgaattaaagtaaggctgtatattgaaagtcatattataaaaggtttgctttctttaagtgttatttatcttaaattataatcgttaaatgtttggaagataatttttgaatcataacgtcagcataacttcatttgacttctcaataatcttgatactagaagcaataaaagaaccattattaaatatattgtaatgttaaagatgtgaaggttcttccaaaaatttgtaaggctttcctaattaacagtaaactcttatagctgatattattacatactaaacacaagttgctgttttttccccatatgtttgcttacgcatgtctttatacaatcacctctttttattgctgtagtttattttctaaagatgccaaaggaaacaagatttttctttatttattttaaatacctgaaacctcgtactttatattttgaagtaaggtgggattgtgtgaaaatgtggatggtttttctccagtgttggttagaactactttttttaagtggagggcaacttggtagtattagtagaatttgggtttaaaaatatcagacacatctacccagtttattttttgcctgtattatcagggtatatttaattgtcctgtggttaaacaaaggtgagagagctcagaggtttctaaaggtcaagcattttacatatatacatacatacatgctcttggaggcagctatatcctgctttgatttttatgcacatgagccctatagggttatatactcatctaactacacttcagcatccccagtgcccaagaaattggaaagtacaatatttggtttgagacattcttcataaaagattctttattataaaaatttacctcatttacatttaatgtgatgatcttttttttcctttctggtatatttcccactgtactgtttggtttttgttattctcttgtctgtgggtagatttagttacccaaacatagaaactaaagcaattgcttttttcctctggtcttaaatatgtttggacaaaaagacactaaaaggtcaggcctaggggaaaagtaccctggtggaaattatttttgtaattcttaatatttttgagttggctccgtttgtcagttttaaaagcctcaaaaattatgttaaaaaaaaaatccagtgaaatcccatttagggcaggccgatttgttagaagtcactgatgctccagtaggcttttgttataatcaggcctgtttcctgagtatgtgcctcttttaaaagaagaaataattagctgtatagtatttcagtactgatgaatgaatgaatgaatgaatgggcagttagtggacccaaataagtattcagtggtatataaatatttgaggaactaggtactgaattaggtgctctgagttggcaccccgaaatgtttggaatcacgactatgatttacttaaacacgtaacacattcaaggatatataaatggagtctaagtattttgcttttgaagagaataatctatgaaatggaagacttgattttttttttcattttttagaagtaatacacatttatgattgttggcacataaaactatgcaaaataattctttttaagtatctgtaagaaagaattggcagtttaaacggattttgcttatttatgcactacagaatgcagcatactgtattactgttgaggctgcttaataagtttaccaatgtgaaaagcagatcttgggtataagtgtatgcctgatttgagcttttaaaactgtgcagtaggtgtatggtaatgttttacaatcctatgtagcaaaataggaaattatgaatttttgttgttattgttttaaagatttaagatggattggggtagggaacagctggagccaggtataccttctagtatgtagagggaaacaatgtttagataggaaaaaggaagccgtctgtttacagttaactttatttcatggacttctacaaaatgttgtattaatcactttttctagttcaaggaatttcaattccagggtacaaaccattgatttaaaaattacgtttccattctttttagtatcagtttaaagtaaatgcttaccatcagccagttgctgtcactgggaagaaggcaacttgaagtatttactgataaaatagcctttattcccaagtgtgacttttcttcagtgtctacatattatgtcacacgttctatttgcactgctgcaatatagatcaaagatcttgtggcataggggtaggggagtgttagtatctcccttgtcccatttgttctgttactgcttcattggactgatataccctcatgaacttgcaatcacctaaatggaagtcttgaatgtgtcaccttttgcttggttatttcaaccatgctgctatatataatcaggtgtggcacagtttgtcagtttgattataggtgtgagtggatagaaatcattacactgtgctgttaacgatccttgtctgcttgctgttacctactttttacaggcatcataataaaagctagactatttctttggggggaaagagacttatttaatgtaatttaaaaaacttttccaatagaaaatgaaatattattgaaaataatatctattttttagctttcagcaattgatggtgctttgttgtggtgtctgctggaagtctactgccattatagggaaccttgcttgttagcttctctagatctctattctaaacaatctgttagtgatgataaattctgtaggagggtctattctgagccgttaacttcctgtaaggggaaaatgggtgggttaccagaaataccattgaagcagggtgggctgtggggtggaaggttggggtatttgtcttgagaattaaaaactacgaaacacttttgtacacaactgattttttaaaaaataaacacatttttaaagatgttgaatttttccccccttattgggaattcttaaaaataaatgcatgcatgttttcccctgaaaaaaaataaaatgatgaaacaaaaaact

SEQ ID NO: 284800 - DNA, 4990 bp, Homo sapiens
gtggcggtggtcgtagcggtggcggaggaggcgggtacgaatcagctgcgggcggagacatggccaacatcgcggtgcagcgaatcaagcgggagttcaaggaggtgctgaagagcgaggagacgagcaaaaatcaaattaaagtagatcttgtagatgagaattttacagaattaagaggagaaatagcaggacctccagacacaccatatgaaggaggaagataccaactagagataaaaataccagaaacatacccatttaatccccctaaggtccggtttatcactaaaatatggcatcctaatattagttccgtcacaggggctatttgtttggatatcctgaaagatcaatgggcagctgcaatgactctccgcacggtattattgtcattgcaagcactattggcagctgcagagccagatgatccacaggatgctgtagtagcaaatcagtacaaacaaaatcccgaaatgttcaaacagacagctcgactttgggcacatgtgtatgctggagcaccagtttctagtccagaatacaccaaaaaaatagaaaacctatgtgctatgggctttgatagggtaagtacataagggcatgcatagagagctgctgatatagtcaagcttgcctcttcttgaggagcaccaacatctgttatttttaggattctgcatagatttcttttaaactggcattcttgcctaatgatgttatctaggcaccattggagactgaaaaaaaaaaatccctgctctgtaaataaagctaattaaacgtctgtgtaaatttaaaaaggggaaatactttaattttttttcttaatagtgtaaaaattccctgagctaagctaaaaccatggaagaaacatgctactttagtgtttagcagtgtaccaagactagcaagagtttgcttcaggattttgttgaataattaagataatattttgagtgtgtcagggccattcaaattgttggtgttgcatcacagctaccttaactgtttttaacatggatcctctgtgcctgtgaatttacttgcatgcttgtacttgacttcttaggatgggtagctgaaaagaccaccattttaagcatttgagaattcttaaatatgaaatttattcagaattgaagatggtgacctattcagagcctttttgtccttgtcaacagactgggacagtgtctgattcccccttcacccccccccacccccgccttgccacacacagctaatattctaatggtaaatttctctgtatcaggtggggaaatgtgctgaaggacagtatgtatcccttgcttcatttttaggtcgtaggtttggaatgtcttgtcccagttcttcaaacactcttaaatttttcttaagtaatgtaaaaatggaactgccaattttatttctcttgcaaaaatagtaaatacttgatgttacattattcccaggtttaatgaaagaacccaacttagtttttcagtgaatttgacacctattttttagtgatgaaatttttctttgagaactggcaaggatgcagtcagctgtttgcagtttttagcctgattttggggtctatagagattgctttattggatacttcaagtcattcttgcttgcacttcccctattgacacatgaaagctgtgttggtgttttattgtacatacttcagatgcacataggaatagaagtgtgttataaatctagctttctttatgatgtttctgataatacgagaattgaaaactttaccttctcttgtacatagtcagactatttgtattaaatttacatttcattctaagttcaaaagtttgaaaattattagttttgcaagatcacacactaatgtaaccattttatgaaggttgaagtggatttatgcaggcagttctatatatagaaatacaattctttttaaatttttaggaccaatacaaaataacaaaaatgtaatggaatcagactgaattaaagtaaggctgtatattgaaagtcatattataaaaggtttgctttctttaagtgttatttatcttaaattataatcgttaaatgtttggaagataatttttgaatcataacgtcagcataacttcatttgacttctcaataatcttgatactagaagcaataaaagaaccattattaaatatattgtaatgttaaagatgtgaaggttcttccaaaaatttgtaaggctttcctaattaacagtaaactcttatagctgatattattacatactaaacacaagttgctgttttttccccatatgtttgcttacgcatgtctttatacaatcacctctttttattgctgtagtttattttctaaagatgccaaaggaaacaagatttttctttatttattttaaatacctgaaacctcgtactttatattttgaagtaaggtgggattgtgtgaaaatgtggatggtttttctccagtgttggttagaactactttttttaagtggagggcaacttggtagtattagtagaatttgggtttaaaaatatcagacacatctacccagtttattttttgcctgtattatcagggtatatttaattgtcctgtggttaaacaaaggtgagagagctcagaggtttctaaaggtcaagcattttacatatatacatacatacatgctcttggaggcagctatatcctgctttgatttttatgcacatgagccctatagggttatatactcatctaactacacttcagcatccccagtgcccaagaaattggaaagtacaatatttggtttgagacattcttcataaaagattctttattataaaaatttacctcatttacatttaatgtgatgatcttttttttcctttctggtatatttcccactgtactgtttggtttttgttattctcttgtctgtgggtagatttagttacccaaacatagaaactaaagcaattgcttttttcctctggtcttaaatatgtttggacaaaaagacactaaaaggtcaggcctaggggaaaagtaccctggtggaaattatttttgtaattcttaatatttttgagttggctccgtttgtcagttttaaaagcctcaaaaattatgttaaaaaaaaaatccagtgaaatcccatttagggcaggccgatttgttagaagtcactgatgctccagtaggcttttgttataatcaggcctgtttcctgagtatgtgcctcttttaaaagaagaaataattagctgtatagtatttcagtactgatgaatgaatgaatgaatgaatgggcagttagtggacccaaataagtattcagtggtatataaatatttgaggaactaggtactgaattaggtgctctgagttggcaccccgaaatgtttggaatcacgactatgatttacttaaacacgtaacacattcaaggatatataaatggagtctaagtattttgcttttgaagagaataatctatgaaatggaagacttgattttttttttcattttttagaagtaatacacatttatgattgttggcacataaaactatgcaaaataattctttttaagtatctgtaagaaagaattggcagtttaaacggattttgcttatttatgcactacagaatgcagcatactgtattactgttgaggctgcttaataagtttaccaatgtgaaaagcagatcttgggtataagtgtatgcctgatttgagcttttaaaactgtgcagtaggtgtatggtaatgttttacaatcctatgtagcaaaataggaaattatgaatttttgttgttattgttttaaagatttaagatggattggggtagggaacagctggagccaggtataccttctagtatgtagagggaaacaatgtttagataggaaaaaggaagccgtctgtttacagttaactttatttcatggacttctacaaaatgttgtattaatcactttttctagttcaaggaatttcaattccagggtacaaaccattgatttaaaaattacgtttccattctttttagtatcagtttaaagtaaatgcttaccatcagccagttgctgtcactgggaagaaggcaacttgaagtatttactgataaaatagcctttattcccaagtgtgacttttcttcagtgtctacatattatgtcacacgttctatttgcactgctgcaatatagatcaaagatcttgtggcataggggtaggggagtgttagtatctcccttgtcccatttgttctgttactgcttcattggactgatataccctcatgaacttgcaatcacctaaatggaagtcttgaatgtgtcaccttttgcttggttatttcaaccatgctgctatatataatcaggtgtggcacagtttgtcagtttgattataggtgtgagtggatagaaatcattacactgtgctgttaacgatccttgtctgcttgctgttacctactttttacaggcatcataataaaagctagactatttctttggggggaaagagacttatttaatgtaatttaaaaaacttttccaatagaaaatgaaatattattgaaaataatatctattttttagctttcagcaattgatggtgctttgttgtggtgtctgctggaagtctactgccattatagggaaccttgcttgttagcttctctagatctctattctaaacaatctgttagtgatgataaattctgtaggagggtctattctgagccgttaacttcctgtaaggggaaaatgggtgggttaccagaaataccattgaagcagggtgggctgtggggtggaaggttggggtatttgtcttgagaattaaaaactacgaaacacttttgtacacaactgattttttaaaaaataaacacatttttaaagatgttgaatttttccccccttattgggaattcttaaaaataaatgcatgcatgttttcccctgaaaaaaaataaaatgatgaaacaaaaaact

SEQ ID NO: 284801 - DNA, 4787 bp, Homo sapiens
ggctgcagtgagcgatagtcatgccactgcactccagccttggtgatagagcaagaccctgtctcaaaaaaaaaaaaaaaaaaaaaaaaaggaaaataagagaaaatctagttttggtaaacatattttctgttttcaaagtcagtgatttttttatttttactaattactgtcattgattttagaagctttccatgcactgcaaatgtaaatcaacttacagaaaagaaacaaggtgttaattcccagtataaagagtgaatgattcagtattgtttaaatgtttccttgagatttaatttcctgtccccttttcttctctacagaatgcagtaatagtggccttgtcttcaaaatcatgggatgtagagactgcaacagaattgcttctgagtaactgaggcatagagagctgctgatatagtcaagcttgcctcttcttgaggagcaccaacatctgttatttttaggattctgcatagatttcttttaaactggcattcttgcctaatgatgttatctaggcaccattggagactgaaaaaaaaaaatccctgctctgtaaataaagctaattaaacgtctgtgtaaatttaaaaaggggaaatactttaattttttttcttaatagtgtaaaaattccctgagctaagctaaaaccatggaagaaacatgctactttagtgtttagcagtgtaccaagactagcaagagtttgcttcaggattttgttgaataattaagataatattttgagtgtgtcagggccattcaaattgttggtgttgcatcacagctaccttaactgtttttaacatggatcctctgtgcctgtgaatttacttgcatgcttgtacttgacttcttaggatgggtagctgaaaagaccaccattttaagcatttgagaattcttaaatatgaaatttattcagaattgaagatggtgacctattcagagcctttttgtccttgtcaacagactgggacagtgtctgattcccccttcacccccccccacccccgccttgccacacacagctaatattctaatggtaaatttctctgtatcaggtggggaaatgtgctgaaggacagtatgtatcccttgcttcatttttaggtcgtaggtttggaatgtcttgtcccagttcttcaaacactcttaaatttttcttaagtaatgtaaaaatggaactgccaattttatttctcttgcaaaaatagtaaatacttgatgttacattattcccaggtttaatgaaagaacccaacttagtttttcagtgaatttgacacctattttttagtgatgaaatttttctttgagaactggcaaggatgcagtcagctgtttgcagtttttagcctgattttggggtctatagagattgctttattggatacttcaagtcattcttgcttgcacttcccctattgacacatgaaagctgtgttggtgttttattgtacatacttcagatgcacataggaatagaagtgtgttataaatctagctttctttatgatgtttctgataatacgagaattgaaaactttaccttctcttgtacatagtcagactatttgtattaaatttacatttcattctaagttcaaaagtttgaaaattattagttttgcaagatcacacactaatgtaaccattttatgaaggttgaagtggatttatgcaggcagttctatatatagaaatacaattctttttaaatttttaggaccaatacaaaataacaaaaatgtaatggaatcagactgaattaaagtaaggctgtatattgaaagtcatattataaaaggtttgctttctttaagtgttatttatcttaaattataatcgttaaatgtttggaagataatttttgaatcataacgtcagcataacttcatttgacttctcaataatcttgatactagaagcaataaaagaaccattattaaatatattgtaatgttaaagatgtgaaggttcttccaaaaatttgtaaggctttcctaattaacagtaaactcttatagctgatattattacatactaaacacaagttgctgttttttccccatatgtttgcttacgcatgtctttatacaatcacctctttttattgctgtagtttattttctaaagatgccaaaggaaacaagatttttctttatttattttaaatacctgaaacctcgtactttatattttgaagtaaggtgggattgtgtgaaaatgtggatggtttttctccagtgttggttagaactactttttttaagtggagggcaacttggtagtattagtagaatttgggtttaaaaatatcagacacatctacccagtttattttttgcctgtattatcagggtatatttaattgtcctgtggttaaacaaaggtgagagagctcagaggtttctaaaggtcaagcattttacatatatacatacatacatgctcttggaggcagctatatcctgctttgatttttatgcacatgagccctatagggttatatactcatctaactacacttcagcatccccagtgcccaagaaattggaaagtacaatatttggtttgagacattcttcataaaagattctttattataaaaatttacctcatttacatttaatgtgatgatcttttttttcctttctggtatatttcccactgtactgtttggtttttgttattctcttgtctgtgggtagatttagttacccaaacatagaaactaaagcaattgcttttttcctctggtcttaaatatgtttggacaaaaagacactaaaaggtcaggcctaggggaaaagtaccctggtggaaattatttttgtaattcttaatatttttgagttggctccgtttgtcagttttaaaagcctcaaaaattatgttaaaaaaaaaatccagtgaaatcccatttagggcaggccgatttgttagaagtcactgatgctccagtaggcttttgttataatcaggcctgtttcctgagtatgtgcctcttttaaaagaagaaataattagctgtatagtatttcagtactgatgaatgaatgaatgaatgaatgggcagttagtggacccaaataagtattcagtggtatataaatatttgaggaactaggtactgaattaggtgctctgagttggcaccccgaaatgtttggaatcacgactatgatttacttaaacacgtaacacattcaaggatatataaatggagtctaagtattttgcttttgaagagaataatctatgaaatggaagacttgattttttttttcattttttagaagtaatacacatttatgattgttggcacataaaactatgcaaaataattctttttaagtatctgtaagaaagaattggcagtttaaacggattttgcttatttatgcactacagaatgcagcatactgtattactgttgaggctgcttaataagtttaccaatgtgaaaagcagatcttgggtataagtgtatgcctgatttgagcttttaaaactgtgcagtaggtgtatggtaatgttttacaatcctatgtagcaaaataggaaattatgaatttttgttgttattgttttaaagatttaagatggattggggtagggaacagctggagccaggtataccttctagtatgtagagggaaacaatgtttagataggaaaaaggaagccgtctgtttacagttaactttatttcatggacttctacaaaatgttgtattaatcactttttctagttcaaggaatttcaattccagggtacaaaccattgatttaaaaattacgtttccattctttttagtatcagtttaaagtaaatgcttaccatcagccagttgctgtcactgggaagaaggcaacttgaagtatttactgataaaatagcctttattcccaagtgtgacttttcttcagtgtctacatattatgtcacacgttctatttgcactgctgcaatatagatcaaagatcttgtggcataggggtaggggagtgttagtatctcccttgtcccatttgttctgttactgcttcattggactgatataccctcatgaacttgcaatcacctaaatggaagtcttgaatgtgtcaccttttgcttggttatttcaaccatgctgctatatataatcaggtgtggcacagtttgtcagtttgattataggtgtgagtggatagaaatcattacactgtgctgttaacgatccttgtctgcttgctgttacctactttttacaggcatcataataaaagctagactatttctttggggggaaagagacttatttaatgtaatttaaaaaacttttccaatagaaaatgaaatattattgaaaataatatctattttttagctttcagcaattgatggtgctttgttgtggtgtctgctggaagtctactgccattatagggaaccttgcttgttagcttctctagatctctattctaaacaatctgttagtgatgataaattctgtaggagggtctattctgagccgttaacttcctgtaaggggaaaatgggtgggttaccagaaataccattgaagcagggtgggctgtggggtggaaggttggggtatttgtcttgagaattaaaaactacgaaacacttttgtacacaactgattttttaaaaaataaacacatttttaaagatgttgaatttttccccccttattgggaattcttaaaaataaatgcatgcatgttttcccctgaaaaaaaataaaatgatgaaacaaaaaact

SEQ ID NO: 284802 - DNA, 4356 bp, Homo sapiens
tatcacaggcgtcctagctggtatatctgttatttttaggattctgcatagatttcttttaaactggcattcttgcctaatgatgttatctaggcaccattggagactgaaaaaaaaaaatccctgctctgtaaataaagctaattaaacgtctgtgtaaatttaaaaaggggaaatactttaattttttttcttaatagtgtaaaaattccctgagctaagctaaaaccatggaagaaacatgctactttagtgtttagcagtgtaccaagactagcaagagtttgcttcaggattttgttgaataattaagataatattttgagtgtgtcagggccattcaaattgttggtgttgcatcacagctaccttaactgtttttaacatggatcctctgtgcctgtgaatttacttgcatgcttgtacttgacttcttaggatgggtagctgaaaagaccaccattttaagcatttgagaattcttaaatatgaaatttattcagaattgaagatggtgacctattcagagcctttttgtccttgtcaacagactgggacagtgtctgattcccccttcacccccccccacccccgccttgccacacacagctaatattctaatggtaaatttctctgtatcaggtggggaaatgtgctgaaggacagtatgtatcccttgcttcatttttaggtcgtaggtttggaatgtcttgtcccagttcttcaaacactcttaaatttttcttaagtaatgtaaaaatggaactgccaattttatttctcttgcaaaaatagtaaatacttgatgttacattattcccaggtttaatgaaagaacccaacttagtttttcagtgaatttgacacctattttttagtgatgaaatttttctttgagaactggcaaggatgcagtcagctgtttgcagtttttagcctgattttggggtctatagagattgctttattggatacttcaagtcattcttgcttgcacttcccctattgacacatgaaagctgtgttggtgttttattgtacatacttcagatgcacataggaatagaagtgtgttataaatctagctttctttatgatgtttctgataatacgagaattgaaaactttaccttctcttgtacatagtcagactatttgtattaaatttacatttcattctaagttcaaaagtttgaaaattattagttttgcaagatcacacactaatgtaaccattttatgaaggttgaagtggatttatgcaggcagttctatatatagaaatacaattctttttaaatttttaggaccaatacaaaataacaaaaatgtaatggaatcagactgaattaaagtaaggctgtatattgaaagtcatattataaaaggtttgctttctttaagtgttatttatcttaaattataatcgttaaatgtttggaagataatttttgaatcataacgtcagcataacttcatttgacttctcaataatcttgatactagaagcaataaaagaaccattattaaatatattgtaatgttaaagatgtgaaggttcttccaaaaatttgtaaggctttcctaattaacagtaaactcttatagctgatattattacatactaaacacaagttgctgttttttccccatatgtttgcttacgcatgtctttatacaatcacctctttttattgctgtagtttattttctaaagatgccaaaggaaacaagatttttctttatttattttaaatacctgaaacctcgtactttatattttgaagtaaggtgggattgtgtgaaaatgtggatggtttttctccagtgttggttagaactactttttttaagtggagggcaacttggtagtattagtagaatttgggtttaaaaatatcagacacatctacccagtttattttttgcctgtattatcagggtatatttaattgtcctgtggttaaacaaaggtgagagagctcagaggtttctaaaggtcaagcattttacatatatacatacatacatgctcttggaggcagctatatcctgctttgatttttatgcacatgagccctatagggttatatactcatctaactacacttcagcatccccagtgcccaagaaattggaaagtacaatatttggtttgagacattcttcataaaagattctttattataaaaatttacctcatttacatttaatgtgatgatcttttttttcctttctggtatatttcccactgtactgtttggtttttgttattctcttgtctgtgggtagatttagttacccaaacatagaaactaaagcaattgcttttttcctctggtcttaaatatgtttggacaaaaagacactaaaaggtcaggcctaggggaaaagtaccctggtggaaattatttttgtaattcttaatatttttgagttggctccgtttgtcagttttaaaagcctcaaaaattatgttaaaaaaaaaatccagtgaaatcccatttagggcaggccgatttgttagaagtcactgatgctccagtaggcttttgttataatcaggcctgtttcctgagtatgtgcctcttttaaaagaagaaataattagctgtatagtatttcagtactgatgaatgaatgaatgaatgaatgggcagttagtggacccaaataagtattcagtggtatataaatatttgaggaactaggtactgaattaggtgctctgagttggcaccccgaaatgtttggaatcacgactatgatttacttaaacacgtaacacattcaaggatatataaatggagtctaagtattttgcttttgaagagaataatctatgaaatggaagacttgattttttttttcattttttagaagtaatacacatttatgattgttggcacataaaactatgcaaaataattctttttaagtatctgtaagaaagaattggcagtttaaacggattttgcttatttatgcactacagaatgcagcatactgtattactgttgaggctgcttaataagtttaccaatgtgaaaagcagatcttgggtataagtgtatgcctgatttgagcttttaaaactgtgcagtaggtgtatggtaatgttttacaatcctatgtagcaaaataggaaattatgaatttttgttgttattgttttaaagatttaagatggattggggtagggaacagctggagccaggtataccttctagtatgtagagggaaacaatgtttagataggaaaaaggaagccgtctgtttacagttaactttatttcatggacttctacaaaatgttgtattaatcactttttctagttcaaggaatttcaattccagggtacaaaccattgatttaaaaattacgtttccattctttttagtatcagtttaaagtaaatgcttaccatcagccagttgctgtcactgggaagaaggcaacttgaagtatttactgataaaatagcctttattcccaagtgtgacttttcttcagtgtctacatattatgtcacacgttctatttgcactgctgcaatatagatcaaagatcttgtggcataggggtaggggagtgttagtatctcccttgtcccatttgttctgttactgcttcattggactgatataccctcatgaacttgcaatcacctaaatggaagtcttgaatgtgtcaccttttgcttggttatttcaaccatgctgctatatataatcaggtgtggcacagtttgtcagtttgattataggtgtgagtggatagaaatcattacactgtgctgttaacgatccttgtctgcttgctgttacctactttttacaggcatcataataaaagctagactatttctttggggggaaagagacttatttaatgtaatttaaaaaacttttccaatagaaaatgaaatattattgaaaataatatctattttttagctttcagcaattgatggtgctttgttgtggtgtctgctggaagtctactgccattatagggaaccttgcttgttagcttctctagatctctattctaaacaatctgttagtgatgataaattctgtaggagggtctattctgagccgttaacttcctgtaaggggaaaatgggtgggttaccagaaataccattgaagcagggtgggctgtggggtggaaggttggggtatttgtcttgagaattaaaaactacgaaacacttttgtacacaactgattttttaaaaaataaacacatttttaaagatgttgaatttttccccccttattgggaattcttaaaaataaatgcatgcatgttttcccctgaaaaaaaataaaatgatgaaacaaaaaact

SEQ ID NO: 284803 - DNA, 2021 bp, Homo sapiens
atgcgccgacccggcgccattttggtggccgggcgcggaggtgattccacactgaggcgagcgcggcggccggggtggtagtggcagtgttcgtgtgctcaggtctgaatcgccgagggaggaggcggtggaggaagaggtggcggcggtggcggtggtcgtagcggtggcggaggaggcgggtacgaatcagctgcgggcggagacatggccaacatcgcggtgcagcgaatcaagcgggagttcaaggaggtgctgaagagcgaggagacgagcaaaaatcaaattaaagtagatcttgtagatgagaattttacagaattaagaggagaaatagcaggacctccagacacaccatatgaaggaggaagataccaactagagataaaaataccagaaacatacccatttaatccccctaaggtccggtttatcactaaaatatggcatcctaatattagttccgtcacaggggctatttgtttggatatcctgaaagatcaatgggcagctgcaatgactctccgcacggtattattgtcattgcaagcactattggcagctgcagagccagatgatccacaggatgctgtagtagcaaatcagtacaaacaaaatcccgaaatgttcaaacagacagctcgactttgggcacatgtgtatgctggagcaccagtttctagtccagaatacaccaaaaaaatagaaaacctatgtgctatgggctttgataggaatgcagtaatagtggccttgtcttcaaaatcatgggatgtagagactgcaacagaattgcttctgagtaactgaggcatagagagctgctgatatagtcaagcttgcctcttcttgaggagcaccaacatctgttatttttaggattctgcatagatttcttttaaactggcattcttgcctaatgatgttatctaggcaccattggagactgaaaaaaaaaaatccctgctctgtaaataaagctaattaaacgtctgtgtaaatttaaaaaggggaaatactttaattttttttcttaatagtgtaaaaattccctgagctaagctaaaaccatggaagaaacatgctactttagtgtttagcagtgtaccaagactagcaagagtttgcttcaggattttgttgaataattaagataatattttgagtgtgtcagggccattcaaattgttggtgttgcatcacagctaccttaactgtttttaacatggatcctctgtgcctgtgaatttacttgcatgcttgtacttgacttcttaggatgggtagctgaaaagaccaccattttaagcatttgagaattcttaaatatgaaatttattcagaattgaagatggtgacctattcagagcctttttgtccttgtcaacagactgggacagtgtctgattcccccttcacccccccccacccccgccttgccacacacagctaatattctaatggtaaatttctctgtatcaggtggggaaatgtgctgaaggacagtatgtatcccttgcttcatttttaggtcgtaggtttggaatgtcttgtcccagttcttcaaacactcttaaatttttcttaagtaatgtaaaaatggaactgccaattttatttctcttgcaaaaatagtaaatacttgatgttacattattcccaggtttaatgaaagaacccaacttagtttttcagtgaatttgacacctattttttagtgatgaaatttttctttgagaactggcaaggatgcagtcagctgtttgcagtttttagcctgattttggggtctatagagattgctttattggatacttcaagtcattcttgcttgcacttcccctattgacacatgaaagctgtgttggtgttttattgtacatacttcagatgcacataggaatagaagtgtgttataaatctagctttctttatgatgtttctgataatacgagaattgaaaactttaccttctcttgtacatagtcagactatttgtattaaatttacatttcattcta

SEQ ID NO: 284804 - DNA, 1054 bp, Homo sapiens
atgcgccgacccggcgccattttggtggccgggcgcggaggtgattccacactgaggcgagcgcggcggccggggtggtagtggcagtgttcgtgtgctcaggtctgaatcgccgagggaggaggcggtggaggaagaggtggcggcggtggcggtggtcgtagcggtggcggaggaggcgggtacgaatcagctgcgggcggagacatggccaacatcgcggtgcagcgaatcaagcgggagttcaaggaggtgctgaagagcgaggagacgagcaaaaatcaaattaaagtagatcttgtagatgagaattttacagaattaagaggagaaatagcaggacctccagacacaccatatgaaggaggaagataccaactagagataaaaataccagaaacatacccatttaatccccctaaggtccggtttatcactaaaatatggcatcctaatattagttccgtcacaggggctatttgtttggatatcctgaaagatcaatgggcagctgcaatgactctccgcacggtattattgtcattgcaagcactattggcagctgcagagccagatgatccacaggatgctgtagtagcaaatcagtacaaacaaaatcccgaaatgttcaaacagacagctcgactttgggcacatgtgtatgctggagcaccagtttctagtccagaatacaccaaaaaaatagaaaacctatgtgctatgggctttgataggaatgcagtaatagtggccttgtcttcaaaatcatgggatgtagagactgcaacagaattgcttctgagtaactgaggcatagagagctgctgatatagtcaagcttgcctcttcttgaggagcaccaacatctgttatttttaggattctgcatagatttcttttaaactggcattcttgcctaatgatgttatctaggcaccattggagactgaactatctaaagagtgacagccccgcgatacacccgggagcattgtgtgactcacgaacaacgtcccgtgtctatgggggccctggtgtaacattgatcggttgt

SEQ ID NO: 284805 - DNA, 876 bp, Homo sapiens
atgcgccgacccggcgccattttggtggccgggcgcggaggtgattccacactgaggcgagcgcggcggccggggtggtagtggcagtgttcgtgtgctcaggtctgaatcgccgagggaggaggcggtggaggaagaggtggcggcggtggcggtggtcgtagcggtggcggaggaggcgggtacgaatcagctgcgggcggagacatggccaacatcgcggtgcagcgaatcaagcgggagttcaaggaggtgctgaagagcgaggagacgagcaaaaatcaaattaaagtagatcttgtagatgagaattttacagaattaagaggagaaatagcaggacctccagacacaccatatgaaggaggaagataccaactagagataaaaataccagaaacatacccatttaatccccctaaggtccggtttatcactaaaatatggcatcctaatattagttccgtcacaggggctatttgtttggatatcctgaaagatcaatgggcagctgcaatgactctccgcacggtattattgtcattgcaagcactattggcagctgcagagccagatgatccacaggatgctgtagtagcaaatcagaatgcagtaatagtggccttgtcttcaaaatcatgggatgtagagactgcaacagaattgcttctgagtaactgaggcatagagagctgctgatatagtcaagcttgcctcttcttgaggagcaccaacatctgttatttttaggattctgcatagatttcttttaaactggcattcttgcctaatgatgttatctaggcaccattggagactgaaaaaaaaaaatccctgctctgtaaataaagctaattaaacgtctgtgtaaattta

SEQ ID NO: 284806 - DNA, 610 bp, Homo sapiens
aattgtgagtcgaagcttcaggttaagtggtcttttctcgagtgacataggttgtctataatgcaaagtgaatcacattttaaatgtagatttgttttatttggaaaagtaggattgtaggcgataagagctgaaatatatcaaatattataactgtaatgtcatgtcaatcaatttttccccccatatagtacaaacaaaatcccgaaatgttcaaacagacagctcgactttgggcacatgtgtatgctggagcaccagtttctagtccagaatacaccaaaaaaatagaaaacctatgtgctatgggctttgatagggtaagtacataagggcatgttgattttgatatattgattgattttaaattattgcaaattcttggctgacaaaagtggtttagaaaataagagaaattcgcagcctgggcaacatggcgaaacccatctctacaaaaattagctggacatggtagtgagtgcctgtaattccagctactctgaaggctgaggtgagagaatcccttgggcccaggaggtcgaggctgcagtgagcgatagtcatgccactgcactccagccttggtgatagagcaagaccctgtctcaaa

SEQ ID NO: 284807 - DNA, 435 bp, Homo sapiens
atgatgtaatagatatagggacctttctttttttagtttgaagatttcattttcttgtagttctacttaaactgttttatttctgttactgaaaaactcaagtgtgctttatattctaggtccggtttatcactaaaatatggcatcctaatattagttccgtcacaggggctatttgtttggatatcctgaaagatcaatggtaagagattttgaattcaccttctctccttctcatatgaataccaagactgtaagagtgttaaatgtgtaattgcctcaaaacatatattatactttatcttgtttgggcagtaactttaaaagtctcttaagtgcataactgaaaatgcattataattgagatcacaatccatatttaaatagaaacttgttagataatgttagatgctagctttacactttgaaagcctt

SEQ ID NO: 284808 - DNA, 2586 bp, Homo sapiens
ttttttcctgagacagagtcttgctctgttgcccaggctggagtgcaatggcacaatctcaactcactgcaacctccaccccctgagttcgagcaattctcctgccttggctcccgagtagctgggattacaggcgcctcaccatgcctggctaatttttgtatttttagtagagacggagtttcagcatttgcaggtgattttgaactgctgacctcaggtgatccacctgcctcagcctcccaaaatgctgggattacaggcatgagccactgcgcccagccgagagttttaaagaaggtgaaagctcttcccttttcctaacctagcctggccttgattccgctgatctaccttctgagatatcatccttcttcagggagataaggaaaaaaagccacagggtcccggagagccaggggaatggtgttacaggcacacatggcattcagggatgtggctgtggatttcacccaggatgagtggaggctgctgagccctgctcaaaggactctgtacagagaggtgatgctggagaactacagcaacctggtctcactgggaatttcattttctaaaccagaactcatcacccagctggagcaagggaaagagacctggagagaggaaaaaaaatgttcaccggcaacctgtccagcagatccagagccagagctctacctcgatcctttctgccctccgggtttctccagtcagaaattccccatgcagcatgtgctgtgtaatcatcccccctggatcttcacatgcttgtgtgcagaaggtaacatccagcctggggatccaggcccaggggaccaggagaagcagcaacaagcctctgaggggagaccctggagtgatcaagcagaaggtcctgagggagaaggtgccatgcctttgtttggaagaaccaagaaaaggactctgggagcgttctccaggccaccccagaggcagccagtcagctctcggaacggcctcagaggggtggagttagaagccagcccagctcagacagggaaccctgaggaaacagacaaattgttgaagaggatagaagtcttaggatttggaacagtcaactgtggagagtgtggactgagcttcagcaagatgacaaacctgctcagtcaccagcggatacactcaggggagaagccctacgtgtgtggggtatgtgagaagggcttcagcctaaagaagagcctcgccagacaccagaaggcacactcgggggagaagccaattgtgtgcagggagtgtggacgaggctttaaccggaagtcaacgctaatcatacacgaacggacacactccggtgagaaaccttacatgtgcagtgagtgtgggcgaggcttcagccagaagtcaaacctcatcatacaccagaggacacactcaggggaaaagccttacgtgtgccgggaatgtggcaaaggcttcagccagaagtcagctgtcgtgagacaccagaggacacacttggaggagaagaccatcgtgtgcagtgactgtggcctgggcttcagcgacaggtcaaacctcatctcccaccagaggacgcactctggggagaagccctacgcctgcaaggagtgtgggcgatgcttcaggcagaggaccacccttgtcaaccaccagaggacacactcaaaggagaagccctatgtgtgcggggtgtgtgggcacagcttcagccagaattcaaccctcatctctcacaggcggacacacactggggagaagccgtatgtttgtggggtgtgtgggcgaggctttagtctcaagtcacacctcaacagacaccagaacatacactcaggagagaagcccattgtgtgcaaggactgtggccggggcttcagccagcaatccaacctcatcagacaccagaggacgcactcaggcgagaagcccatggtgtgtggggagtgcgggcgaggcttcagccagaagtcaaaccttgttgcacaccagaggacgcactcaggggagaggccgtatgtgtgccgagagtgcgggcgaggctttagccaccaggccggtctcatcaggcacaagcggaagcactcgagggagaagccctacatgtgcaggcagtgtggactgggctttggcaataagtcagctctaattacacacaagcgggctcactcggaagagaagccttgtgtgtgcagagagtgtggccaaggctttctccaaaagtcacacctcaccttacatcaaatgacacatacgggggagaagccatatgtgtgcaagacgtgtgggcggggcttcagcctcaagtctcacctcagcagacacaggaagaccacgtctgtccaccacagactgccagtgcagcccgaccctgagccgtgtgcagggcaaccttcggattccttatactctctctgaaggcaaagatggggacaaggactaagagtcagaatgttgacactttgatgaaatggagtagagaaatgcattctgtaagtggtcaaaggacatttgactgtttactttctccacactaagtcttctccatgttttgtggccttcggttgtaataaacttggcttctttatacatctgtaa

SEQ ID NO: 284809 - DNA, 2713 bp, Homo sapiens
cgccgagcatcctgggaggtgtggtccgggcgctgtgccgaggattcggggtagtgtagtcctggcgccccgctggaggagctccccagctggtggctggagcgaccccttgttctttggtggcgctgatctaccttctgagatatcatccttcttcagggagataaggaaaaaaagccacagggtcccggagagccaggggaatgcttcaaaagttctgctgcctgagagtaacgtcacagtaatggaacgggaagattctggaatctgtgtccccacctagacaacgattatactggcaggatctatcaggtgtacctattttggaactctggagtctagttgaaggcctccagttcccagggggaaggaagcatggaggtgtgtcctccatttggaagtagtgctaagaaaattaaaagaataaaactgggcaggggcatgagaataggatgcaaagatgaatttttggactgagtggccaagaagctccatggtgagcactcacagtctaaggctggaagtttaatgaactgttttctacatttcacaggtgttacaggcacacatggcattcagggatgtggctgtggatttcacccaggatgagtggaggctgctgagccctgctcaaaggactctgtacagagaggtgatgctggagaactacagcaacctggtctcactgggaatttcattttctaaaccagaactcatcacccagctggagcaagggaaagagacctggagagaggaaaaaaaatgttcaccggcaacctgtccagcagatccagagccagagctctacctcgatcctttctgccctccgggtttctccagtcagaaattccccatgcagcatgtgctgtgtaatcatcccccctggatcttcacatgcttgtgtgcagaaggtaacatccagcctggggatccaggcccaggggaccaggagaagcagcaacaagcctctgaggggagaccctggagtgatcaagcagaaggtcctgagggagaaggtgccatgcctttgtttggaagaaccaagaaaaggactctgggagcgttctccaggccaccccagaggcagccagtcagctctcggaacggcctcagaggggtggagttagaagccagcccagctcagacagggaaccctgaggaaacagacaaattgttgaagaggatagaagtcttaggatttggaacagtcaactgtggagagtgtggactgagcttcagcaagatgacaaacctgctcagtcaccagcggatacactcaggggagaagccctacgtgtgtggggtatgtgagaagggcttcagcctaaagaagagcctcgccagacaccagaaggcacactcgggggagaagccaattgtgtgcagggagtgtggacgaggctttaaccggaagtcaacgctaatcatacacgaacggacacactccggtgagaaaccttacatgtgcagtgagtgtgggcgaggcttcagccagaagtcaaacctcatcatacaccagaggacacactcaggggaaaagccttacgtgtgccgggaatgtggcaaaggcttcagccagaagtcagctgtcgtgagacaccagaggacacacttggaggagaagaccatcgtgtgcagtgactgtggcctgggcttcagcgacaggtcaaacctcatctcccaccagaggacgcactctggggagaagccctacgcctgcaaggagtgtgggcgatgcttcaggcagaggaccacccttgtcaaccaccagaggacacactcaaaggagaagccctatgtgtgcggggtgtgtgggcacagcttcagccagaattcaaccctcatctctcacaggcggacacacactggggagaagccgtatgtttgtggggtgtgtgggcgaggctttagtctcaagtcacacctcaacagacaccagaacatacactcaggagagaagcccattgtgtgcaaggactgtggccggggcttcagccagcaatccaacctcatcagacaccagaggacgcactcaggcgagaagcccatggtgtgtggggagtgcgggcgaggcttcagccagaagtcaaaccttgttgcacaccagaggacgcactcaggggagaggccgtatgtgtgccgagagtgcgggcgaggctttagccaccaggccggtctcatcaggcacaagcggaagcactcgagggagaagccctacatgtgcaggcagtgtggactgggctttggcaataagtcagctctaattacacacaagcgggctcactcggaagagaagccttgtgtgtgcagagagtgtggccaaggctttctccaaaagtcacacctcaccttacatcaaatgacacatacgggggagaagccatatgtgtgcaagacgtgtgggcggggcttcagcctcaagtctcacctcagcagacacaggaagaccacgtctgtccaccacagactgccagtgcagcccgaccctgagccgtgtgcagggcaaccttcggattccttatactctctctgaaggcaaagatggggacaaggactaagagtcagaatgttgacactttgatgaaatggagtagagaaatgcattctgtaagtggtcaaaggacatttgactgtttactttctccacactaagtcttctccatgttttgtggccttcggttgtaataaacttggcttctttatacatctgtaa

SEQ ID NO: 284810 - DNA, 2248 bp, Homo sapiens
ccacgcgtcgccacgcgtcgccacgcgtcccgctggaggagctccccagctggtggctggagcgaccccttgttctttggtggcgctggtgttacaggcacacatggcattcagggatgtggctgtggatttcacccaggatgagtggaggctgctgagccctgctcaaaggactctgtacagagaggtgatgctggagaactacagcaacctggtctcactgggaatttcattttctaaaccagaactcatcacccagctggagcaagggaaagagacctggagagaggaaaaaaaatgttcaccggcaacctgtccagcagatccagagccagagctctacctcgatcctttctgccctccgggtttctccagtcagaaattccccatgcagcatgtgctgtgtaatcatcccccctggatcttcacatgcttgtgtgcagaaggtaacatccagcctggggatccaggcccaggggaccaggagaagcagcaacaagcctctgaggggagaccctggagtgatcaagcagaaggtcctgagggagaaggtgccatgcctttgtttggaagaaccaagaaaaggactctgggagcgttctccaggccaccccagaggcagccagtcagctctcggaacggcctcagaggggtggagttagaagccagcccagctcagacagggaaccctgaggaaacagacaaattgttgaagaggatagaagtcttaggatttggaacagtcaactgtggagagtgtggactgagcttcagcaagatgacaaacctgctcagtcaccagcggatacactcaggggagaagccctacgtgtgtggggtatgtgagaagggcttcagcctaaagaagagcctcgccagacaccagaaggcacactcgggggagaagccaattgtgtgcagggagtgtggacgaggctttaaccggaagtcaacgctaatcatacacgaacggacacactccggtgagaaaccttacatgtgcagtgagtgtgggcgaggcttcagccagaagtcaaacctcatcatacaccagaggacacactcaggggaaaagccttacgtgtgccgggaatgtggcaaaggcttcagccagaagtcagctgtcgtgagacaccagaggacacacttggaggagaagaccatcgtgtgcagtgactgtggcctgggcttcagcgacaggtcaaacctcatctcccaccagaggacgcactctggggagaagccctacgcctgcaaggagtgtgggcgatgcttcaggcagaggaccacccttgtcaaccaccagaggacacactcaaaggagaagccctatgtgtgcggggtgtgtgggcacagcttcagccagaattcaaccctcatctctcacaggcggacacacactggggagaagccgtatgtttgtggggtgtgtgggcgaggctttagtctcaagtcacacctcaacagacaccagaacatacactcaggagagaagcccattgtgtgcaaggactgtggccggggcttcagccagcaatccaacctcatcagacaccagaggacgcactcaggcgagaagcccatggtgtgtggggagtgcgggcgaggcttcagccagaagtcaaaccttgttgcacaccagaggacgcactcaggggagaggccgtatgtgtgccgagagtgcgggcgaggctttagccaccaggccggtctcatcaggcacaagcggaagcactcgagggagaagccctacatgtgcaggcagtgtggactgggctttggcaataagtcagctctaattacacacaagcgggctcactcggaagagaagccttgtgtgtgcagagagtgtggccaaggctttctccaaaagtcacacctcaccttacatcaaatgacacatacgggggagaagccatatgtgtgcaagacgtgtgggcggggcttcagcctcaagtctcacctcagcagacacaggaagaccacgtctgtccaccacagactgccagtgcagcccgaccctgagccgtgtgcagggcaaccttcggattccttatactctctctgaaggcaaagatggggacaaggactaagagtcagaatgttgacactttgatgaaatggagtagagaaatgcattctgtaagtggtcaaaggacatttgactgtttactttctccacactaagtcttctccatgttttgtggccttcggttgtaataaacttggcttctttatacatctgtaa

SEQ ID NO: 284811 - DNA, 1420 bp, Homo sapiens
ccacgcgtcgccacgcgtcgccacgcgtcccgctggaggagctccccagctggtggctggagcgaccccttgttctttggtggcgctggtgttacaggcacacatggcattcagggatgtggctgtggatttcacccaggatgagtggaggctgctgagccctgctcaaaggactctgtacagagaggtgatgctggagaactacagcaacctggtctcactgggaatttcattttctaaaccagaactcatcacccagctggagcaagggaaagagacctggagagaggaaaaaaaatgttcaccggcaacctgtccagcagatccagagccagagctctacctcgatcctttctgccctccgggtttctccagtcagaaattccccatgcagcatgtgctgtgtaatcatcccccctggatcttcacatgcttgtgtgcagaaggtaacatccagcctggggatccaggcccaggggaccaggagaagcagcaacaagcctctgaggggagaccctggagtgatcaagcagaaggtcctgagggagaaggtgccatgcctttgtttggaagaaccaagaaaaggactctgggagcgttctccaggccaccccagaggcagccagtcagctctcggaacggcctcagaggggtggagttagaagccagcccagctcagacagggaaccctgaggaaacagacaaattgttgaagaggatagaagtcttaggatttggaacagtcaactgtggagagtgtggactgagcttcagcaagatgacaaacctgctcagtcaccagcggatacactcaggggagaagccctacgtgtgtggggtatgtgagaagggcttcagcctaaagaagagcctcgccagacaccagaaggcacactcgggggagaagccaattgtgtgcagggagtgtggacgaggctttaaccggaagtcaacgctaatcatacacgaacggacacactccggtgagaaaccttacatgtgcagtgagtgtgggcgaggcttcagccagaagtcaaacctcatcatacaccagaggacacactcaggggaaaagccttacgtgtgccgggaatgtggcaaaggcttcagccagaagtcagctgtcgtgagacacctcagcagacacaggaagaccacgtctgtccaccacagactgccagtgcagcccgaccctgagccgtgtgcagggcaaccttcggattccttatactctctctgaaggcaaagatggggacaaggactaagagtcagaatgttgacactttgatgaaatggagtagagaaatgcattctgtaagtggtcaaaggacatttgactgtttactttctccacactaagtcttctccatgttttgtggccttcggttgtaataaacttggcttctttatacatctgtaa

SEQ ID NO: 284812 - DNA, 1126 bp, Homo sapiens
tacagtcatgagcactggtgcccagccttaatttggtttttaatctagagacagagtcactatagtctgtcacccaggctggagtgaagtggttattcacaggcaggatcatagcacactatagcctcaaactcctggactgaagcaatcctcctgcctcagcctcctgagtagctggaactacaggtgtgagcccccatgctcagctttgtttcctactttaaacacttaccttgatgactttctggttcacaatctcagagttttcatcccatctctgatctttcctgttctcaatattctatgactaaaacttttaatggtgttggctttttatttttattttacttttttgagacagggtctcactctgtccctcaggctagagtattgtgatgcaactgtggctcactgtggccccaagctcctgggcttgaacaatcctcctgcctcagcctcccaagtgtagctgggactacaggcacacgccaccatgcccagctaatttttgttttttttaatgtagagataagagtctcactatgttgcccaggttgatctcaaactcctggtctcaagagatcctcccacctcagcctcccagagtcagaacccagatcctggaactcttcttttcttcttctataccactgcttccttgtcctcacgagcctttctctgcgagtccaaaattcagccacatttcctaagaggcacctgtacttgtctatttcaatgcagccagaagctgacaacggcccaggaaccaggactgctttcaggaggcgctcagaagggcagcaaagtaccctctcaacattagtaaaatgaaacaaaagtgtcagccttggcttcgcacacacttacccgttcatgacattgggaacagagaaggctatggcagagtggagcagcagcgtccatgccagacagacactccaaacaagggactcaagatatgtaactccgttatacacaaggaggacgaggaagcgctcgtttcacagggctggacatccttaggtcacagtcatcatacctctgtactgctgctgagctcatagtcaaaggccatccatgcctttagagatggacacatgacccatcctaggccaagcaggacctc

SEQ ID NO: 284813 - DNA, 836 bp, Homo sapiens
tacagtcatgagcactggtgcccagccttaatttggtttttaatctagagacagagtcactatagtctgtcacccaggctggagtgaagtggttattcacaggcaggatcatagcacactatagcctcaaactcctggactgaagcaatcctcctgcctcagcctcctgagtagctggaactacaggtgtgagcccccatgctcagctttgtttcctactttaaacacttaccttgatgactttctggttcacaatctcagagttttcatcccatctctgatctttcctgttctcaatattctatgactaaaacttttaatggtgttggctttttatttttattttacttttttgagacagggtctcactctgtccctcaggctagagtattgtgatgcaactgtggctcactgtggccccaagctcctgggcttgaacaatcctcctgcctcagcctcccaagtgtagctgggactacaggcacacgccaccatgcccagctaatttttgttttttttaatgtagagataagagtctcactatgttgcccaggttgatctcaaactcctggtctcaagagatcctcccacctcagcctcccagagtcagaacccagatcctggaactcttcttttcttcttctataccactgcttccttgataagagatcaagatatatacaaattagtctttgaaagatctttcaccttgttcaaagttaagatcctgtgaacaccagaattgttccatggcctcttcactattgattgcaacagtatcatttacctgaagttacacagtgaccacaaaaaccatgtccaggacaccaaatttc

SEQ ID NO: 284814 - DNA, 390 bp, Homo sapiens
ccaaaatctgaaataaaatttgaaattatatattttttaaaaggcaaatactttaacattccacttatacgaggcacctaaagtagtcaaaatcaaagagacggaaagtggaatggtggttaccagagggaggtggaagggcagaaggagatgaatggggagttactgtttaacaagcagttttacaagataaaaagtattatggagatggacggtggtgatggttgcacaacattattaatgtatccgataccactgaactgtgcatttaaatggttaagatggtaaattttatgttacgtgcatttcaccatgcgaattttatggtatgtaaattatacctcaagctgttaaaaaaaaacctgtgagaaattcaaactgcccatccac

SEQ ID NO: 284815 - DNA, 738 bp, Homo sapiens
cttttttttcatcttatatataaagggttcttcattagctaataaagtcccagaaaggctggctctcctgtaagggcagagccatgttctgcctagtttcaaagcctcttcaagtggagagcttgacaccaggctgggcggggcaggcctggctgaggtgccctggtgtatatgctccccctggcttctggcctctggttcccacagtgctgaggcatggggtggccctgggatgactaggtggtccttctcgaggcacctggctcaccacttcctcttcctaatagtgagatggcctttgtcccaacagaacctgaatggtgtgccctcgatcaccaaccccatcaaaactgcaaaccaacaccagggcaagaagcaacacccatcccaggtaatagaacggccccttctagctctgtttcctacatgaaacgctgtgaactgcttcccaagggcactggtcttgaagtcgtaagggaatcaggctagtgagctgtcaccaggcactcattactctcatacatgtctggcctgtgtgcgccatggaggtgagacatcaagctcacttgactgtagcaagacagtccactgcctgagccccagtgtcttcaacgataaaagctggggtttggtgtagatcagaggtcctcaaactagtcttcaaaggtgcttcagggacactgcaaatattttatttgagtatcctaagattgtaaggcacctgcttttctgaactaa

SEQ ID NO: 284816 - DNA, 2894 bp, Homo sapiens
agttttgtcctttgataaaaaggaatgtcttggggacttttcttttctgctttgcaggcccaggctcaaggcaaattataagtagggaaccaatttgagggaaagacatgtgaacagagttaaggtaccacgtcctgggagcgaccagcagccccacctgaagtccgcatgcaactctgacaagctcaggtgcttgttttaaggaaaggggctactagagtcttaccaacagcgagcccaggtgggagatgaaacaggtactccccaaaataggtcatccgagggaggaaaactgatggagagcacaatgtgctctgagcgtttttaatgtttttaagcttttaaatgatttcttcaaggccgagcagcagcagcaaaggtgtggcttaaaggattaagggggtttctgctgacacctagaatgaagttactctattactaatcaagccgagaggaggcccactatgcccccgtttatcatcctttcccagttcctttttgctggtcacaaaacgatgctcatcaatcccacctaaagcaggaggccaggagcccagcctcttgtagaaacagcgagggtataactgccctcccgttctgcccccaagacgaaggaggactctcggaagccaagaaaggtttaagaagtctttctggatagagagcagtgcccaggcaggaagcctttcgccggcagagcggggtccaaggacgagctggagaggacagaggcgcgatgggcctgctgcagggcctgctccgagtccggaagctgctgctggtcgtctgcgtcccgctcctgctgctgcctctgcccgtcctccaccccagcagcgaggcctcgtgtgcttacgtgctgatcgtgactgctgtgtactgggtgtcggaggcagtgcctctgggagctgcagccctggtgccggccttcctctacccgttcttcggagtcctccggtccaatgaggtggcggcggagtacttcaagaacaccacgctgctgctggtgggggtcatctgcgtggcggctgccgtggagaagtggaacctgcataagcgcattgctctgcgcatggtcttgatggccggggccaagccgggcatgctgctgctctgcttcatgtgctgtaccacgttgctgtccatgtggctgtccaacacctccaccaccgccatggtgatgcccatcgtggaggccgtgctgcaggagctggtcagtgctgaggacgagcagctcgtggcgggcaactccaacaccgaagaggccgaacccatcagtctggatgtaaagaacagccaaccttctctggaactcatctttgtcaatgaagacaggtccaacgcagacctcaccactctgatgcacaacgagaacctgaatggtgtgccctcgatcaccaaccccatcaaaactgcaaaccaacaccagggcaagaagcaacacccatcccaggaaaagccacaagtcctgacccccagccccaggaagcagaagctgaacagaaagtacaggtcccaccatgaccagatgatctgcaagtgcctctccctgagcatatcctactccgctaccattggcggcctgaccaccatcatcggcacctccaccagcctcatcttcctggaacacttcaacaaccagtatccagccgcagaggtggtgaactttggcacctggttcctcttcagcttccccatatccctcatcatgctggtggtcagctggttctggatgcactggctgttcctgggctgcaattttaaagagacctgctctctgagcaagaagaagaagaccaaaagggaacagttgtcagagaagaggatccaagaagaatatgaaaaactgggagacattagctacccagaaatggtgactggatttttcttcatcctgatgaccgtactgtggtttacccgggagcctggctttgtccctggctgggattctttctttgaaaagaaaggctaccgtactgatgccacagtctctgtcttccttggcttcctcctcttcctcattccagcgaagaagccctgctttgggaaaaagaatgatggagagaaccaggagcactcactggggaccgagcccatcatcacgtggaaggacttccagaagaccatgccctgggagattgtcattctggttgggggaggctatgctctggcttctggtagcaagagctctggcctctctacatggattgggaaccagatgttgtccctgagcagcctcccaccgtgggctgtcaccctgctggcatgcatcctcgtgtccattgtcactgagtttgtgagcaacccagcaaccatcaccatcttcctgcccatcctgtgcagcctgtctgaaacgctgcacattaaccccctctacaccctgatcccagtcaccatgtgcatctcctttgcagtgatgctgcctgtgggcaatccccctaatgccatcgtcttcagctatgggcactgccagatcaaagatatggtgaaagctggcctgggagtcaacgttattggactggtgatagtaatggtggccatcaacacctggggagttagcctcttccacctggacacttacccagcatgggcgagggtcagcaacatcactgatcaagcctaacgccaagtgtacaaactggcccaaccacaggagctgccagtatccagcagtatctggaccacaggcaaagaaaaccactaggaccaccaggagcacacaaccccagacccacgccggagggcatccctccaccagaagattccgccacctcaagtgaactgcaggaatcctccaacaaccacaaacacatgcttcgctgttagtgtcttcttcctgccctcagcaccacagctcaagaaaacctaaagtttcaatacaagccataggctcacag

SEQ ID NO: 284817 - DNA, 465 bp, Homo sapiens
ccgggagcccgtaaccctgtggcccgactaccagagctattctttgcttcactaaggacgtttttctggctaaggccgctagtccatgaagtgtgattcattcgttcaagaagtattgctttaataccttacgctggtgccaagcattgggagtacagagctgaatggcaccctgcaggacaaatgcctgccctttccagccacagctgtctagaacagccccagcaggttggtaggaggcccactgtggagccgcagggatgtgtgttccgtggacgctctgccccaaccctccctgccttccaggctgctgctctgcttcatgtgctgtaccacgttgctgtccatgtggctgtccaacacctccaccaccgccatggtgatgcccatcgtggaggccgtgctgcaggagctggtcagtagggttaagaccccacgtaagatcctgctaagtcactttaaact

SEQ ID NO: 284818 - DNA, 430 bp, Homo sapiens
tcccagcactttgggaggccacagcaggaggaccacttgaggccaggagttcaagaccagcctggccaacatggtgaaaccccgcctgtactaaaaatacaaaaattagctgggagtggtgatgggcaccggtaatccccactacttgggaggctgaggctggagaatcacttgaacctgggaggcagaggttgcagtgagcccagatcgtgccactgcacttcagcctgggcaacagagcgagacccccatctcaaaaaataaaaataaataaaaataaaaagaacacatttacaggggaaagcagagtttacctgcacacagttactcgaacttatttcacctcccccaaatctggttatacatcttttcatgagaagtataaaaggccaattaaacattggacttcagctgggtacaatgatgtgca

SEQ ID NO: 284819 - DNA, 2814 bp, Homo sapiens
agttttgtcctttgataaaaaggaatgtcttggggacttttcttttctgctttgcaggcccaggctcaaggcaaattataagtagggaaccaatttgagggaaagacatgtgaacagagttaaggtaccacgtcctgggagcgaccagcagccccacctgaagtccgcatgcaactctgacaagctcaggtgcttgttttaaggaaaggggctactagagtcttaccaacagcgagcccaggtgggagatgaaacaggtactccccaaaataggtcatccgagggaggaaaactgatggagagcacaatgtgctctgagcgtttttaatgtttttaagcttttaaatgatttcttcaaggccgagcagcagcagcaaaggtgtggcttaaaggattaagggggtttctgctgacacctagaatgaagttactctattactaatcaagccgagaggaggcccactatgcccccgtttatcatcctttcccagttcctttttgctggtcacaaaacgatgctcatcaatcccacctaaagcaggaggccaggagcccagcctcttgtagaaacagcgagggtataactgccctcccgttctgcccccaagacgaaggaggactctcggaagccaagaaaggtttaagaagtctttctggatagagagcagtgcccaggcaggaagcctttcgccggcagagcggggtccaaggacgagctggagaggacagaggcgcgatgggcctgctgcagggcctgctccgagtccggaagctgctgctggtcgtctgcgtcccgctcctgctgctgcctctgcccgtcctccaccccagcagcgaggcctcgtgtgcttacgtgctgatcgtgactgctgtgtactgggtgtcggaggcagtgcctctgggagctgcagccctggtgccggccttcctctacccgttcttcggagtcctccggtccaatgaggtggcggcggagtacttcaagaacaccacgctgctgctggtgggggtcatctgcgtggcggctgccgtggagaagtggaacctgcataagcgcattgctctgcgcatggtcttgatggccggggccaagccgggcatgctgctgctctgcttcatgtgctgtaccacgttgctgtccatgtggctgtccaacacctccaccaccgccatggtgatgcccatcgtggaggccgtgctgcaggagctggtcagtgctgaggacgagcagctcgtggcgggcaactccaacaccgaagaggccgaacccatcagtctggatgtaaagaacagccaaccttctctggaactcatctttgtcaatgaagacaggtccaacgcagacctcaccactctgatgcacaacgagaacctgaatggtgtgccctcgatcaccaaccccatcaaaactgcaaaccaacaccagggcaagaagcaacacccatcccaggaaaagccacaagtcctgacccccagccccaggaagcagaagctgaacagaaagtacaggtcccaccatgaccagatgatctgcaagtgcctctccctgagcatatcctactccgctaccattggcggcctgaccaccatcatcggcacctccaccagcctcatcttcctggaacacttcaacaaccagtatccagccgcagaggtggtgaactttggcacctggttcctcttcagcttccccatatccctcatcatgctggtggtcagctggttctggatgcactggctgttcctgggctgcaattttaaagagacctgctctctgagcaagaagaagaagaccaaaagggaacagttgtcagagaagaggatccaagaagaatatgaaaaactgggagacattagctacccagaaatggtgactggatttttcttcatcctgatgaccgtactgtggtttacccgggagcctggctttgtccctggctgggattctttctttgaaaagaaaggctaccgtactgatgccacagtctctgtcttccttggcttcctcctcttcctcattccagcgaagaagccctgctttgggaaaaagaatgatggagagaaccaggagcactcactggggaccgagcccatcatcacgtggaaggacttccagaagaccatgccctgggagattgtcattctggttgggggaggctatgctctggcttctggtagcaagagctctggcctctctacatggattgggaaccagatgttgtccctgagcagcctcccaccgtgggctgtcaccctgctggcatgcatcctcgtgtccattgtcactgagtttgtgagcaacccagcaaccatcaccatcttcctgcccatcctgtgcagcctggtgaaagctggcctgggagtcaacgttattggactggtgatagtaatggtggccatcaacacctggggagttagcctcttccacctggacacttacccagcatgggcgagggtcagcaacatcactgatcaagcctaacgccaagtgtacaaactggcccaaccacaggagctgccagtatccagcagtatctggaccacaggcaaagaaaaccactaggaccaccaggagcacacaaccccagacccacgccggagggcatccctccaccagaagattccgccacctcaagtgaactgcaggaatcctccaacaaccacaaacacatgcttcgctgttagtgtcttcttcctgccctcagcaccacagctcaagaaaacctaaagtttcaatacaagccataggctcacagaaaaagaaaaagaaaataaaaattaaattaaaaaaaaagaagacaaagaaaacctaaa

SEQ ID NO: 284820 - DNA, 2952 bp, Homo sapiens
agttttgtcctttgataaaaaggaatgtcttggggacttttcttttctgctttgcaggcccaggctcaaggcaaattataagtagggaaccaatttgagggaaagacatgtgaacagagttaaggtaccacgtcctgggagcgaccagcagccccacctgaagtccgcatgcaactctgacaagctcaggtgcttgttttaaggaaaggggctactagagtcttaccaacagcgagcccaggtgggagatgaaacaggtactccccaaaataggtcatccgagggaggaaaactgatggagagcacaatgtgctctgagcgtttttaatgtttttaagcttttaaatgatttcttcaaggccgagcagcagcagcaaaggtgtggcttaaaggattaagggggtttctgctgacacctagaatgaagttactctattactaatcaagccgagaggaggcccactatgcccccgtttatcatcctttcccagttcctttttgctggtcacaaaacgatgctcatcaatcccacctaaagcaggaggccaggagcccagcctcttgtagaaacagcgagggtataactgccctcccgttctgcccccaagacgaaggaggactctcggaagccaagaaaggtttaagaagtctttctggatagagagcagtgcccaggcaggaagcctttcgccggcagagcggggtccaaggacgagctggagaggacagaggcgcgatgggcctgctgcagggcctgctccgagtccggaagctgctgctggtcgtctgcgtcccgctcctgctgctgcctctgcccgtcctccaccccagcagcgaggcctcgtgtgcttacgtgctgatcgtgactgctgtgtactgggtgtcggaggcagtgcctctgggagctgcagccctggtgccggccttcctctacccgttcttcggagtcctccggtccaatgaggtggcggcggagtacttcaagaacaccacgctgctgctggtgggggtcatctgcgtggcggctgccgtggagaagtggaacctgcataagcgcattgctctgcgcatggtcttgatggccggggccaagccgggcatgctgctgctctgcttcatgtgctgtaccacgttgctgtccatgtggctgtccaacacctccaccaccgccatggtgatgcccatcgtggaggccgtgctgcaggagctggtcagtgctgaggacgagcagctcgtggcgggcaactccaacaccgaagaggccgaacccatcagtctggatgtaaagaacagccaaccttctctggaactcatctttgtcaatgaagacaggtccaacgcagacctcaccactctgatgcacaacgagaacctgaatggtgtgccctcgatcaccaaccccatcaaaactgcaaaccaacaccagggcaagaagcaacacccatcccaggaaaagccacaagtcctgacccccagccccaggaagcagaagctgaacagaaagtacaggtcccaccatgaccagatgatctgcaagtgcctctccctgagcatatcctactccgctaccattggcggcctgaccaccatcatcggcacctccaccagcctcatcttcctggaacacttcaacaaccagtatccagccgcagaggtggtgaactttggcacctggttcctcttcagcttccccatatccctcatcatgctggtggtcagctggttctggatgcactggctgttcctgggctgcaattttaaagagacctgctctctgagcaagaagaagaagaccaaaagggaacagttgtcagagaagaggatccaagaagaatatgaaaaactgggagacattagctacccagaaatggtgactggatttttcttcatcctgatgaccgtactgtggtttacccgggagcctggctttgtccctggctgggattctttctttgaaaagaaaggctaccgtactgatgccacagtctctgtcttccttggcttcctcctcttcctcattccagcgaagaagccctgctttgggaaaaagaatgatggagagaaccaggagcactcactggggaccgagcccatcatcacgtggaaggacttccagaagaccatgccctgggagattgtcattctggttgggggaggctatgctctggcttctggtagcaagagctctggcctctctacatggattgggaaccagatgttgtccctgagcagcctcccaccgtgggctgtcaccctgctggcatgcatcctcgtgtccattgtcactgagtttgtgagcaacccagcaaccatcaccatcttcctgcccatcctgtgcagcctgtctgaaacgctgcacattaaccccctctacaccctgatcccagtcaccatgtgcatctcctttgcagtgatgctgcctgtgggcaatccccctaatgccatcgtcttcagctatgggcactgccagatcaaagatatggtgaaagctggcctgggagtcaacgttattggactggtgatagtaatggtggccatcaacacctggggagttagcctcttccacctggacacttacccagcatgggcgagggtcagcaacatcactgatcaagcctaacgccaagtgtacaaactggcccaaccacaggagctgccagtatccagcagtatctggaccacaggcaaagaaaaccactaggaccaccaggagcacacaaccccagacccacgccggagggcatccctccaccagaagattccgccacctcaagtgaactgcaggaatcctccaacaaccacaaacacatgcttcgctgttagtgtcttcttcctgccctcagcaccacagctcaagaaaacctaaagtttcaatacaagccataggctcacagaaaaagaaaaagaaaataaaaattaaattaaaaaaaaagaagacaaagaaaacctaaa

SEQ ID NO: 284821 - DNA, 2025 bp, Homo sapiens
agttttgtcctttgataaaaaggaatgtcttggggacttttcttttctgctttgcaggcccaggctcaaggcaaattataagtagggaaccaatttgagggaaagacatgtgaacagagttaaggtaccacgtcctgggagcgaccagcagccccacctgaagtccgcatgcaactctgacaagctcaggtgcttgttttaaggaaaggggctactagagtcttaccaacagcgagcccaggtgggagatgaaacaggtactccccaaaataggtcatccgagggaggaaaactgatggagagcacaatgtgctctgagcgtttttaatgtttttaagcttttaaatgatttcttcaaggccgagcagcagcagcaaaggtgtggcttaaaggattaagggggtttctgctgacacctagaatgaagttactctattactaatcaagccgagaggaggcccactatgcccccgtttatcatcctttcccagttcctttttgctggtcacaaaacgatgctcatcaatcccacctaaagcaggaggccaggagcccagcctcttgtagaaacagcgagggtataactgccctcccgttctgcccccaagacgaaggaggactctcggaagccaagaaaggtttaagaagtctttctggatagagagcagtgcccaggcaggaagcctttcgccggcagagcggggtccaaggacgagctggagaggacagaggcgcgatgggcctgctgcagggcctgctccgagtccggaagctgctgctggtcgtctgcgtcccgctcctgctgctgcctctgcccgtcctccaccccagcagcgaggcctcgtgtgcttacgtgctgatcgtgactgctgtgtactgggtgtcggaggcagtgcctctgggagctgcagccctggtgccggccttcctctacccgttcttcggagtcctccggtccaatgaggtggcggcggagtacttcaagaacaccacgctgctgctggtgggggtcatctgcgtggcggctgccgtggagaagtggaacctgcataagcgcattgctctgcgcatggtcttgatggccggggccaagccgggcatgctgctgctctgcttcatgtgctgtaccacgttgctgtccatgtggctgtccaacacctccaccaccgccatggtgatgcccatcgtggaggccgtgctgcaggagctggtcagtgctgaggacgagcagctcgtggcgggcaactccaacaccgaagaggccgaacccatcagtctggatgtaaagaacagccaaccttctctggaactcatctttgtcaatgaagacaggtccaacgcagacctcaccactctgatgcacaacgagaacctgaatggtgtgccctcgatcaccaaccccatcaaaactgcaaaccaacaccagggcaagaagcaacacccatcccaggaaaagccacaagtcctgacccccagccccaggaagcagaagctgaacagaaagtacaggtcccaccatgaccagatgatctgcaagtgcctctccctgagcatatcctactccgctaccattggcggcctgaccaccatcatcggcacctccaccagcctcatcttcctggaacacttcaacaaccagtatccagccgcagaggtggtgaactttggcacctggttcctcttcagcttccccatatccctcatcatgctggtggtcagctggttctggatgcactggctgttcctgggctgcaattttaaagagacctgctctctgagcaagaagaagaagaccaaaagggaacagttgtcagagaagaggatccaagaagaatatgaaaaactgggagacattaggtaaaaatcagccattcctcttccctccttctccagcagaaacacagcaggtaaagtgagcacaggagcagccctgttcctgacaatccctgacactgggagaattttccacaactctgaatcaggcctttagaagatgctatttagtgccaaagccaagctggccca

SEQ ID NO: 284822 - DNA, 1630 bp, Homo sapiens
agttttgtcctttgataaaaaggaatgtcttggggacttttcttttctgctttgcaggcccaggctcaaggcaaattataagtagggaaccaatttgagggaaagacatgtgaacagagttaaggtaccacgtcctgggagcgaccagcagccccacctgaagtccgcatgcaactctgacaagctcaggtgcttgttttaaggaaaggggctactagagtcttaccaacagcgagcccaggtgggagatgaaacaggtactccccaaaataggtcatccgagggaggaaaactgatggagagcacaatgtgctctgagcgtttttaatgtttttaagcttttaaatgatttcttcaaggccgagcagcagcagcaaaggtgtggcttaaaggattaagggggtttctgctgacacctagaatgaagttactctattactaatcaagccgagaggaggcccactatgcccccgtttatcatcctttcccagttcctttttgctggtcacaaaacgatgctcatcaatcccacctaaagcaggaggccaggagcccagcctcttgtagaaacagcgagggtataactgccctcccgttctgcccccaagacgaaggaggactctcggaagccaagaaaggtttaagaagtctttctggatagagagcagtgcccaggcaggaagcctttcgccggcagagcggggtccaaggacgagctggagaggacagaggcgcgatgggcctgctgcagggcctgctccgagtccggaagctgctgctggtcgtctgcgtcccgctcctgctgctgcctctgcccgtcctccaccccagcagcgaggcctcgtgtgcttacgtgctgatcgtgactgctgtgtactgggtgtcggaggcagtgcctctgggagctgcagccctggtgccggccttcctctacccgttcttcggagtcctccggtccaatgaggtggcggcggagtacttcaagaacaccacgctgctgctggtgggggtcatctgcgtggcggctgccgtggagaagtggaacctgcataagcgcattgctctgcgcatggtcttgatggccggggccaagccgggcatgctgctgctctgcttcatgtgctgtaccacgttgctgtccatgtggctgtccaacacctccaccaccgccatggtgatgcccatcgtggaggccgtgctgcaggagctggtcagtgctgaggacgagcagctcgtggcgggcaactccaacaccgaagaggccgaacccatcagtctggatgtaaagaacagccaaccttctctggaactcatctttgtcaatgaagacaggtccaacgcagacctcaccactctgatgcacaacgagaacctgaatggtgtgccctcgatcaccaaccccagacccacgccggagggcatccctccaccagaagattccgccacctcaagtgaactgcaggaatcctccaacaaccacaaacacatgcttcgctgttagtgtcttcttcctgccctcagcaccacagctcaagaaaacctaaagtttcaatacaagccataggctcacagaaaaagaaaaagaaaataaaaattaaattaaaaaaaaagaagacaaagaaaacctaaa

SEQ ID NO: 284823 - DNA, 2342 bp, Homo sapiens
tcagacgcgccaccacagtggtgcggttatcactcccagggagatgggagactctgtgctatatttagggtataaggcagtatcaaagacagacttggagagagagcgtccaagaaatcactaaccaaccctcagccacttccatcagcttttccacagggacccagcttcctatttagtgctatttctccttttatggcaattggcacatacaactttgcataaaacaatccaggtagacactgtcttatttaaagctttaagttataaaaggaatacatgttcattgtagaacatttcaaaaatacaagacagtataagaaaaaaatcaaaattgactggattcttagcaccccatgttaacaaatgttaacacttctttccatgcttttttgtgcaaaactcttatgtatttttggtaaaattcagtccacactgaaactgttgtataccttgcctttctcaactcaactttgtactctcagtacagtatgttccacatccttaactctgctgtggaaatgggattatcaatggatgcatctcattttaacacagagttgtatcaaaatgtattcagtgtcatgaaataccattggatatagaggatgcttccattttttaataggtaattaatgtctcagtatgcatttctggttagatgatgggaatgaccaactattttttttttttttttttttttttttttgggatggagtctcacccttttgcccagtctggagtgcagtggcacaatcttggctcgctgaaacctccacctcctgggttcaagcgattctcctgcctcagcctcccgagtaactgggactacaggcacgtgacaccacgcccagctaattttttgcatttttagtagagatggggtttcactgtgttagccaggatggtctccatctcctgacctcatgatccgcccacctcggcctcccaaagtgctgggattacgggcgtgggccaccacacccagccagggaatgaccaactttaaggcttctaatgtgtatcatcaaatggcctcaaaaaggttgtagcaattcctcctcccaccagcacagtgtttggggctgcctatttcactgcactctccttgtaggctgtatttgaaattattttacaaatgtacagtgctgtgttctcttgccctttctactgaagtttctccaggaacatggttaatgtcatgttttctggggccactcagtcttctcctcatctcactgtcagccattcatagtggttaggcagtgagtgtgttttatgtctagggtattgaaactctaaatacagaagcttccagaagcaaagtgaaaaagctaggagaaatttctcagttcctgagtgggtctttctgttttattttatagctacccagaaatggtgactggatttttcttcatcctgatgaccgtactgtggtttacccgggagcctggctttgtccctggctgggattctttctttgaaaagaaaggctaccgtactgatgccacagtctctgtcttccttggcttcctcctcttcctcattccagcgaagaagccctgctttgggaaaaagaatgatggagagaaccaggagcactcactggggaccgagcccatcatcacgtggaaggacttccagaagaccatgccctgggagattgtcattctggttgggggaggctatgctctggcttctggtagcaagagctctggcctctctacatggattgggaaccagatgttgtccctgagcagcctcccaccgtgggctgtcaccctgctggcatgcatcctcgtgtccattgtcactgagtttgtgagcaacccagcaaccatcaccatcttcctgcccatcctgtgcagcctggtgaaagctggcctgggagtcaacgttattggactggtgatagtaatggtggccatcaacacctggggagttagcctcttccacctggacacttacccagcatgggcgagggtcagcaacatcactgatcaagcctaacgccaagtgtacaaactggcccaaccacaggagctgccagtatccagcagtatctggaccacaggcaaagaaaaccactaggaccaccaggagcacacaaccccagacccacgccggagggcatccctccaccagaagattccgccacctcaagtgaactgcaggaatcctccaacaaccacaaacacatgcttcgctgttagtgtcttcttcctgccctcagcaccacagctcaagaaaacctaaagtttcaatacaagccataggctcacagaaaaagaaaaagaaaataaaaattaaattaaaaaaaaagaagacaaagaaaacctaaa

SEQ ID NO: 284824 - DNA, 2022 bp, Homo sapiens
gacattctaaacatttgtgaactctgcacttcactctcagctctacaacgaaatgttcttaattccaactaaatggttagagagcctgtccagtttatacaaagtctgaggtgaagagtatttaatgtcgttttattgctctcaaagcatacagagcacttccaattactccaagaaataggaaataaaaaatatgactctaagtagaatttgcattaggtttaactttataggcatgggtgatttatacttagtagcctgaataaaatatgctcatatgcctcaaaataacaagtcagtctactccaaatttgatcagtttcaaacacataagggaagataatataatgttttgctattagtccatgtaacccaatgctcccattggtcaagaaatgttctctgacttttctttttactcagactgttgtcaaaccaatgataactatatacttcttaactccagtattgctaacataaaactaacactgtgtgttccatatacgcagatgtttgtgtgtttgtttggctagagacaaagcttctctggagtaaaaatgttagttatacatctagacacatagtggaataaaagttttagtttatacatctagacacatataccacattacactgattattttacttacgtaaaagacaagtaggtagaaatgaccccacacgaatacacttgcacaagtccctgagacatcacttcacaccaatacaccagagacagacccagatggatatccccagtaggggctgcctatttcactgcactctccttgtaggctgtatttgaaattattttacaaatgtacagtgctgtgttctcttgccctttctactgaagtttctccaggaacatggttaatgtcatgttttctggggccactcagtcttctcctcatctcactgtcagccattcatagtggttaggcagtgagtgtgttttatgtctagggtattgaaactctaaatacagaagcttccagaagcaaagtgaaaaagctaggagaaatttctcagttcctgagtgggtctttctgttttattttatagctacccagaaatggtgactggatttttcttcatcctgatgaccgtactgtggtttacccgggagcctggctttgtccctggctgggattctttctttgaaaagaaaggctaccgtactgatgccacagtctctgtcttccttggcttcctcctcttcctcattccagcgaagaagccctgctttgggaaaaagaatgatggagagaaccaggagcactcactggggaccgagcccatcatcacgtggaaggacttccagaagaccatgccctgggagattgtcattctggttgggggaggctatgctctggcttctggtagcaagagctctggcctctctacatggattgggaaccagatgttgtccctgagcagcctcccaccgtgggctgtcaccctgctggcatgcatcctcgtgtccattgtcactgagtttgtgagcaacccagcaaccatcaccatcttcctgcccatcctgtgcagcctggtgaaagctggcctgggagtcaacgttattggactggtgatagtaatggtggccatcaacacctggggagttagcctcttccacctggacacttacccagcatgggcgagggtcagcaacatcactgatcaagcctaacgccaagtgtacaaactggcccaaccacaggagctgccagtatccagcagtatctggaccacaggcaaagaaaaccactaggaccaccaggagcacacaaccccagacccacgccggagggcatccctccaccagaagattccgccacctcaagtgaactgcaggaatcctccaacaaccacaaacacatgcttcgctgttagtgtcttcttcctgccctcagcaccacagctcaagaaaacctaaagtttcaatacaagccataggctcacagaaaaagaaaaagaaaataaaaattaaattaaaaaaaaagaagacaaagaaaacctaaa

SEQ ID NO: 284825 - DNA, 2021 bp, Homo sapiens
gacattctaaacatttgtgaactctgcacttcactctcagctctacaacgaaatgttcttaattccaactaaatggttagagagcctgtccagtttatacaaagtctgaggtgaagagtatttaatgtcgttttattgctctcaaagcatacagagcacttccaattactccaagaaataggaaataaaaaatatgactctaagtagaatttgcattaggtttaactttataggcatgggtgatttatacttagtagcctgaataaaatatgctcatatgcctcaaaataacaagtcagtctactccaaatttgatcagtttcaaacacataagggaagataatataatgttttgctattagtccatgtaacccaatgctcccattggtcaagaaatgttctctgacttttctttttactcagactgttgtcaaaccaatgataactatatacttcttaactccagtattgctaacataaaactaacactgtgtgttccatatacgcagatgtttgtgtgtttgtttggctagagacaaagcttctctggagtaaaaatgttagttatacatctagacacatagtggaataaaagttttagtttatacatctagacacatataccacattacactgattattttacttacgtaaaagacaagtaggtagaaatgaccccacacgaatacacttgcacaagtccctgagacatcacttcacaccaatacaccagagacagacccagatggatatccccagtaggctaggggagaaggttgatgagaggccggataacttggcagataaaagccatatgaataggtgggggatagagggatagagcatgtgaaagaggagaaaagtgaccacagcaggcaagcggtttagtatttacctaatatttgatctctgggcctcagaagtgtgttttctttaatcatttgctcattctcccttctcagttttaaagagacctgctctctgagcaagaagaagaagaccaaaagggaacagttgtcagagaagaggatccaagaagaatatgaaaaactgggagacattagctacccagaaatggtgactggatttttcttcatcctgatgaccgtactgtggtttacccgggagcctggctttgtccctggctgggattctttctttgaaaagaaaggctaccgtactgatgccacagtctctgtcttccttggcttcctcctcttcctcattccagcgaagaagccctgctttgggaaaaagaatgatggagagaaccaggagcactcactggggaccgagcccatcatcacgtggaaggacttccagaagaccatgccctgggagattgtcattctggttgggggaggctatgctctggcttctggtagcaagagctctggcctctctacatggattgggaaccagatgttgtccctgagcagcctcccaccgtgggctgtcaccctgctggcatgcatcctcgtgtccattgtcactgagtttgtgagcaacccagcaaccatcaccatcttcctgcccatcctgtgcagcctggtgaaagctggcctgggagtcaacgttattggactggtgatagtaatggtggccatcaacacctggggagttagcctcttccacctggacacttacccagcatgggcgagggtcagcaacatcactgatcaagcctaacgccaagtgtacaaactggcccaaccacaggagctgccagtatccagcagtatctggaccacaggcaaagaaaaccactaggaccaccaggagcacacaaccccagacccacgccggagggcatccctccaccagaagattccgccacctcaagtgaactgcaggaatcctccaacaaccacaaacacatgcttcgctgttagtgtcttcttcctgccctcagcaccacagctcaagaaaacctaaagtttcaatacaagccataggctcacagaaaaagaaaaagaaaataaaaattaaattaaaaaaaaagaagacaaagaaaacctaaa

SEQ ID NO: 284826 - DNA, 2979 bp, Homo sapiens
  misc_feature (502)..(502): n is a, c, g, or t
  misc_feature (504)..(504): n is a, c, g, or t
  misc_feature (514)..(514): n is a, c, g, or t
  misc_feature (532)..(532): n is a, c, g, or t
agttttgtcctttgataaaaaggaatgtcttggggacttttcttttctgctttgcaggcccaggctcaaggcaaattataagtagggaaccaatttgagggaaagacatgtgaacagagttaaggtaccacgtcctgggagcgaccagcagccccacctgaagtccgcatgcaactctgacaagctcaggtgcttgttttaaggaaaggggctactagagtcttaccaacagcgagcccaggtgggagatgaaacaggtactccccaaaataggtcatccgagggaggaaaactgatggagagcacaatgtgctctgagcgtttttaatgtttttaagcttttaaatgatttcttcaaggccgagcagcagcagcaaaggtgtggcttaaaggattaagggggtttcgtggcgatgatcgacgccgtaaggacagtgcacaggcatgtacctggtcgtaagtgtaactgtgaagtccgaacgcgctgcacgcacgggcaggngncgctccgacntaatgtggcctccctcgngttgtgtaagtcgagttcgcgtgtgtacgccgagagtatgccgttttcttgacgtgggatctacgaagagagcgaaagtggctttccagtgcgagaatgccgccagcacctgatagaggccagggaaggggccgatggggagagctccgcaggacactttcgtatggtaggagatacgacgcgagggagtaatacacgtggtctcgctaccccggtttcttgtccgcccccaataggaacgaaagggaaggactctcggaagccaagaaaggtttaagaagtctttctggatagagagcagtgcccaggcaggaagcctttcgccggcagagcggggtccaaggacgagctggagaggacagaggcgcgatgggcctgctgcagggcctgctccgagtccggaagctgctgctggtcgtctgcgtcccgctcctgctgctgcctctgcccgtcctccaccccagcagcgaggcctcgtgtgcttacgtgctgatcgtgactgctgtgtactgggtgtcggaggcagtgcctctgggagctgcagccctggtgccggccttcctctacccgttcttcggagtcctccggtccaatgaggtggcggcggagtacttcaagaacaccacgctgctgctggtgggggtcatctgcgtggcggctgccgtggagaagtggaacctgcataagcgcattgctctgcgcatggtcttgatggccggggccaagccgggcatgctgctgctctgcttcatgtgctgtaccacgttgctgtccatgtggctgtccaacacctccaccaccgccatggtgatgcccatcgtggaggccgtgctgcaggagctggtcagtgctgaggacgagcagctcgtggcgggcaactccaacaccgaagaggccgaacccatcagtctggatgtaaagaacagccaaccttctctggaactcatctttgtcaatgaagacaggtccaacgcagacctcaccactctgatgcacaacgagaacctgaatggtgtgccctcgatcaccaaccccatcaaaactgcaaaccaacaccagggcaagaagcaacacccatcccaggaaaagccacaagtcctgacccccagccccaggaagcagaagctgaacagaaagtacaggtcccaccatgaccagatgatctgcaagtgcctctccctgagcatatcctactccgctaccattggcggcctgaccaccatcatcggcacctccaccagcctcatcttcctggaacacttcaacaaccagtatccagccgcagaggtggtgaactttggcacctggttcctcttcagcttccccatatccctcatcatgctggtggtcagctggttctggatgcactggctgttcctgggctgcaattttaaagagacctgctctctgagcaagaagaagaagaccaaaagggaacagttgtcagagaagaggatccaagaagaatatgaaaaactgggagacattagctacccagaaatggtgactggatttttcttcatcctgatgaccgtactgtggtttacccgggagcctggctttgtccctggctgggattctttctttgaaaagaaaggctaccgtactgatgccacagtctctgtcttccttggcttcctcctcttcctcattccagcgaagaagccctgctttgggaaaaagaatgatggagagaaccaggagcactcactggggaccgagcccatcatcacgtggaaggacttccagaagaccatgccctgggagattgtcattctggttgggggaggctatgctctggcttctggtagcaagagctctggcctctctacatggattgggaaccagatgttgtccctgagcagcctcccaccgtgggctgtcaccctgctggcatgcatcctcgtgtccattgtcactgagtttgtgagcaacccagcaaccatcaccatcttcctgcccatcctgtgcagcctggtgaaagctggcctgggagtcaacgttattggactggtgatagtaatggtggccatcaacacctggggagttagcctcttccacctggacacttacccagcatgggcgagggtcagcaacatcactgatcaagcctaacgccaagtgtacaaactggcccaaccacaggagctgccagtatccagcagtatctggaccacaggcaaagaaaaccactaggaccaccaggagcacacaaccccagacccacgccggagggcatccctccaccagaagattccgccacctcaagtgaactgcaggaatcctccaacaaccacaaacacatgcttcgctgttagtgtcttcttcctgccctcagcaccacagctcaagaaaacctaaagtttcaatacaagccataggctcacagaaaaagaaaaagaaaataaaaattaaattaaaaaaaaagaagacaaagaaaacctaaa

SEQ ID NO: 284827 - DNA, 1755 bp, Homo sapiens
cttttttttcatcttatatataaagggttcttcattagctaataaagtcccagaaaggctggctctcctgtaagggcagagccatgttctgcctagtttcaaagcctcttcaagtggagagcttgacaccaggctgggcggggcaggcctggctgaggtgccctggtgtatatgctccccctggcttctggcctctggttcccacagtgctgaggcatggggtggccctgggatgactaggtggtccttctcgaggcacctggctcaccacttcctcttcctaatagtgagatggcctttgtcccaacagaacctgaatggtgtgccctcgatcaccaaccccatcaaaactgcaaaccaacaccagggcaagaagcaacacccatcccaggaaaagccacaagtcctgacccccagccccaggaagcagaagctgaacagaaagtacaggtcccaccatgaccagatgatctgcaagtgcctctccctgagcatatcctactccgctaccattggcggcctgaccaccatcatcggcacctccaccagcctcatcttcctggaacacttcaacaaccagtatccagccgcagaggtggtgaactttggcacctggttcctcttcagcttccccatatccctcatcatgctggtggtcagctggttctggatgcactggctgttcctgggctgcaattttaaagagacctgctctctgagcaagaagaagaagaccaaaagggaacagttgtcagagaagaggatccaagaagaatatgaaaaactgggagacattagctacccagaaatggtgactggatttttcttcatcctgatgaccgtactgtggtttacccgggagcctggctttgtccctggctgggattctttctttgaaaagaaaggctaccgtactgatgccacagtctctgtcttccttggcttcctcctcttcctcattccagcgaagaagccctgctttgggaaaaagaatgatggagagaaccaggagcactcactggggaccgagcccatcatcacgtggaaggacttccagaagaccatgccctgggagattgtcattctggttgggggaggctatgctctggcttctggtagcaagagctctggcctctctacatggattgggaaccagatgttgtccctgagcagcctcccaccgtgggctgtcaccctgctggcatgcatcctcgtgtccattgtcactgagtttgtgagcaacccagcaaccatcaccatcttcctgcccatcctgtgcagcctggtgaaagctggcctgggagtcaacgttattggactggtgatagtaatggtggccatcaacacctggggagttagcctcttccacctggacacttacccagcatgggcgagggtcagcaacatcactgatcaagcctaacgccaagtgtacaaactggcccaaccacaggagctgccagtatccagcagtatctggaccacaggcaaagaaaaccactaggaccaccaggagcacacaaccccagacccacgccggagggcatccctccaccagaagattccgccacctcaagtgaactgcaggaatcctccaacaaccacaaacacatgcttcgctgttagtgtcttcttcctgccctcagcaccacagctcaagaaaacctaaagtttcaatacaagccataggctcacagaaaaagaaaaagaaaataaaaattaaattaaaaaaaaagaagacaaagaaaacctaaa

SEQ ID NO: 284828 - DNA, 1585 bp, Homo sapiens
tgtgtcccccaatcaaaacttacattcctttggtgattttagaaacaaagtataccaagctgttccattttctgttgccttgaaaaccagatgaataaacttagcagaatctttaagggcaaacacgtcctgagtcattctcttgagtgcaaagtatatacactttaatgatattaattttagttgttttgattcctttttttagctagtttcatgattcttgtctgggctctgtacaattgcaactgtcaactaaatgagtcctaggcaacgttttaccatatcgttatcattatctccccacttagcccagctgtatgttttagggagcatttggcatactaccccaaaataccatatggaaaccctccctttctaattgctgacctggttctttaccctccagccagtatccagccgcagaggtggtgaactttggcacctggttcctcttcagcttccccatatccctcatcatgctggtggtcagctggttctggatgcactggctgttcctgggctgcaattttaaagagacctgctctctgagcaagaagaagaagaccaaaagggaacagttgtcagagaagaggatccaagaagaatatgaaaaactgggagacattagctacccagaaatggtgactggatttttcttcatcctgatgaccgtactgtggtttacccgggagcctggctttgtccctggctgggattctttctttgaaaagaaaggctaccgtactgatgccacagtctctgtcttccttggcttcctcctcttcctcattccagcgaagaagccctgctttgggaaaaagaatgatggagagaaccaggagcactcactggggaccgagcccatcatcacgtggaaggacttccagaagaccatgccctgggagattgtcattctggttgggggaggctatgctctggcttctggtagcaagagctctggcctctctacatggattgggaaccagatgttgtccctgagcagcctcccaccgtgggctgtcaccctgctggcatgcatcctcgtgtccattgtcactgagtttgtgagcaacccagcaaccatcaccatcttcctgcccatcctgtgcagcctggtgaaagctggcctgggagtcaacgttattggactggtgatagtaatggtggccatcaacacctggggagttagcctcttccacctggacacttacccagcatgggcgagggtcagcaacatcactgatcaagcctaacgccaagtgtacaaactggcccaaccacaggagctgccagtatccagcagtatctggaccacaggcaaagaaaaccactaggaccaccaggagcacacaaccccagacccacgccggagggcatccctccaccagaagattccgccacctcaagtgaactgcaggaatcctccaacaaccacaaacacatgcttcgctgttagtgtcttcttcctgccctcagcaccacagctcaagaaaacctaaagtttcaatacaagccataggctcacagaaaaagaaaaagaaaataaaaattaaattaaaaaaaaagaagacaaagaaaacctaaa

SEQ ID NO: 284829 - DNA, 1232 bp, Homo sapiens
gacattctaaacatttgtgaactctgcacttcactctcagctctacaacgaaatgttcttaattccaactaaatggttagagagcctgtccagtttatacaaagtctgaggtgaagagtatttaatgtcgttttattgctctcaaagcatacagagcacttccaattactccaagaaataggaaataaaaaatatgactctaagtagaatttgcattaggtttaactttataggcatgggtgatttatacttagtagcctgaataaaatatgctcatatgcctcaaaataacaagtcagtctactccaaatttgatcagtttcaaacacataagggaagataatataatgttttgctattagtccatgtaacccaatgctcccattggtcaagaaatgttctctgacttttctttttactcagactgttgtcaaaccaatgataactatatacttcttaactccagtattgctaacataaaactaacactgtgtgttccatatacgcagatgtttgtgtgtttgtttggctagagacaaagcttctctggagtaaaaatgttagttatacatctagacacatagtggaataaaagttttagtttatacatctagacacatataccacattacactgattattttacttacgtaaaagacaagtaggtagaaatgaccccacacgaatacacttgcacaagtccctgagacatcacttcacaccaatacaccagagacagacccagatggatatccccagtaggctaggggagaaggttgatgagaggccggataacttggcagataaaagccatatgaataggtgggggatagagggatagagcatgtgaaagaggagaaaagtgaccacagcaggcaagcggtttagtatttacctaatatttgatctctgggcctcagaagtgtgttttctttaatcatttgctcattctcccttctcagttttaaagagacctgctctctgagcaagaagaagaagaccaaaagggaacagttgtcagagaagaggatccaagaagaatatgaaaaactgggagacattaggtaaaaatcagccattcctcttccctccttctccagcagaaacacagcaggtaaagtgagcacaggagcagccctgttcctgacaatccctgacactgggagaattttccacaactctgaatcaggcctttagaagatgctatttagtgccaaagccaagctggccca

SEQ ID NO: 284830 - DNA, 482 bp, Homo sapiens
ctcccctcccaagagtcggcctcactgacgtggctcctgtgtcctctgcttggttccagcaggtccaacgcagacctcaccactctgatgcacaacgaggtatggccttggggtttttctgtgctttggaatcacttgaaaatccctcagcacttcttcatggaaacccaagattcagaaccagattttcaacagctacagatccaccttagagttcctttcagtgaggattccattgacaaaatgttattattaaaaaggacacattggctgggcgtggtggctcatgcctgtactcccagcactttgggaggccacagcaggaggaccacttgaggccaggagttcaagaccagcctggccaacatggtgaaaccccgcctgtactaaaaatacaaaaattagctgggagtggtgatgggcaccggtaatccccactacttgggaggctgaggctggagaatcacttgaacctgggaggc

SEQ ID NO: 284831 - DNA, 681 bp, Homo sapiens
gatggtagctaagcatgtcatttactgttcttgttgcttgggtaataggccacaatgaggaagctagcacggtagtgggcaatgccaggtgggaaggtttgagttgtgaaagaagagccagggagcagagatggggaggaggcactgatggggtgggatgtgctttggtcacacatagcacagtcgggtgtgtcctcccttttgtccacagtggttcctgggctttgctgtcttcctcctgccctgggcgtccatgtggctgcgcagcctcctaaaacctatccacgtcttttttggagccgccatcctctctctgtccatcgcatccgtcatttcgggcattaatgagaagcttttcttcagtttgtgagtgcagtggggtccccaactctaaggtgaagaggagggaatagggtcttcaaaagatacaccctgtgatcacaggactcacccaagggaggagagattttggggttgggtccactcctgatctggaaggtaacagaattgatctttctttaggttgaaattggtaagtcagcagatatttattgagcatcagtttgatttagcacctgctgtgtgtcagaaacagtactaagcaccttacatttaatcctgtcaaccaccctacatcattggtattgattggtattgttgtcattgccattttcttttttc

SEQ ID NO: 284832 - DNA, 334 bp, Homo sapiens
ttgtgtaaattaaagtaaaaagcagtccccaataatgttttgttatactgcactccagttctaccagattttgtaactatcagatttcaatgattatagagaaggtagaggctgattgctgggattacaggcgtgagctaccgcgcccagcctgcgtagagcctttttctaagactaagggctggatgggaactagcatttcttacccctggatgtgacctgttttagctcagccgggagaatcctttttcgcaagaagttaataatatcttgtgacgtgaaaattatgtgaaactcagacttcagtgtccataaataaatattactggaacac

SEQ ID NO: 284833 - DNA, 3003 bp, Homo sapiens
tagcaggctggtcggccggagtgtagggatctggccgccatgttggagctttcgctgttcggggcccggcctgctccgggccctcccagcgtcgccgctagctgacttagggctcccgcccacactgcgcacggccttgctgagggccggctcgtagtgggaggcttcgcgttcacctgaacatttccgcctcctctggatgggggatgagaggcggggctgatgcatcgcagcagtcctggaccctgacttcggacttggagaagaaacgccgaggaggaacgggagttagggggttagcagcttggcgcgctgggagccggccacccctggtctccggacttcacttcccaggaggcctcgcgcgcgactggaagtgctgcgagcctataagaaggcgaggcggcacccgccgctctgctctggggcggcattgccagccggctgtaggcattcagggcagtgtcttctgcatctcctaggaacctcgggagcggcagctccggcgcctggtagcgagaggcgggttccggagatcccggcctcacttcgtcccactgtggttaggggtgagtcctgcaaatgttaagtgatttgctcaaggtgcccatttcgcaggaattggagcccaggccagttctctgagcctatcattagggctaaaggagtgcgtgatcagaatggtgtctggacggttctacttgtcctgcctgctgctggggtccctgggctctatgtgcatcctcttcactatctactggatgcagtactggcgtggtggctttgcctggaatggcagcatctacatgttcaactggcacccagtgcttatggttgctggcatggtggtattctatggaggtgcgtcactggtgtaccgcctgccccagtcgtgggtggggcccaaactgccctggaaactcctccatgcagcgctgcacctgatggccttcgtcctcactgttgtggggctggttgctgtctttacgtttcacaaccatggaaggactgccaacctctactcccttcacagctggctgggcatcaccactgtcttcctcttcgcctgccagtggttcctgggctttgctgtcttcctcctgccctgggcgtccatgtggctgcgcagcctcctaaaacctatccacgtcttttttggagccgccatcctctctctgtccatcgcatccgtcatttcgggcattaatgagaagcttttcttcagtttgaaaaacaccaccaggccataccacagcctgcccagtgaggcggtctttgccaacagcaccgggatgctggtggtggcctttgggctgctggtgctctacatccttctggcttcatcttggaagcgcccagagccggggatcctgaccgacagacagcccctgctgcatgatggggagtgaagcagcaggaaggggctcccaagagctcctggtggtgcagcctgtgctcccctcagaagctctgctcttcccagggctcccggctggtttcagcaggcgactttcttccaatgctgggcccagacttcttgcctgggtgctggcctgccctctccggccgcttgctgcctgtctgctttccttggtggctttgcctgggtgctgggcctgccctctccggccgcttgctgcctgtctgctttccttggtggctttgcctgggtgctgggcctgccttctctggctgcttgctgcctgtctgctttccttggtggctttggcttctgcactccttggcgtcagcctctcaggtcctccattcacacgaggtcctcctcgctctggccgctcttgctgctcctgtctgaagaaatcagactgatttcctcttaagactcctagggatgtggtgaagagctgggactcaagtgcagtccacggtgtgaaacatgagggaggtgaggtgtccgtccacttcccccataaaggtgtgcatttcagttaggctgccccgccacagagcaggcttcatctgctctgccatccagccccatctggatgtgaggtggggtggagacatcatggggtgattgcagaaagggggagtggcggcccacgcagcttctgctgaggagctgaccgctctgagctgttctgtttcgtattgctgctctgtgtctgcatgtattgtgaccgtgcggctccacctcttccagctgctgctacagctgaggcctggatcccggcctttccctgtgacttacgtgtctgtcaccggcaggcagccctacaaatcctggtgacctgctctcccaagaacagagcctgtccccagatgtcccagtagcgatgagtaacagaggtggctgtggacttcctctacttctccttgctggatcagggccttcctgcctcccgctgggcaggtctggccttgctctcttggcagggccccagcccctctgaccactctgcagctcaccatgcagctgatgccaaagttgtggtgtccagtgtgcagcagccctgggagccactgccaccttcagaggggttccttgctgagacccacattgcttcacctggccccaccatggctgcttgcctggcccaacctagcgttctgtgccatgctagagcttgagctgttgctcttcttcaggggaggaaatagggtggagagcgggaagggtcttgctcctaagtgttgctgctgtggcttttttgccttctccaaagacgcactgccaggtcccaagcttcagactgctgtgcttagtaagcaagtgagaagcctggggtttggagcccacctactctctggcagcatcagcatcctactcctggcaacatcaggccaacgtccaccccagcctcacattgccagatgttggcagaagggctaatattgaccgtcttgactggctggagccttcaaagccactgggatgtcctccaggcacctgggtcccatgaccagctccccgtctccataggggtaggcatttcactggtttatgaagctcgagtttcattaaatatgttaagaatcaaa

SEQ ID NO: 284834 - DNA, 3402 bp, Homo sapiens
tagcaggctggtcggccggagtgtagggatctggccgccatgttggagctttcgctgttcggggcccggcctgctccgggccctcccagcgtcgccgctagctgacttagggctcccgcccacactgcgcacggccttgctgagggccggctcgtagtgggaggcttcgcgttcacctgaacatttccgcctcctctggatgggggatgagaggcggggctgatgcatcgcagcagtcctggaccctgacttcggacttggagaagaaacgccgaggaggaacgggagttagggggttagcagcttggcgcgctgggagccggccacccctggtctccggacttcacttcccaggaggcctcgcgcgcgactggaagtgctgcgagcctataagaaggcgaggcggcacccgccgctctgctctggggcggcattgccagccggctgtaggcattcagggcagtgtcttctgcatctcctaggaacctcgggagcggcagctccggcgcctggtagcgagaggcgggttccggagatcccggcctcacttcgtcccactgtggttaggggtgagtcctgcaaatgttaagtgatttgctcaaggtgcccatttcgcaggaattggagcccaggccagttctctgagcctatcattagggctaaaggagtgcgtgatcagaatggtgtctggacggttctacttgtcctgcctgctgctggggtccctgggctctatgtgcatcctcttcactatctactggatgcagtactggcgtggtggctttgcctggaatggcagcatctacatgttcaactggcacccagtgcttatggttgctggcatggtggtattctatggaggtgcgtcactggtgtaccgcctgccccagtcgtgggtggggcccaaactgccctggaaactcctccatgcagcgctgcacctgatggccttcgtcctcactgttgtggggctggttgctgtctttacgtttcacaaccatggaaggactgccaacctctactcccttcacagctggctgggcatcaccactgtcttcctcttcgcctgccagtggttcctgggctttgctgtcttcctcctgccctgggcgtccatgtggctgcgcagcctcctaaaacctatccacgtcttttttggagccgccatcctctctctgtccatcgcatccgtcatttcgggcattaatgagaagcttttcttcagtttgaaaaacaccaccaggccataccacagcctgcccagtgaggcggtctttgccaacagcaccgggatgctggtggtggcctttgggctgctggtgctctacatccttctggcttcatcttggaagcgcccagagccggggatcctgaccgacagacagcccctgctgcatgatggggagtgaagcagcaggaaggggctcccaagagctcctggtggtgcagcctgtgctcccctcagaagctctgctcttcccagggctcccggctggtttcagcaggcgactttcttccaatgctgggcccagacttcttgcctgggtgctggcctgccctctccggccgcttgctgcctgtctgctttccttggtggctttgcctgggtgctgggcctgccctctccggccgcttgctgcctgtctgctttccttggtggctttgcctgggtgctgggcctgccttctctggctgcttgctgcctgtctgctttccttggtggctttggcttctgcactccttggcgtcagcctctcaggtcctccattcacacgaggtcctcctcgctctggccgctcttgctgctcctgtctgaagaaatcagactgatttcctcttaagactcctagggatgtggtgaagagctgggactcaagtgcagtccacggtgtgaaacatgagggaggtgaggtgtccgtccacttcccccataaaggtgtgcatttcagttaggctgccccgccacagagcaggcttcatctgctctgccatccagccccatctggatgtgaggtggggtggagacatcatggggtgattgcagaaagggggagtggcggcccacgcagcttctgctgaggagctgaccgctctgagctgttctgtttcgtattgctgctctgtgtctgcatgtattgtgaccgtgcggctccacctcttccagctgctgctacagctgaggcctggatcccggcctttccctgtgacttacgtgtctgtcaccggcaggcagccctacaaatcctggtgacctgctctcccaagaacagagcctgtccccagatgtcccagtagcgatgagtaacagaggtggctgtggacttcctctacttctccttgctggatcagggccttcctgcctcccgctgggcaggtctggccttgctctcttggcagggccccagcccctctgaccactctgcagctcaccatgcagctgatgccaaagttgtggtgtccagtgtgcagcagccctgggagccactgccaccttcagaggggttccttgctgagacccacattgcttcacctggccccaccatggctgcttgcctggcccaacctagcgttctgtgccatgctagagcttgagctgttgctcttcttcaggggaggaaatagggtggagagcgggaagggtcttgctcctaagtgttgctgctgtggcttttttgccttctccaaagacgcactgccaggtcccaagcttcagactgctgtgcttagtaagcaagtgagaagcctggggtttggagcccacctactctctggcagcatcagcatcctactcctggcaacatcaggccaacgtccaccccagcctcacattgccagatgttggcagaagggctaatattgaccgtcttgactggctggagccttcaaagccactgggatgtcctccaggcacctgggtcccatgaccagctccccgtctccataggggtaggcatttcactggtttatgaagctcgagtttcattaaatatgttaagaatcaaaaaaaaacaaaaaaaaaaaaaaaaaaaaaaaaaaaaaaaaaaaaaaccccgggggccatttttcggggggggaaaaaagggcaaaaagcggcccaaggcggctcatcagatggtgtcctcgtgcgacccccatccttgctggacaaccacagaggggaacaacctgcggcccgggctccccccatcaagtggggcgagcgcctacaaaaactagcacaaagaaccgcaggtatcacccgcggcattaaaaccgcccagcgaacagagaacagcagtgcggcgcacgcggaagcaccgagcgcaagaaacgctcaacacgacgaccagaggacgccacaacacgacgcggcgaaaaggacatatgcgctcgcccaacaagacgccgcagacagcacagcgc

SEQ ID NO: 284835 - DNA, 4182 bp, Homo sapiens
tagcaggctggtcggccggagtgtagggatctggccgccatgttggagctttcgctgttcggggcccggcctgctccgggccctcccagcgtcgccgctagctgacttagggctcccgcccacactgcgcacggccttgctgagggccggctcgtagtgggaggcttcgcgttcacctgaacatttccgcctcctctggatgggggatgagaggcggggctgatgcatcgcagcagtcctggaccctgacttcggacttggagaagaaacgccgaggaggaacgggagttagggggttagcagcttggcgcgctgggagccggccacccctggtctccggacttcacttcccaggaggcctcgcgcgcgactggaagtgctgcgagcctataagaaggcgaggcggcacccgccgctctgctctggggcggcattgccagccggctgtaggcattcagggcagtgtcttctgcatctcctaggaacctcgggagcggcagctccggcgcctggtagcgagaggcgggttccggagatcccggcctcacttcgtcccactgtggttaggggtgagtcctgcaaatgttaagtgatttgctcaaggtgcccatttcgcaggaattggagcccaggccagttctctgagcctatcattagggctaaaggagtgcgtgatcagaatggtgtctggacggttctacttgtcctgcctgctgctggggtccctgggctctatgtgcatcctcttcactatctactggatgcagtactggcgtggtggctttgcctggaatggcagcatctacatgttcaactggcacccagtgcttatggttgctggcatggtggtattctatggaggtgcgtcactggtgtaccgcctgccccagtcgtgggtggggcccaaactgccctggaaactcctccatgcagcgctgcacctgatggccttcgtcctcactgttgtggggctggttgctgtctttacgtttcacaaccatggaaggactgccaacctctactcccttcacagctggctgggcatcaccactgtcttcctcttcgcctgccagtggttcctgggctttgctgtcttcctcctgccctgggcgtccatgtggctgcgcagcctcctaaaacctatccacgtcttttttggagccgccatcctctctctgtccatcgcatccgtcatttcgggcattaatgagaagcttttcttcagtttgaaaaacaccaccaggccataccacagcctgcccagtgaggcggtctttgccaacagcaccgggatgctggtggtggcctttgggctgctggtgctctacatccttctggcttcatcttggaagcgcccagagccggggatcctgaccgacagacagcccctgctgcatgatggggagtgaagcagcaggaaggggctcccaagagctcctggtggtgcagcctgtgctcccctcagaagctctgctcttcccagggctcccggctggtttcagcaggcgactttcttccaatgctgggcccagacttcttgcctgggtgctggcctgccctctccggccgcttgctgcctgtctgctttccttggtggctttgcctgggtgctgggcctgccctctccggccgcttgctgcctgtctgctttccttggtggctttgcctgggtgctgggcctgccttctctggctgcttgctgcctgtctgctttccttggtggctttggcttctgcactccttggcgtcagcctctcaggtcctccattcacacgaggtcctcctcgctctggccgctcttgctgctcctgtctgaagaaatcagactgatttcctcttaagactcctagggatgtggtgaagagctgggactcaagtgcagtccacggtgtgaaacatgagggaggtgaggtgtccgtccacttcccccataaaggtgtgcatttcagttaggctgccccgccacagagcaggcttcatctgctctgccatccagccccatctggatgtgaggtggggtggagacatcatggggtgattgcagaaagggggagtggcggcccacgcagcttctgctgaggagctgaccgctctgagctgttctgtttcgtattgctgctctgtgtctgcatgtattgtgaccgtgcggctccacctcttccagctgctgctacagctgaggcctggatcccggcctttccctgtgacttacgtgtctgtcaccggcaggcagccctacaaatcctggtgacctgctctcccaagaacagagcctgtccccagatgtcccagtagcgatgagtaacagaggtggctgtggacttcctctacttctccttgctggatcagggccttcctgcctcccgctgggcaggtctggccttgctctcttggcagggccccagcccctctgaccactctgcagctcaccatgcagctgatgccaaagttgtggtgtccagtgtgcagcagccctgggagccactgccaccttcagaggggttccttgctgagacccacattgcttcacctggccccaccatggctgcttgcctggcccaacctagcgttctgtgccatgctagagcttgagctgttgctcttcttcaggggaggaaatagggtggagagcgggaagggtcttgctcctaagtgttgctgctgtggcttttttgccttctccaaagacgcactgccaggtcccaagcttcagactgctgtgcttagtaagcaagtgagaagcctggggtttggagcccacctactctctggcagcatcagcatcctactcctggcaacatcaggccaacgtccaccccagcctcacattgccagatgttggcagaagggctaatattgaccgtcttgactggctggagccttcaaagccactgggatgtcctccaggcacctgggtcccatgaccagctccccgtctccataggggtaggcatttcactggtttatgaagctcgagtttcattaaatatgttaagaatcaaagctgtctttgttcaggctgctataacaaaaatataatagcctgggtggcttaaacaacaagtgtttatttctcacagttctggaggctatagacatccaagatgaaggcgctggcaaatgtggtgtgtggcaagggccagcttcctcagagaccatcttctcaccataacctcacatggtggaaagggcgtgagagctctctggggctccaccctcataaccccatcacctcccaaaggccccacgtcctaacactaccatagtgggggtgagcctttcaacacaggaatttgggggggacacaaacattcagtctctaataacagccctctaatgaaatgatgctgtggttaaatgagttctgggccaatttgtaaaagcctcaggacaggtctgaccctcacagacctagggaggggccaaccggaaggcaccaaagatccacatgatcctctttgatgtcttcatggaatggcatgtgtggattcacatgcagctcatttatgtgcgtgtccttaatagctaatggcacgtgcttatctcacgaggaaggaaatttttcctatttcataatctgagaaaacaagactcaaaaagggtgactaggttgaggtcacccagccaggaaatgacagagctgggatccacaggccaccgtctgaggtcagcctccttcccagctgctgggcgcatactcctgtgcacgtggatgccttgtggtcagggacgtatggtgcagccgacagacaggaccctgggtagagaagcccaggcactcggggagcctgcagccaaatttgggccaagtaggtgacgggggttgggagggcaggaggctctttcctaccagctagtggtagagcagatgacctgggaggggctggggggcccaacccctgtgataaccgtaactctcagtgagtgagcacttggactgtgctgggctttatggcccatcttcatcaattcatttgaatcctttcatgtccccatgaggtgggtaccattctgattttacagatcccaaagggctaaaaaataggccttagctcctgtagccgggttaaagcagaatcagatttcagatcatgtgtatgagtcgacagccagtgcctttaaccactccctaccctacatgtgtgccaggcatgtgctgtttgtctccacatgcatacagtg

SEQ ID NO: 284836 - DNA, 2719 bp, Homo sapiens
ggctaggtacgaggcctggtgttaatcggccgaggccggccacccctggtctccggacttcacttcccaggaggcctcgcgcgcgactggaagtgctgcgagcctataagaaggcgaggcggcacccgccgctctgctctggggcggcattgccagccggctgtaggcattcagggcagtgtcttctgcatctcctaggaacctcgggagcggcagctccggcgcctggtagcgagaggcgggttccggagatcccggcctcacttcgtcccactgtggttaggggtgagtcctgcaaatgttaagtgatttgctcaaggtgcccatttcgcaggaattggagcccaggccagttctctgagcctatcattagggctaaaggagtgcgtgatcagaatggtgtctggacggttctacttgtcctgcctgctgctggggtccctgggctctatgtgcatcctcttcactatctactggatgcagtactggcgtggtggctttgcctggaatggcagcatctacatgttcaactggcacccagtgcttatggttgctggcatggtggtattctatggaggtgcgtcactggtgtaccgcctgccccagtcgtgggtggggcccaaactgccctggaaactcctccatgcagcgctgcacctgatggccttcgtcctcactgttgtggggctggttgctgtctttacgtttcacaaccatggaaggactgccaacctctactcccttcacagctggctgggcatcaccactgtcttcctcttcgcctgccagtggttcctgggctttgctgtcttcctcctgccctgggcgtccatgtggctgcgcagcctcctaaaacctatccacgtcttttttggagccgccatcctctctctgtccatcgcatccgtcatttcgggcattaatgagaagcttttcttcagtttgaaaaacaccaccaggccataccacagcctgcccagtgaggcggtctttgccaacagcaccgggatgctggtggtggcctttgggctgctggtgctctacatccttctggcttcatcttggaagcgcccagagccggggatcctgaccgacagacagcccctgctgcatgatggggagtgaagcagcaggaaggggctcccaagagctcctggtggtgcagcctgtgctcccctcagaagctctgctcttcccagggctcccggctggtttcagcaggcgactttcttccaatgctgggcccagacttcttgcctgggtgctggcctgccctctccggccgcttgctgcctgtctgctttccttggtggctttgcctgggtgctgggcctgccctctccggccgcttgctgcctgtctgctttccttggtggctttgcctgggtgctgggcctgccttctctggctgcttgctgcctgtctgctttccttggtggctttggcttctgcactccttggcgtcagcctctcaggtcctccattcacacgaggtcctcctcgctctggccgctcttgctgctcctgtctgaagaaatcagactgatttcctcttaagactcctagggatgtggtgaagagctgggactcaagtgcagtccacggtgtgaaacatgagggaggtgaggtgtccgtccacttcccccataaaggtgtgcatttcagttaggctgccccgccacagagcaggcttcatctgctctgccatccagccccatctggatgtgaggtggggtggagacatcatggggtgattgcagaaagggggagtggcggcccacgcagcttctgctgaggagctgaccgctctgagctgttctgtttcgtattgctgctctgtgtctgcatgtattgtgaccgtgcggctccacctcttccagctgctgctacagctgaggcctggatcccggcctttccctgtgacttacgtgtctgtcaccggcaggcagccctacaaatcctggtgacctgctctcccaagaacagagcctgtccccagatgtcccagtagcgatgagtaacagaggtggctgtggacttcctctacttctccttgctggatcagggccttcctgcctcccgctgggcaggtctggccttgctctcttggcagggccccagcccctctgaccactctgcagctcaccatgcagctgatgccaaagttgtggtgtccagtgtgcagcagccctgggagccactgccaccttcagaggggttccttgctgagacccacattgcttcacctggccccaccatggctgcttgcctggcccaacctagcgttctgtgccatgctagagcttgagctgttgctcttcttcaggggaggaaatagggtggagagcgggaagggtcttgctcctaagtgttgctgctgtggcttttttgccttctccaaagacgcactgccaggtcccaagcttcagactgctgtgcttagtaagcaagtgagaagcctggggtttggagcccacctactctctggcagcatcagcatcctactcctggcaacatcaggccaacgtccaccccagcctcacattgccagatgttggcagaagggctaatattgaccgtcttgactggctggagccttcaaagccactgggatgtcctccaggcacctgggtcccatgaccagctccccgtctccataggggtaggcatttcactggtttatgaagctcgagtttcattaaatatgttaagaatcaaa

SEQ ID NO: 284837 - DNA, 2597 bp, Homo sapiens
ctaggctaggtacgaggctggtggtgattgccagccggctgtaggcattcagggcagtgtcttctgcatctcctaggaacctcgggagcggcagctccggcgcctggtagcgagaggcgggttccggagatcccggcctcacttcgtcccactgtggttaggggtgagtcctgcaaatgttaagtgatttgctcaaggtgcccatttcgcaggaattggagcccaggccagttctctgagcctatcattagggctaaaggagtgcgtgatcagaatggtgtctggacggttctacttgtcctgcctgctgctggggtccctgggctctatgtgcatcctcttcactatctactggatgcagtactggcgtggtggctttgcctggaatggcagcatctacatgttcaactggcacccagtgcttatggttgctggcatggtggtattctatggaggtgcgtcactggtgtaccgcctgccccagtcgtgggtggggcccaaactgccctggaaactcctccatgcagcgctgcacctgatggccttcgtcctcactgttgtggggctggttgctgtctttacgtttcacaaccatggaaggactgccaacctctactcccttcacagctggctgggcatcaccactgtcttcctcttcgcctgccagtggttcctgggctttgctgtcttcctcctgccctgggcgtccatgtggctgcgcagcctcctaaaacctatccacgtcttttttggagccgccatcctctctctgtccatcgcatccgtcatttcgggcattaatgagaagcttttcttcagtttgaaaaacaccaccaggccataccacagcctgcccagtgaggcggtctttgccaacagcaccgggatgctggtggtggcctttgggctgctggtgctctacatccttctggcttcatcttggaagcgcccagagccggggatcctgaccgacagacagcccctgctgcatgatggggagtgaagcagcaggaaggggctcccaagagctcctggtggtgcagcctgtgctcccctcagaagctctgctcttcccagggctcccggctggtttcagcaggcgactttcttccaatgctgggcccagacttcttgcctgggtgctggcctgccctctccggccgcttgctgcctgtctgctttccttggtggctttgcctgggtgctgggcctgccctctccggccgcttgctgcctgtctgctttccttggtggctttgcctgggtgctgggcctgccttctctggctgcttgctgcctgtctgctttccttggtggctttggcttctgcactccttggcgtcagcctctcaggtcctccattcacacgaggtcctcctcgctctggccgctcttgctgctcctgtctgaagaaatcagactgatttcctcttaagactcctagggatgtggtgaagagctgggactcaagtgcagtccacggtgtgaaacatgagggaggtgaggtgtccgtccacttcccccataaaggtgtgcatttcagttaggctgccccgccacagagcaggcttcatctgctctgccatccagccccatctggatgtgaggtggggtggagacatcatggggtgattgcagaaagggggagtggcggcccacgcagcttctgctgaggagctgaccgctctgagctgttctgtttcgtattgctgctctgtgtctgcatgtattgtgaccgtgcggctccacctcttccagctgctgctacagctgaggcctggatcccggcctttccctgtgacttacgtgtctgtcaccggcaggcagccctacaaatcctggtgacctgctctcccaagaacagagcctgtccccagatgtcccagtagcgatgagtaacagaggtggctgtggacttcctctacttctccttgctggatcagggccttcctgcctcccgctgggcaggtctggccttgctctcttggcagggccccagcccctctgaccactctgcagctcaccatgcagctgatgccaaagttgtggtgtccagtgtgcagcagccctgggagccactgccaccttcagaggggttccttgctgagacccacattgcttcacctggccccaccatggctgcttgcctggcccaacctagcgttctgtgccatgctagagcttgagctgttgctcttcttcaggggaggaaatagggtggagagcgggaagggtcttgctcctaagtgttgctgctgtggcttttttgccttctccaaagacgcactgccaggtcccaagcttcagactgctgtgcttagtaagcaagtgagaagcctggggtttggagcccacctactctctggcagcatcagcatcctactcctggcaacatcaggccaacgtccaccccagcctcacattgccagatgttggcagaagggctaatattgaccgtcttgactggctggagccttcaaagccactgggatgtcctccaggcacctgggtcccatgaccagctccccgtctccataggggtaggcatttcactggtttatgaagctcgagtttcattaaatatgttaagaatcaaa

SEQ ID NO: 284838 - DNA, 3059 bp, Homo sapiens
tagcaggctggtcggccggagtgtagggatctggccgccatgttggagctttcgctgttcggggcccggcctgctccgggccctcccagcgtcgccgctagctgacttagggctcccgcccacactgcgcacggccttgctgagggccggctcgtagtgggaggcttcgcgttcacctgaacatttccgcctcctctggatgggggatgagaggcggggctgatgcatcgcagcagtcctggaccctgacttcggacttggagaagaaacgccgaggaggaacgggagttagggggttagcagcttggcgcgctgggagccggccacccctggtctccggacttcacttcccaggaggcctcgcgcgcgactggaagtgctgcgagcctataagaaggcgaggcggcacccgccgctctgctctggggcggcattgccagccggctgtaggcattcagggcagtgtcttctgcatctcctaggaacctcgggagcggcagctccggcgcctggtagcgagaggcgggttccggagatcccggcctcacttcgtcccactgtggttaggggtgagtcctgcaaatgttaagtgatttgctcaaggtgcccatttcgcaggaattggagcccaggccagttctctgagcctatcattagggctaaagccagagaactgggtgcatctgagccagtggagatttgtgacttctccttcttctaggagtgcgtgatcagaatggtgtctggacggttctacttgtcctgcctgctgctggggtccctgggctctatgtgcatcctcttcactatctactggatgcagtactggcgtggtggctttgcctggaatggcagcatctacatgttcaactggcacccagtgcttatggttgctggcatggtggtattctatggaggtgcgtcactggtgtaccgcctgccccagtcgtgggtggggcccaaactgccctggaaactcctccatgcagcgctgcacctgatggccttcgtcctcactgttgtggggctggttgctgtctttacgtttcacaaccatggaaggactgccaacctctactcccttcacagctggctgggcatcaccactgtcttcctcttcgcctgccagtggttcctgggctttgctgtcttcctcctgccctgggcgtccatgtggctgcgcagcctcctaaaacctatccacgtcttttttggagccgccatcctctctctgtccatcgcatccgtcatttcgggcattaatgagaagcttttcttcagtttgaaaaacaccaccaggccataccacagcctgcccagtgaggcggtctttgccaacagcaccgggatgctggtggtggcctttgggctgctggtgctctacatccttctggcttcatcttggaagcgcccagagccggggatcctgaccgacagacagcccctgctgcatgatggggagtgaagcagcaggaaggggctcccaagagctcctggtggtgcagcctgtgctcccctcagaagctctgctcttcccagggctcccggctggtttcagcaggcgactttcttccaatgctgggcccagacttcttgcctgggtgctggcctgccctctccggccgcttgctgcctgtctgctttccttggtggctttgcctgggtgctgggcctgccctctccggccgcttgctgcctgtctgctttccttggtggctttgcctgggtgctgggcctgccttctctggctgcttgctgcctgtctgctttccttggtggctttggcttctgcactccttggcgtcagcctctcaggtcctccattcacacgaggtcctcctcgctctggccgctcttgctgctcctgtctgaagaaatcagactgatttcctcttaagactcctagggatgtggtgaagagctgggactcaagtgcagtccacggtgtgaaacatgagggaggtgaggtgtccgtccacttcccccataaaggtgtgcatttcagttaggctgccccgccacagagcaggcttcatctgctctgccatccagccccatctggatgtgaggtggggtggagacatcatggggtgattgcagaaagggggagtggcggcccacgcagcttctgctgaggagctgaccgctctgagctgttctgtttcgtattgctgctctgtgtctgcatgtattgtgaccgtgcggctccacctcttccagctgctgctacagctgaggcctggatcccggcctttccctgtgacttacgtgtctgtcaccggcaggcagccctacaaatcctggtgacctgctctcccaagaacagagcctgtccccagatgtcccagtagcgatgagtaacagaggtggctgtggacttcctctacttctccttgctggatcagggccttcctgcctcccgctgggcaggtctggccttgctctcttggcagggccccagcccctctgaccactctgcagctcaccatgcagctgatgccaaagttgtggtgtccagtgtgcagcagccctgggagccactgccaccttcagaggggttccttgctgagacccacattgcttcacctggccccaccatggctgcttgcctggcccaacctagcgttctgtgccatgctagagcttgagctgttgctcttcttcaggggaggaaatagggtggagagcgggaagggtcttgctcctaagtgttgctgctgtggcttttttgccttctccaaagacgcactgccaggtcccaagcttcagactgctgtgcttagtaagcaagtgagaagcctggggtttggagcccacctactctctggcagcatcagcatcctactcctggcaacatcaggccaacgtccaccccagcctcacattgccagatgttggcagaagggctaatattgaccgtcttgactggctggagccttcaaagccactgggatgtcctccaggcacctgggtcccatgaccagctccccgtctccataggggtaggcatttcactggtttatgaagctcgagtttcattaaatatgttaagaatcaaa

SEQ ID NO: 284839 - DNA, 3172 bp, Homo sapiens
tagcaggctggtcggccggagtgtagggatctggccgccatgttggagctttcgctgttcggggcccggcctgctccgggccctcccagcgtcgccgctagctgacttagggctcccgcccacactgcgcacggccttgctgagggccggctcgtagtgggaggcttcgcgttcacctgaacatttccgcctcctctggatgggggatgagaggcggggctgatgcatcgcagcagtcctggaccctgacttcggacttggagaagaaacgccgaggaggaacgggagttagggggttagcagcttggcgcgctgggagccggccacccctggtctccggacttcacttcccaggaggcctcgcgcgcgactggaagtgctgcgagcctataagaaggcgaggcggcacccgccgctctgctctggggcggcattgccagccggctgtaggcattcagggcagtgtcttctgcatctcctaggaacctcgggagcggcagctccggcgcctggtagcgagaggcgggttccggagatcccggcctcacttcgtcccactgtggttaggggtgagtcctgcaaatgttaagtgatttgctcaaggtgcccatttcgcaggaattggagcccaggccagttctctgagcctatcattagggctaaagaggaagagaaagcagaagtctcagggctggagacagctgaggggcatcagctggttcaaggtgtggagtgtgggcagtggagtgaaggcctggttacctctccagtgaagattagccccatagagcttactctatggggaagaacttttctgactccttcctgtctagggagtgcgtgatcagaatggtgtctggacggttctacttgtcctgcctgctgctggggtccctgggctctatgtgcatcctcttcactatctactggatgcagtactggcgtggtggctttgcctggaatggcagcatctacatgttcaactggcacccagtgcttatggttgctggcatggtggtattctatggaggtgcgtcactggtgtaccgcctgccccagtcgtgggtggggcccaaactgccctggaaactcctccatgcagcgctgcacctgatggccttcgtcctcactgttgtggggctggttgctgtctttacgtttcacaaccatggaaggactgccaacctctactcccttcacagctggctgggcatcaccactgtcttcctcttcgcctgccagtggttcctgggctttgctgtcttcctcctgccctgggcgtccatgtggctgcgcagcctcctaaaacctatccacgtcttttttggagccgccatcctctctctgtccatcgcatccgtcatttcgggcattaatgagaagcttttcttcagtttgaaaaacaccaccaggccataccacagcctgcccagtgaggcggtctttgccaacagcaccgggatgctggtggtggcctttgggctgctggtgctctacatccttctggcttcatcttggaagcgcccagagccggggatcctgaccgacagacagcccctgctgcatgatggggagtgaagcagcaggaaggggctcccaagagctcctggtggtgcagcctgtgctcccctcagaagctctgctcttcccagggctcccggctggtttcagcaggcgactttcttccaatgctgggcccagacttcttgcctgggtgctggcctgccctctccggccgcttgctgcctgtctgctttccttggtggctttgcctgggtgctgggcctgccctctccggccgcttgctgcctgtctgctttccttggtggctttgcctgggtgctgggcctgccttctctggctgcttgctgcctgtctgctttccttggtggctttggcttctgcactccttggcgtcagcctctcaggtcctccattcacacgaggtcctcctcgctctggccgctcttgctgctcctgtctgaagaaatcagactgatttcctcttaagactcctagggatgtggtgaagagctgggactcaagtgcagtccacggtgtgaaacatgagggaggtgaggtgtccgtccacttcccccataaaggtgtgcatttcagttaggctgccccgccacagagcaggcttcatctgctctgccatccagccccatctggatgtgaggtggggtggagacatcatggggtgattgcagaaagggggagtggcggcccacgcagcttctgctgaggagctgaccgctctgagctgttctgtttcgtattgctgctctgtgtctgcatgtattgtgaccgtgcggctccacctcttccagctgctgctacagctgaggcctggatcccggcctttccctgtgacttacgtgtctgtcaccggcaggcagccctacaaatcctggtgacctgctctcccaagaacagagcctgtccccagatgtcccagtagcgatgagtaacagaggtggctgtggacttcctctacttctccttgctggatcagggccttcctgcctcccgctgggcaggtctggccttgctctcttggcagggccccagcccctctgaccactctgcagctcaccatgcagctgatgccaaagttgtggtgtccagtgtgcagcagccctgggagccactgccaccttcagaggggttccttgctgagacccacattgcttcacctggccccaccatggctgcttgcctggcccaacctagcgttctgtgccatgctagagcttgagctgttgctcttcttcaggggaggaaatagggtggagagcgggaagggtcttgctcctaagtgttgctgctgtggcttttttgccttctccaaagacgcactgccaggtcccaagcttcagactgctgtgcttagtaagcaagtgagaagcctggggtttggagcccacctactctctggcagcatcagcatcctactcctggcaacatcaggccaacgtccaccccagcctcacattgccagatgttggcagaagggctaatattgaccgtcttgactggctggagccttcaaagccactgggatgtcctccaggcacctgggtcccatgaccagctccccgtctccataggggtaggcatttcactggtttatgaagctcgagtttcattaaatatgttaagaatcaaa

SEQ ID NO: 284840 - DNA, 3063 bp, Homo sapiens
tagcaggctggtcggccggagtgtagggatctggccgccatgttggagctttcgctgttcggggcccggcctgctccgggccctcccagcgtcgccgctagctgacttagggctcccgcccacactgcgcacggccttgctgagggccggctcgtagtgggaggcttcgcgttcacctgaacatttccgcctcctctggatgggggatgagaggcggggctgatgcatcgcagcagtcctggaccctgacttcggacttggagaagaaacgccgaggaggaacgggagttagggggttagcagcttggcgcgctgggagccggccacccctggtctccggacttcacttcccaggaggcctcgcgcgcgactggaagtgctgcgagcctataagaaggcgaggcggcacccgccgctctgctctggggcggcattgccagccggctgtaggcattcagggcagtgtcttctgcatctcctaggaacctcgggagcggcagctccggcgcctggtagcgagaggcgggttccggagatcccggcctcacttcgtcccactgtggttaggggtgagtcctgcaaatgttaagtgatttgctcaaggtgcccatttcgcaggaattggagcccaggccagttctctgagcctatcattagggctaaagaggaagagaaagcagaagtctcagggctggagacagctgaggggcatcagctggttcaaggagtgcgtgatcagaatggtgtctggacggttctacttgtcctgcctgctgctggggtccctgggctctatgtgcatcctcttcactatctactggatgcagtactggcgtggtggctttgcctggaatggcagcatctacatgttcaactggcacccagtgcttatggttgctggcatggtggtattctatggaggtgcgtcactggtgtaccgcctgccccagtcgtgggtggggcccaaactgccctggaaactcctccatgcagcgctgcacctgatggccttcgtcctcactgttgtggggctggttgctgtctttacgtttcacaaccatggaaggactgccaacctctactcccttcacagctggctgggcatcaccactgtcttcctcttcgcctgccagtggttcctgggctttgctgtcttcctcctgccctgggcgtccatgtggctgcgcagcctcctaaaacctatccacgtcttttttggagccgccatcctctctctgtccatcgcatccgtcatttcgggcattaatgagaagcttttcttcagtttgaaaaacaccaccaggccataccacagcctgcccagtgaggcggtctttgccaacagcaccgggatgctggtggtggcctttgggctgctggtgctctacatccttctggcttcatcttggaagcgcccagagccggggatcctgaccgacagacagcccctgctgcatgatggggagtgaagcagcaggaaggggctcccaagagctcctggtggtgcagcctgtgctcccctcagaagctctgctcttcccagggctcccggctggtttcagcaggcgactttcttccaatgctgggcccagacttcttgcctgggtgctggcctgccctctccggccgcttgctgcctgtctgctttccttggtggctttgcctgggtgctgggcctgccctctccggccgcttgctgcctgtctgctttccttggtggctttgcctgggtgctgggcctgccttctctggctgcttgctgcctgtctgctttccttggtggctttggcttctgcactccttggcgtcagcctctcaggtcctccattcacacgaggtcctcctcgctctggccgctcttgctgctcctgtctgaagaaatcagactgatttcctcttaagactcctagggatgtggtgaagagctgggactcaagtgcagtccacggtgtgaaacatgagggaggtgaggtgtccgtccacttcccccataaaggtgtgcatttcagttaggctgccccgccacagagcaggcttcatctgctctgccatccagccccatctggatgtgaggtggggtggagacatcatggggtgattgcagaaagggggagtggcggcccacgcagcttctgctgaggagctgaccgctctgagctgttctgtttcgtattgctgctctgtgtctgcatgtattgtgaccgtgcggctccacctcttccagctgctgctacagctgaggcctggatcccggcctttccctgtgacttacgtgtctgtcaccggcaggcagccctacaaatcctggtgacctgctctcccaagaacagagcctgtccccagatgtcccagtagcgatgagtaacagaggtggctgtggacttcctctacttctccttgctggatcagggccttcctgcctcccgctgggcaggtctggccttgctctcttggcagggccccagcccctctgaccactctgcagctcaccatgcagctgatgccaaagttgtggtgtccagtgtgcagcagccctgggagccactgccaccttcagaggggttccttgctgagacccacattgcttcacctggccccaccatggctgcttgcctggcccaacctagcgttctgtgccatgctagagcttgagctgttgctcttcttcaggggaggaaatagggtggagagcgggaagggtcttgctcctaagtgttgctgctgtggcttttttgccttctccaaagacgcactgccaggtcccaagcttcagactgctgtgcttagtaagcaagtgagaagcctggggtttggagcccacctactctctggcagcatcagcatcctactcctggcaacatcaggccaacgtccaccccagcctcacattgccagatgttggcagaagggctaatattgaccgtcttgactggctggagccttcaaagccactgggatgtcctccaggcacctgggtcccatgaccagctccccgtctccataggggtaggcatttcactggtttatgaagctcgagtttcattaaatatgttaagaatcaaa

SEQ ID NO: 284841 - DNA, 2449 bp, Homo sapiens
agcaaaaagattccatcccacaggccaagagctaaatcagtgttacctcctttagccagagaactgggtgcatctgagccagtggagatttgtgacttctccttcttctaggagtgcgtgatcagaatggtgtctggacggttctacttgtcctgcctgctgctggggtccctgggctctatgtgcatcctcttcactatctactggatgcagtactggcgtggtggctttgcctggaatggcagcatctacatgttcaactggcacccagtgcttatggttgctggcatggtggtattctatggaggtgcgtcactggtgtaccgcctgccccagtcgtgggtggggcccaaactgccctggaaactcctccatgcagcgctgcacctgatggccttcgtcctcactgttgtggggctggttgctgtctttacgtttcacaaccatggaaggactgccaacctctactcccttcacagctggctgggcatcaccactgtcttcctcttcgcctgccagtggttcctgggctttgctgtcttcctcctgccctgggcgtccatgtggctgcgcagcctcctaaaacctatccacgtcttttttggagccgccatcctctctctgtccatcgcatccgtcatttcgggcattaatgagaagcttttcttcagtttgaaaaacaccaccaggccataccacagcctgcccagtgaggcggtctttgccaacagcaccgggatgctggtggtggcctttgggctgctggtgctctacatccttctggcttcatcttggaagcgcccagagccggggatcctgaccgacagacagcccctgctgcatgatggggagtgaagcagcaggaaggggctcccaagagctcctggtggtgcagcctgtgctcccctcagaagctctgctcttcccagggctcccggctggtttcagcaggcgactttcttccaatgctgggcccagacttcttgcctgggtgctggcctgccctctccggccgcttgctgcctgtctgctttccttggtggctttgcctgggtgctgggcctgccctctccggccgcttgctgcctgtctgctttccttggtggctttgcctgggtgctgggcctgccttctctggctgcttgctgcctgtctgctttccttggtggctttggcttctgcactccttggcgtcagcctctcaggtcctccattcacacgaggtcctcctcgctctggccgctcttgctgctcctgtctgaagaaatcagactgatttcctcttaagactcctagggatgtggtgaagagctgggactcaagtgcagtccacggtgtgaaacatgagggaggtgaggtgtccgtccacttcccccataaaggtgtgcatttcagttaggctgccccgccacagagcaggcttcatctgctctgccatccagccccatctggatgtgaggtggggtggagacatcatggggtgattgcagaaagggggagtggcggcccacgcagcttctgctgaggagctgaccgctctgagctgttctgtttcgtattgctgctctgtgtctgcatgtattgtgaccgtgcggctccacctcttccagctgctgctacagctgaggcctggatcccggcctttccctgtgacttacgtgtctgtcaccggcaggcagccctacaaatcctggtgacctgctctcccaagaacagagcctgtccccagatgtcccagtagcgatgagtaacagaggtggctgtggacttcctctacttctccttgctggatcagggccttcctgcctcccgctgggcaggtctggccttgctctcttggcagggccccagcccctctgaccactctgcagctcaccatgcagctgatgccaaagttgtggtgtccagtgtgcagcagccctgggagccactgccaccttcagaggggttccttgctgagacccacattgcttcacctggccccaccatggctgcttgcctggcccaacctagcgttctgtgccatgctagagcttgagctgttgctcttcttcaggggaggaaatagggtggagagcgggaagggtcttgctcctaagtgttgctgctgtggcttttttgccttctccaaagacgcactgccaggtcccaagcttcagactgctgtgcttagtaagcaagtgagaagcctggggtttggagcccacctactctctggcagcatcagcatcctactcctggcaacatcaggccaacgtccaccccagcctcacattgccagatgttggcagaagggctaatattgaccgtcttgactggctggagccttcaaagccactgggatgtcctccaggcacctgggtcccatgaccagctccccgtctccataggggtaggcatttcactggtttatgaagctcgagtttcattaaatatgttaagaatcaaa

SEQ ID NO: 284842 - DNA, 2224 bp, Homo sapiens
tagcaggctggtcggccggagtgtagggatctggccgccatgttggagctttcgctgttcggggcccggcctgctccgggccctcccagcgtcgccgctagctgacttagggctcccgcccacactgcgcacggccttgctgagggccggctcgtagtgggaggcttcgcgttcacctgaacatttccgcctcctctggatgggggatgagaggcggggctgatgcatcgcagcagtcctggaccctgacttcggacttggagaagaaacgccgaggaggaacgggagttagggggttagcagcttggcgcgctgggagccggccacccctggtctccggacttcacttcccaggaggcctcgcgcgcgactggaagtgctgcgagcctataagaaggcgaggcggcacccgccgctctgctctggggcggcattgccagccggctgtaggcattcagggcagtgtcttctgcatctcctaggaacctcgggagcggcagctccggcgcctggtagcgagaggcgggttccggagatcccggcctcacttcgtcccactgtggttaggggtgagtcctgcaaatgttaagtgatttgctcaaggtgcccatttcgcaggaattggagcccaggccagttctctgagcctatcattagggctaaaggagtgcgtgatcagaatggtgtctggacggttctacttgtcctgcctgctgctggggtccctgggctctatgtgcatcctcttcactatctactggatgcagtactggcgtggtggctttgcctggaatggcagcatctacatgttcaactggcacccagtgcttatggttgctggcatggtggtattctatggaggtgcgtcactggtgtaccgcctgccccagtcgtgggtggggcccaaactgccctggaaactcctccatgcagcgctgcacctgatggccttcgtcctcactgttgtggggctggttgctgtctttacgtttcacaaccatggaaggactgccaacctctactcccttcacagctggctgggcatcaccactgtcttcctcttcgcctgccagtggttcctgggctttgctgtcttcctcctgccctgggcgtccatgtggctgcgcagcctcctaaaacctatccacgtcttttttggagccgccatcctctctctgtccatcgcatccgtcatttcgggcattaatgagaagcttttcttcagtttgaaaaacaccaccaggccataccacagcctgcccagtgaggcggtctttgccaacagcaccgggatgctggtggtggcctttgggctgctggtgctctacatccttctggcttcatcttggaagcgcccagagccggggatcctgaccgacagacagctgctgctacagctgaggcctggatcccggcctttccctgtgacttacgtgtctgtcaccggcaggcagccctacaaatcctggtgacctgctctcccaagaacagagcctgtccccagatgtcccagtagcgatgagtaacagaggtggctgtggacttcctctacttctccttgctggatcagggccttcctgcctcccgctgggcaggtctggccttgctctcttggcagggccccagcccctctgaccactctgcagctcaccatgcagctgatgccaaagttgtggtgtccagtgtgcagcagccctgggagccactgccaccttcagaggggttccttgctgagacccacattgcttcacctggccccaccatggctgcttgcctggcccaacctagcgttctgtgccatgctagagcttgagctgttgctcttcttcaggggaggaaatagggtggagagcgggaagggtcttgctcctaagtgttgctgctgtggcttttttgccttctccaaagacgcactgccaggtcccaagcttcagactgctgtgcttagtaagcaagtgagaagcctggggtttggagcccacctactctctggcagcatcagcatcctactcctggcaacatcaggccaacgtccaccccagcctcacattgccagatgttggcagaagggctaatattgaccgtcttgactggctggagccttcaaagccactgggatgtcctccaggcacctgggtcccatgaccagctccccgtctccataggggtaggcatttcactggtttatgaagctcgagtttcattaaatatgttaagaatcaaa

SEQ ID NO: 284843 - DNA, 2660 bp, Homo sapiens
tagcaggctggtcggccggagtgtagggatctggccgccatgttggagctttcgctgttcggggcccggcctgctccgggccctcccagcgtcgccgctagctgacttagggctcccgcccacactgcgcacggccttgctgagggccggctcgtagtgggaggcttcgcgttcacctgaacatttccgcctcctctggatgggggatgagaggcggggctgatgcatcgcagcagtcctggaccctgacttcggacttggagaagaaacgccgaggaggaacgggagttagggggttagcagcttggcgcgctgggagccggccacccctggtctccggacttcacttcccaggaggcctcgcgcgcgactggaagtgctgcgagcctataagaaggcgaggcggcacccgccgctctgctctggggcggcattgccagccggctgtaggcattcagggcagtgtcttctgcatctcctaggaacctcgggagcggcagctccggcgcctggtagcgagaggcgggttccggagatcccggcctcacttcgtcccactgtggttagggcctggaaactcctccatgcagcgctgcacctgatggccttcgtcctcactgttgtggggctggttgctgtctttacgtttcacaaccatggaaggactgccaacctctactcccttcacagctggctgggcatcaccactgtcttcctcttcgcctgccagtggttcctgggctttgctgtcttcctcctgccctgggcgtccatgtggctgcgcagcctcctaaaacctatccacgtcttttttggagccgccatcctctctctgtccatcgcatccgtcatttcgggcattaatgagaagcttttcttcagtttgaaaaacaccaccaggccataccacagcctgcccagtgaggcggtctttgccaacagcaccgggatgctggtggtggcctttgggctgctggtgctctacatccttctggcttcatcttggaagcgcccagagccggggatcctgaccgacagacagcccctgctgcatgatggggagtgaagcagcaggaaggggctcccaagagctcctggtggtgcagcctgtgctcccctcagaagctctgctcttcccagggctcccggctggtttcagcaggcgactttcttccaatgctgggcccagacttcttgcctgggtgctggcctgccctctccggccgcttgctgcctgtctgctttccttggtggctttgcctgggtgctgggcctgccctctccggccgcttgctgcctgtctgctttccttggtggctttgcctgggtgctgggcctgccttctctggctgcttgctgcctgtctgctttccttggtggctttggcttctgcactccttggcgtcagcctctcaggtcctccattcacacgaggtcctcctcgctctggccgctcttgctgctcctgtctgaagaaatcagactgatttcctcttaagactcctagggatgtggtgaagagctgggactcaagtgcagtccacggtgtgaaacatgagggaggtgaggtgtccgtccacttcccccataaaggtgtgcatttcagttaggctgccccgccacagagcaggcttcatctgctctgccatccagccccatctggatgtgaggtggggtggagacatcatggggtgattgcagaaagggggagtggcggcccacgcagcttctgctgaggagctgaccgctctgagctgttctgtttcgtattgctgctctgtgtctgcatgtattgtgaccgtgcggctccacctcttccagctgctgctacagctgaggcctggatcccggcctttccctgtgacttacgtgtctgtcaccggcaggcagccctacaaatcctggtgacctgctctcccaagaacagagcctgtccccagatgtcccagtagcgatgagtaacagaggtggctgtggacttcctctacttctccttgctggatcagggccttcctgcctcccgctgggcaggtctggccttgctctcttggcagggccccagcccctctgaccactctgcagctcaccatgcagctgatgccaaagttgtggtgtccagtgtgcagcagccctgggagccactgccaccttcagaggggttccttgctgagacccacattgcttcacctggccccaccatggctgcttgcctggcccaacctagcgttctgtgccatgctagagcttgagctgttgctcttcttcaggggaggaaatagggtggagagcgggaagggtcttgctcctaagtgttgctgctgtggcttttttgccttctccaaagacgcactgccaggtcccaagcttcagactgctgtgcttagtaagcaagtgagaagcctggggtttggagcccacctactctctggcagcatcagcatcctactcctggcaacatcaggccaacgtccaccccagcctcacattgccagatgttggcagaagggctaatattgaccgtcttgactggctggagccttcaaagccactgggatgtcctccaggcacctgggtcccatgaccagctccccgtctccataggggtaggcatttcactggtttatgaagctcgagtttcattaaatatgttaagaatcaaa

SEQ ID NO: 284844 - DNA, 2063 bp, Homo sapiens
tagcaggctggtcggccggagtgtagggatctggccgccatgttggagctttcgctgttcggggcccggcctgctccgggccctcccagcgtcgccgctagctgacttagggctcccgcccacactgcgcacggccttgctgagggccggctcgtagtgggaggcttcgcgttcacctgaacatttccgcctcctctggatgggggatgagaggcggggctgatgcatcgcagcagtcctggaccctgacttcggacttggagaagaaacgccgaggaggaacgggagttagggggttagcagcttggcgcgctgggagccggccacccctggtctccggacttcacttcccaggaggcctcgcgcgcgactggaagtgctgcgagcctataagaaggcgaggcggcacccgccgctctgctctggggcggcattgccagccggctgtaggcattcagggcagtgtcttctgcatctcctaggaacctcgggagcggcagctccggcgcctggtagcgagaggcgggttccggagatcccggcctcacttcgtcccactgtggttaggggtgagtcctgcaaatgttaagtgatttgctcaaggtgcccatttcgcaggaattggagcccaggccagttctctgagcctatcattagggctaaaggagtgcgtgatcagaatggtgtctggacggttctacttgtcctgcctgctgctggggtccctgggctctatgtgcatcctcttcactatctactggatgcagtactggcgtggtggctttgcctggaatggcagcatctacatgttcaactggcacccagtgcttatggttgctggcatggtggtattctatggaggtgcgtcactggtgtaccgcctgccccagtcgtgggtggggcccaaactgccctggaaactcctccatgcagcgctgcacctgatggccttcgtcctcactgttgtggggctggttgctgtctttacgtttcacaaccatggaaggactgccaacctctactcccttcacagctggctgggcatcaccactgtcttcctcttcgcctgccagtggttcctgggctttgctgtcttcctcctgccctgggcgtccatgtggctgcgcagcctcctaaaacctatccacgtcttttttggagccgccatcctctctctgtccatcgcatccgtcatttcgggcattaatgagaagcttttcttcagtttgaaaaacaccaccaggccataccacagcctgcccagtgaggcggtctttgccaacagcaccgggatgctggtggtggcctttgggctgctggtgctctacatccttctggcttcatcttggaagcgcccagagccggggatcctgaccgacagacagcccctgctgcatgatggggagtgaagcagcaggaaggggctcccaagagctcctggtggtgcagcctgtgctcccctcagaagctctgctcttcccagggctcccggctggtttcagcaggcgactttcttccaatgctgggcccagacttcttgcctgggtgctggcctgccctctccggccgcttgctgcctgtctgctttccttggtggctttgcctgggtgctgggcctgccctctccggccgcttgctgcctgtctgctttccttggtggctttgcctgggtgctgggcctgccttctctggctgcttgctgcctgtctgctttccttggtggctttggcttctgcactccttggcgtcagcctctcaggtcccaagcttcagactgctgtgcttagtaagcaagtgagaagcctggggtttggagcccacctactctctggcagcatcagcatcctactcctggcaacatcaggccaacgtccaccccagcctcacattgccagatgttggcagaagggctaatattgaccgtcttgactggctggagccttcaaagccactgggatgtcctccaggcacctgggtcccatgaccagctccccgtctccataggggtaggcatttcactggtttatgaagctcgagtttcattaaatatgttaagaatcaaa

SEQ ID NO: 284845 - DNA, 1830 bp, Homo sapiens
  misc_feature (52)..(52): n is a, c, g, or t
gggtcactttcagcgcgcacttacatgaagaacgcctctcttcgtctcagcntttgaaaaacaccaccaggccataccacagcctgcccagtgaggcggtctttgccaacagcaccgggatgctggtggtggcctttgggctgctggtgctctacatccttctggcttcatcttggaagcgcccagagccggggatcctgaccgacagacagcccctgctgcatgatggggagtgaagcagcaggaaggggctcccaagagctcctggtggtgcagcctgtgctcccctcagaagctctgctcttcccagggctcccggctggtttcagcaggcgactttcttccaatgctgggcccagacttcttgcctgggtgctggcctgccctctccggccgcttgctgcctgtctgctttccttggtggctttgcctgggtgctgggcctgccctctccggccgcttgctgcctgtctgctttccttggtggctttgcctgggtgctgggcctgccttctctggctgcttgctgcctgtctgctttccttggtggctttggcttctgcactccttggcgtcagcctctcaggtcctccattcacacgaggtcctcctcgctctggccgctcttgctgctcctgtctgaagaaatcagactgatttcctcttaagactcctagggatgtggtgaagagctgggactcaagtgcagtccacggtgtgaaacatgagggaggtgaggtgtccgtccacttcccccataaaggtgtgcatttcagttaggctgccccgccacagagcaggcttcatctgctctgccatccagccccatctggatgtgaggtggggtggagacatcatggggtgattgcagaaagggggagtggcggcccacgcagcttctgctgaggagctgaccgctctgagctgttctgtttcgtattgctgctctgtgtctgcatgtattgtgaccgtgcggctccacctcttccagctgctgctacagctgaggcctggatcccggcctttccctgtgacttacgtgtctgtcaccggcaggcagccctacaaatcctggtgacctgctctcccaagaacagagcctgtccccagatgtcccagtagcgatgagtaacagaggtggctgtggacttcctctacttctccttgctggatcagggccttcctgcctcccgctgggcaggtctggccttgctctcttggcagggccccagcccctctgaccactctgcagctcaccatgcagctgatgccaaagttgtggtgtccagtgtgcagcagccctgggagccactgccaccttcagaggggttccttgctgagacccacattgcttcacctggccccaccatggctgcttgcctggcccaacctagcgttctgtgccatgctagagcttgagctgttgctcttcttcaggggaggaaatagggtggagagcgggaagggtcttgctcctaagtgttgctgctgtggcttttttgccttctccaaagacgcactgccaggtcccaagcttcagactgctgtgcttagtaagcaagtgagaagcctggggtttggagcccacctactctctggcagcatcagcatcctactcctggcaacatcaggccaacgtccaccccagcctcacattgccagatgttggcagaagggctaatattgaccgtcttgactggctggagccttcaaagccactgggatgtcctccaggcacctgggtcccatgaccagctccccgtctccataggggtaggcatttcactggtttatgaagctcgagtttcattaaatatgttaagaatcaaa

SEQ ID NO: 284846 - DNA, 1913 bp, Homo sapiens
aagaaagggtgttaaaattctagatcacatatggacccgggaaggttttctcaccctctgttagtgacatcgagtctcccactagacaaaataggtggaaaaatctctcgagggctcacattgttttgtcatcttcaggaaaaacaccaccaggccataccacagcctgcccagtgaggcggtctttgccaacagcaccgggatgctggtggtggcctttgggctgctggtgctctacatccttctggcttcatcttggaagcgcccagagccggggatcctgaccgacagacagcccctgctgcatgatggggagtgaagcagcaggaaggggctcccaagagctcctggtggtgcagcctgtgctcccctcagaagctctgctcttcccagggctcccggctggtttcagcaggcgactttcttccaatgctgggcccagacttcttgcctgggtgctggcctgccctctccggccgcttgctgcctgtctgctttccttggtggctttgcctgggtgctgggcctgccctctccggccgcttgctgcctgtctgctttccttggtggctttgcctgggtgctgggcctgccttctctggctgcttgctgcctgtctgctttccttggtggctttggcttctgcactccttggcgtcagcctctcaggtcctccattcacacgaggtcctcctcgctctggccgctcttgctgctcctgtctgaagaaatcagactgatttcctcttaagactcctagggatgtggtgaagagctgggactcaagtgcagtccacggtgtgaaacatgagggaggtgaggtgtccgtccacttcccccataaaggtgtgcatttcagttaggctgccccgccacagagcaggcttcatctgctctgccatccagccccatctggatgtgaggtggggtggagacatcatggggtgattgcagaaagggggagtggcggcccacgcagcttctgctgaggagctgaccgctctgagctgttctgtttcgtattgctgctctgtgtctgcatgtattgtgaccgtgcggctccacctcttccagctgctgctacagctgaggcctggatcccggcctttccctgtgacttacgtgtctgtcaccggcaggcagccctacaaatcctggtgacctgctctcccaagaacagagcctgtccccagatgtcccagtagcgatgagtaacagaggtggctgtggacttcctctacttctccttgctggatcagggccttcctgcctcccgctgggcaggtctggccttgctctcttggcagggccccagcccctctgaccactctgcagctcaccatgcagctgatgccaaagttgtggtgtccagtgtgcagcagccctgggagccactgccaccttcagaggggttccttgctgagacccacattgcttcacctggccccaccatggctgcttgcctggcccaacctagcgttctgtgccatgctagagcttgagctgttgctcttcttcaggggaggaaatagggtggagagcgggaagggtcttgctcctaagtgttgctgctgtggcttttttgccttctccaaagacgcactgccaggtcccaagcttcagactgctgtgcttagtaagcaagtgagaagcctggggtttggagcccacctactctctggcagcatcagcatcctactcctggcaacatcaggccaacgtccaccccagcctcacattgccagatgttggcagaagggctaatattgaccgtcttgactggctggagccttcaaagccactgggatgtcctccaggcacctgggtcccatgaccagctccccgtctccataggggtaggcatttcactggtttatgaagctcgagtttcattaaatatgttaagaatcaaa

SEQ ID NO: 284847 - DNA, 1543 bp, Homo sapiens
tagcaggctggtcggccggagtgtagggatctggccgccatgttggagctttcgctgttcggggcccggcctgctccgggccctcccagcgtcgccgctagctgacttagggctcccgcccacactgcgcacggccttgctgagggccggctcgtagtgggaggcttcgcgttcacctgaacatttccgcctcctctggatgggggatgagaggcggggctgatgcatcgcagcagtcctggaccctgacttcggacttggagaagaaacgccgaggaggaacgggagttagggggttagcagcttggcgcgctgggagccggccacccctggtctccggacttcacttcccaggaggcctcgcgcgcgactggaagtgctgcgagcctataagaaggcgaggcggcacccgccgctctgctctggggcggcattgccagccggctgtaggcattcagggcagtgtcttctgcatctcctaggaacctcgggagcggcagctccggcgcctggtagcgagaggcgggttccggagatcccggcctcacttcgtcccactgtggttaggggtgagtcctgcaaatgttaagtgatttgctcaaggtgcccatttcgcaggaattggagcccaggccagttctctgagcctatcattagggctaaaggagtgcgtgatcagaatggtgtctggacggttctacttgtcctgcctgctgctggggtccctgggctctatgtgcatcctcttcactatctactggatgcagtactggcgtggtggctttgcctggaatggcagcatctacatgttcaactggcacccagtgcttatggttgctggcatggtggtattctatggaggtgcgtcactggtgtaccgcctgccccagtcgtgggtggggcccaaactgccctggaaactcctccatgcagcgctgcacctgatggccttcgtcctcactgttgtggggctggttgctgtctttacgtttcacaaccatggaaggactgccaacctctactcccttcacagctggctgggcatcaccactgtcttcctcttcgcctgccagtggttcctgggctttgctgtcttcctcctgccctgggcgtccatgtggctgcgcagcctcctaaaacctatccacgtcttttttggagccgccatcctctctctgtccatcgcatccgtcatttcgggcattaatgagaagcttttcttcagtttgtgagtgcagtggggtccccaactctaaggtgaagaggagggaatagggtcttcaaaagatacaccctgtgatcacaggactcacccaagggaggagagattttggggttgggtccactcctgatctggaaggtaacagaattgatctttctttaggttgaaattggtaagtcagcagatatttattgagcatcagtttgatttagcacctgctgtgtgtcagaaacagtactaagcaccttacatttaatcctgtcaaccaccctacatcattggtattgattggtattgttgtcattgccattttcttttttc

SEQ ID NO: 284848 - DNA, 1137 bp, Homo sapiens
tagcaggctggtcggccggagtgtagggatctggccgccatgttggagctttcgctgttcggggcccggcctgctccgggccctcccagcgtcgccgctagctgacttagggctcccgcccacactgcgcacggccttgctgagggccggctcgtagtgggaggcttcgcgttcacctgaacatttccgcctcctctggatgggggatgagaggcggggctgatgcatcgcagcagtcctggaccctgacttcggacttggagaagaaacgccgaggaggaacgggagttagggggttagcagcttggcgcgctgggagccggccacccctggtctccggacttcacttcccaggaggcctcgcgcgcgactggaagtgctgcgagcctataagaaggcgaggcggcacccgccgctctgctctggggcggcattgccagccggctgtaggcattcagggcagtgtcttctgcatctcctaggaacctcgggagcggcagctccggcgcctggtagcgagaggcgggttccggagatcccggcctcacttcgtcccactgtggttaggggtgagtcctgcaaatgttaagtgatttgctcaaggtgcccatttcgcaggaattggagcccaggccagttctctgagcctatcattagggctaaaggagtgcgtgatcagaatggtgtctggacggttctacttgtcctgcctgctgctggggtccctgggctctatgtgcatcctcttcactatctactggatgcagtactggcgtggtggctttgcctggaatggcagcatctacatgttcaactggcacccagtgcttatggttgctggcatggtggtattctatggaggtgcgtcactggtgtaccgcctgccccagtcgtgggtggggcccaaactgccctggaaactcctccatgcagcgctgcacctgatggccttcgtcctcacattgccagatgttggcagaagggctaatattgaccgtcttgactggctggagccttcaaagccactgggatgtcctccaggcacctgggtcccatgaccagctccccgtctccataggggtaggcatttcactggtttatgaagctcgagtttcattaaatatgttaagaatcaaa

SEQ ID NO: 284849 - DNA, 1787 bp, Homo sapiens
tagcaggctggtcggccggagtgtagggatctggccgccatgttggagctttcgctgttcggggcccggcctgctccgggccctcccagcgtcgccgctagctgacttagggctcccgcccacactgcgcacggccttgctgagggccggctcgtagtgggaggcttcgcgttcacctgaacatttccgcctcctctggatgggggatgagaggcggggctgatgcatcgcagcagtcctggaccctgacttcggacttggagaagaaacgccgaggaggaacgggagttagggggttagcagcttggcgcgctgggagccggccacccctggtctccggacttcacttcccaggaggcctcgcgcgcgactggaagtgctgcgagcctataagaaggcgaggcggcacccgccgctctgctctggggcggcattgccagccggctgtaggcattcagggcagtgtcttctgcatctcctaggaacctcgggagcggcagctccggcgcctggtagcgagaggcgggttccggagatcccggcctcacttcgtcccactgtggttaggggtgagaaggatcccggggctgggagttcagggacctgggttcgaatgctggttccgctgctatctcgcttcgcactgtcgcgatccccttgctcggcctcaattttctcttttagaaagtgggcacctttctccgcgctcttccttccaacgcggtggttataaaggcacgaaagctcttcagaggacgcagaaagcacctggagctcctcaccccaattttcacccattgttagctggcacgagcacccagcagaggagtcagggatcacccctcgggtgcctggaacggttctttggacacctgagccggacctaggcacagcctgaagtcggggtctataattattccggtgctaaggggtaacttgttcacctacctccttggcaggaatattgagcccttcactcctgatgttccgactttaacagaagctacctttgagaataaggaatcctcagagctgagagggagtggacccgaattcctgtaccagctcggccacttaccttggctaagtcattttcttgttttgggccccagtgtcacagtgtttttgatttgtaagatgagggtttagggcttgtatcctaaatctggtcctcaagattcttgaagtcccccagtccatcggggagggagagcaacaaactgattttctaccccttcatttatttgtagttctaaattataaaagtaacactgcaagagtttggagtagagcctttttctttttctttctttttttttttctgagacagagtctcactctgtcgcccaggctggaatgcagtggcacgatctcggctcactgcaacctccgcctcccgggttcaagcgattcccctgcctcagcctcccaagtagctgggattacaggcgcccgctaccgcgcccggctaatttttgtatttttagtagagacggggtttctccatgttggtcaggctggtctcgaactcctgacctcatgtgatccgcccgcctcggcttcccaaagtgctgggattacaggcgtgagctaccgcgcccagcctgcgtagagcctttttctaagactaagggctggatgggaactagcatttcttacccctggatgtgacctgttttagctcagccgggagaatcctttttcgcaagaagttaataatatcttgtgacgtgaaaattatgtgaaactcagacttcagtgtccataaataaatattactggaacac

SEQ ID NO: 284850 - DNA, 451 bp, Homo sapiens
atacaaatgacaaggagaggggggttatggagccacagctggaaggagtctggtccttgaatcaccatttggagaaaaaacctgcagatgatcccatcctgcctgcacagcttctccaggggagatagacacacagaagcccacgagagtcaaataagagccataccttccaggtctccatgacacagacatcctccaccacacctgttaagaaagtcgaaatcgtcactgccacccacactggggttctgctttcctgattacacctttctcatctctatcacctatgccaggaacccaaacccaagtcttcccagctgtgtgcagaatcacagtggccacaccaagacaacaggtggggtcaatgtcacagcccattaggctgcatctgtgtccactggctccctcatcaaccacacaaaacaaaacagagactacacaacaatctact

SEQ ID NO: 284851 - DNA, 309 bp, Homo sapiens
tgaggacagcaacactctgtatcctgggtcacatttgtggctgaggcacgcccttaattccaagagacagggtcttgcaatcttgaatgactggctgaagtgatcctcctgcattggcctcccaaggtgctgggattacagcagcccccacaacctgccagacacccctgagttggaagaaacctcagagaacagttgtgtgccctcattctgcagaggaaaagactggggagccccagagaggagatgcttccacacaggcttgccctgtggctgtttaagccctacccaagccctctgggcattctt

SEQ ID NO: 284852 - DNA, 6356 bp, Homo sapiens
ctcttatgtgaggagctgaagaggaattaaaatatacaggatgaaaagatggcaatgttgcctcccccaggacctcagagctttgtccatttcacaaaacagtctcttgccctcattgaacaacgcattgctgaaagaaaatcaaaggaacccaaagaagaaaagaaagatgatgatgaagaagccccaaagccaagcagtgacttggaagctggcaaacaactgcccttcatctatggggacattcctcccggcatggtgtcagagcccctggaggacttggacccctactatgcagacaaaaagactttcatagtattgaacaaagggaaaacaatcttccgtttcaatgccacacctgctttatatatgctttctcctttcagtcctctaagaagaatatctattaagattttagtacactccttattcagcatgctcatcatgtgcactattctgacaaactgcatatttatgaccatgaataacccgccggactggaccaaaaatgtcgagtacacttttactggaatatatacttttgaatcacttgtaaaaatccttgcaagaggcttctgtgtaggagaattcacttttcttcgtgacccgtggaactggctggattttgtcgtcattgtttttgcgtatttaacagaatttgtaaacctaggcaatgtttcagctcttcgaactttcagagtattgagagctttgaaaactatttctgtaatcccaggcctgaagacaattgtaggggctttgatccagtcagtgaagaagctttctgatgtcatgatcctgactgtgttctgtctgagtgtgtttgcactaattggactacagctgttcatgggaaacctgaagcataaatgttttcgaaattcacttgaaaataatgaaacattagaaagcataatgaataccctagagagtgaagaagactttagaaaatatttttattacttggaaggatccaaagatgctctcctttgtggtttcagcacagattcaggtcagtgtccagaggggtacacctgtgtgaaaattggcagaaaccctgattatggctacacgagctttgacactttcagctgggccttcttagccttgtttaggctaatgacccaagattactgggaaaacctttaccaacagacgctgcgtgctgctggcaaaacctacatgatcttctttgtcgtagtgattttcctgggctccttttatctaataaacttgatcctggctgtggttgccatggcatatgaagaacagaaccaggcaaacattgaagaagctaaacagaaagaattagaatttcaacagatgttagaccgtcttaaaaaagagcaagaagaagctgaggcaattgcagcggcagcggctgaatatacaagtattaggagaagcagaattatgggcctctcagagagttcttctgaaacatccaaactgagctctaaaagtgctaaagaaagaagaaacagaagaaagaaaaagaatcaaaagaagctctccagtggagaggaaaagggagatgctgagaaattgtcgaaatcagaatcagaggacagcatcagaagaaaaagtttccaccttggtgtcgaagggcataggcgagcacatgaaaagaggttgtctacccccaatcagtcaccactcagcattcgtggctccttgttttctgcaaggcgaagcagcagaacaagtctttttagtttcaaaggcagaggaagagatataggatctgagactgaatttgccgatgatgagcacagcatttttggagacaatgagagcagaaggggctcactgtttgtgccccacagaccccaggagcgacgcagcagtaacatcagccaagccagtaggtccccaccaatgctgccggtgaacgggaaaatgcacagtgctgtggactgcaacggtgtggtctccctggttgatggacgctcagccctcatgctccccaatggacagcttctgccagagggcacgaccaatcaaatacacaagaaaaggcgttgtagttcctatctcctttcagaggatatgctgaatgatcccaacctcagacagagagcaatgagtagagcaagcatattaacaaacactgtggaagaacttgaagagtccagacaaaaatgtccaccttggtggtacagatttgcacacaaattcttgatctggaattgctctccatattggataaaattcaaaaagtgtatctattttattgtaatggatccttttgtagatcttgcaattaccatttgcatagttttaaacacattatttatggctatggaacaccacccaatgactgaggaattcaaaaatgtacttgctataggaaatttggtctttactggaatctttgcagctgaaatggtattaaaactgattgccatggatccatatgagtatttccaagtaggctggaatatttttgacagccttattgtgactttaagtttagtggagctctttctagcagatgtggaaggattgtcagttctgcgatcattcagactgctccgagtcttcaagttggcaaaatcctggccaacattgaacatgctgattaagatcattggtaactcagtaggggctctaggtaacctcaccttagtgttggccatcatcgtcttcatttttgctgtggtcggcatgcagctctttggtaagagctacaaagaatgtgtctgcaagatcaatgatgactgtacgctcccacggtggcacatgaacgacttcttccactccttcctgattgtgttccgcgtgctgtgtggagagtggatagagaccatgtgggactgtatggaggtcgctggtcaagctatgtgccttattgtttacatgatggtcatggtcattggaaacctggtggtcctaaacctatttctggccttattattgagctcatttagttcagacaatcttacagcaattgaagaagaccctgatgcaaacaacctccagattgcagtgactagaattaaaaagggaataaattatgtgaaacaaaccttacgtgaatttattctaaaagcattttccaaaaagccaaagatttccagggagataagacaagcagaagatctgaatactaagaaggaaaactatatttctaaccatacacttgctgaaatgagcaaaggtcacaatttcctcaaggaaaaagataaaatcagtggttttggaagcagcgtggacaaacacttgatggaagacagtgatggtcaatcatttattcacaatcccagcctcacagtgacagtgccaattgcacctggggaatccgatttggaaaatatgaatgctgaggaacttagcagtgattcggatagtgaatacagcaaagtgagattaaaccggtcaagctcctcagagtgcagcacagttgataaccctttgcctggagaaggagaagaagcagaggctgaacctatgaattccgatgagccagaggcctgtttcacagatggttgtgtacggaggttctcatgctgccaagttaacatagagtcagggaaaggaaaaatctggtggaacatcaggaaaacctgctacaagattgttgaacacagttggtttgaaagcttcattgtcctcatgatcctgctcagcagtggtgccctggcttttgaagatatttatattgaaaggaaaaagaccattaagattatcctggagtatgcagacaagatcttcacttacatcttcattctggaaatgcttctaaaatggatagcatatggttataaaacatatttcaccaatgcctggtgttggctggatttcctaattgttgatgtttctttggttactttagtggcaaacactcttggctactcagatcttggccccattaaatcccttcggacactgagagctttaagacctctaagagccttatctagatttgaaggaatgagggtcgttgtgaatgcactcataggagcaattccttccatcatgaatgtgctacttgtgtgtcttatattctggctgatattcagcatcatgggagtaaatttgtttgctggcaagttctatgagtgtattaacaccacagatgggtcacggtttcctgcaagtcaagttccaaatcgttccgaatgttttgcccttatgaatgttagtcaaaatgtgcgatggaaaaacctgaaagtgaactttgataatgtcggacttggttacctatctctgcttcaagttgcaacttttaagggatggacgattattatgtatgcagcagtggattctgttaatgtagacaagcagcccaaatatgaatatagcctctacatgtatatttattttgtcgtctttatcatctttgggtcattcttcactttgaacttgttcattggtgtcatcatagataatttcaaccaacagaaaaagaagcttggaggtcaagacatctttatgacagaagaacagaagaaatactataatgcaatgaaaaagctggggtccaagaagccacaaaagccaattcctcgaccagggaacaaaatccaaggatgtatatttgacctagtgacaaatcaagcctttgatattagtatcatggttcttatctgtctcaacatggtaaccatgatggtagaaaaggagggtcaaagtcaacatatgactgaagttttatattggataaatgtggtttttataatccttttcactggagaatgtgtgctaaaactgatctccctcagacactactacttcactgtaggatggaatatttttgattttgtggttgtgattatctccattgtaggtatgtttctagctgatttgattgaaacgtattttgtgtcccctaccctgttccgagtgatccgtcttgccaggattggccgaatcctacgtctagtcaaaggagcaaaggggatccgcacgctgctctttgctttgatgatgtcccttcctgcgttgtttaacatcggcctcctgctcttcctggtcatgttcatctacgccatctttggaatgtccaactttgcctatgttaaaaaggaagatggaattaatgacatgttcaattttgagacctttggcaacagtatgatttgcctgttccaaattacaacctctgctggctgggatggattgctagcacctattcttaacagtaagccacccgactgtgacccaaaaaaagttcatcctggaagttcagttgaaggagactgtggtaacccatctgttggaatattctactttgttagttatatcatcatatccttcctggttgtggtgaacatgtacattgcagtcatactggagaattttagtgttgccactgaagaaagtactgaacctctgagtgaggatgactttgagatgttctatgaggtttgggagaagtttgatcccgatgcgacccagtttatagagttctctaaactctctgattttgcagctgccctggatcctcctcttctcatagcaaaacccaacaaagtccagctcattgccatggatctgcccatggttagtggtgaccggatccattgtcttgacatcttatttgcttttacaaagcgtgttttgggtgagagtggggagatggattctcttcgttcacagatggaagaaaggttcatgtctgcaaatccttccaaagtgtcctatgaacccatcacaaccacactaaaacggaaacaagaggatgtgtctgctactgtcattcagcgtgcttatagacgttaccgcttaaggcaaaatgtcaaaaatatatcaagtatatacataaaagatggagacagagatgatgatttactcaataaaaaagatatggcttttgataatgttaatgagaactcaagtccagaaaaaacagatgccacttcatccaccacctctccaccttcatatgatagtgtaacaaagccagacaaagagaaatatgaacaagacagaacagaaaaggaagacaaagggaaagacagcaaggaaagcaaaaaatagagcttcatttttgatatattgtttacagcctgtgaaagtgatttatttgtgttaataaaactcttttgaggaagtctatgccaaaatcctttttatcaaaatattctcgaaggcagtgcagtcactaactctgatttcctaagaaaggtgggcagcattagcagatggttatttttgcactgatgattctttaagaatcgtaagagaactctgtaggaattattgattatagcatacaaaagtgattgattcagttttttggtttttaataaatcagaagaccatgtagaaaacttttacatctgccttgtcatcttttcacaggattgtaattagtcttgtttcccatgtaaataaacaacacacgcatacag

SEQ ID NO: 284853 - DNA, 1874 bp, Homo sapiens
aggtagcatacatctttaaatattttatttctattattttcctccacatacaggtatgtttctagctgatttgattgaaacgtattttgtgtcccctaccctgttccgagtgatccgtcttgccaggattggccgaatcctacgtctagtcaaaggagcaaaggggatccgcacgctgctctttgctttgatgatgtcccttcctgcgttgtttaacatcggcctcctgctcttcctggtcatgttcatctacgccatctttggaatgtccaactttgcctatgttaaaaaggaagatggaattaatgacatgttcaattttgagacctttggcaacagtatgatttgcctgttccaaattacaacctctgctggctgggatggattgctagcacctattcttaacagtaagccacccgactgtgacccaaaaaaagttcatcctggaagttcagttgaaggagactgtggtaacccatctgttggaatattctactttgttagttatatcatcatatccttcctggttgtggtgaacatgtacattgcagtcatactggagaattttagtgttgccactgaagaaagtactgaacctctgagtgaggatgactttgagatgttctatgaggtttgggagaagtttgatcccgatgcgacccagtttatagagttctctaaactctctgattttgcagctgccctggatcctcctcttctcatagcaaaacccaacaaagtccagctcattgccatggatctgcccatggttagtggtgaccggatccattgtcttgacatcttatttgcttttacaaagcgtgttttgggtgagagtggggagatggattctcttcgttcacagatggaagaaaggttcatgtctgcaaatccttccaaagtgtcctatgaacccatcacaaccacactaaaacggaaacaagaggatgtgtctgctactgtcattcagcgtgcttatagacgttaccgcttaaggcaaaatgtcaaaaatatatcaagtatatacataaaagatggagacagagatgatgatttactcaataaaaaagatatggcttttgataatgttaatgagaactcaagtccagaaaaaacagatgccacttcatccaccacctctccaccttcatatgatagtgtaacaaagccagacaaagagaaatatgaacaagacagaacagaaaaggaagacaaagggaaagacagcaaggaaagcaaaaaatagagcttcatttttgatatattgtttacagcctgtgaaagtgatttatttgtgttaataaaactcttttgaggaagtctatgccaaaatcctttttatcaaaatattctcgaaggcagtgcagtcactaactctgatttcctaagaaaggtgggcagcattagcagatggttatttttgcactgatgattctttaagaatcgtaagagaactctgtaggaattattgattatagcatacaaaagtgattgattcagttttttggtttttaataaatcagaagaccatgtagaaaacttttacatctgccttgtcatcttttcacaggattgtaattagtcttgtttcccatgtaaataaacaacacacgcatacagaaaaatctattatttatctattatttggaaatcaacaaaagtatttgccttggctttgcaatgaaatgcttgatagaagtaatggacattagttatgaatgtttagttaaaatgcattattagggagcttgactttttatcaatgtacagaggttattctatattttgaggtgcttaaatttattctacattgcatcagaaccaatttatatgtgcctataaaatgccatgggattaaaaatatatgtaggcta

SEQ ID NO: 284854 - DNA, 926 bp, Homo sapiens
tctcaacaacagttgctatactactcttaccaaagtggttttcctatgtacttctcaacagatcggccctttcttcaaataagagcagttggaacaacaaaagctgttcagttgtacccttggaatccacggaaatcctgggtagggaagctccagtaccaccaactggaaagactgggaatgcctagtagctggtactggccattgtcgtaggctttgtccactttgacaaactgaagacggggactcgactcaccttcgccagccacaggaggacctccagacgaggttaggtcgacttcatggtaactttagatcttgaaacctcacaggatttttcttctcttccccttgatctctcttccgcttactcaacaggaccggactcgccgcctttctttcccgtcagaaagggatcccttgcggacaagaccgaagtgagtagctggtttcccctacgtgtccttccggggctgggtgtctcgggagctcaggctgacaggagacctaactaccggcgactgagaccagcaggagcctggaggggcgcgcaccagggtggaggtttggtgccgggggttgagaacaacagtcaaaccctcttcttccctgtaccgcgcacctgccccctgggatgccgaacgaagtggcccctaaggcttctctgcaggtccaaccgaaacaggcctgaagttccaggatgggcgagaggatcctctttgagcgaaaccagccttctgcctggctggccctggtcaacacactcggaagaggccgatttggaggacagaacggaagaaaagacctaaaatatcgtaaacaggctatgagtccaccgtggatcgtaatagctaggggtggagagatcgttgctattactccccttattgcggggggtgcctcacccccctgagatgtggatcgtg

SEQ ID NO: 284855 - DNA, 1191 bp, Homo sapiens
accgatgccacttgctggacaagatgaacgaaaattcttcttgtataggtctttttgtggacacgtgcattcatttcccttgaggaataccaagtactggaattgttggatcataggatcggccctttcttcaaataagagcagttggaacaacaaaagctgttcagttgtacccttggaatccacggaaatcctgggtagggaagctccagtaccaccaactggaaagactgggaatgcctagtagctggtactggccattgtcgtaggctttgtccactttgacaaactgaagacggggactcgactcaccttcgccagccacaggaggacctccagacgaggaccggactcgccgcctttctttcccgtcagaaagggatcccttgcggacaagaccgaagtgagtagctggtttcccctacgtgtccttccggggctgggtgtctcgggagctcaggctgacaggagacctaactaccggcgactgagaccagcaggagcctggaggggcgcgcaccagggtggaggtttggtgccgggggttgagaacaacagtcaaaccctcttcttccctgtaccgcgcacctgccccctgggatgccgaacgaagtggcccctaaggcttctctgcaggtccaaccgaaacaggcctgaagttccaggatgggcgagaggatcctctttgagcgaaaccagccttctgcctggctggccctggtcaacacactcggaagaggccgatttggaggacagaacggaagaaaagacctaatagatgatcctcatccaatcacttaaaggcctgaatagaaccaaaagtctgacctgcccatgagtaagagagagctccttctgcctgattgcttcagctgagatatcagccttttcctgcctttggaattgaactgcaacactggctctttctgggcctcaagcctgccagcttttgagctgtaatcacaccatcatctctcctggttctcaggcctttggactcaaatcagaaacacaccatgggctctcctgtgtctcaagcttgccaactgtgatcttgagacttctcagcctccataatcacatgagtcaattgttggttctgtttctctggagaaccctaatccatcactttacatatttcttccattacacatattgtttcccagcatattaaataatttactgattata

SEQ ID NO: 284856 - DNA, 338 bp, Homo sapiens
ggcgagaggatcctctttgagcgaaaccagccttctgcctggctggccctggtcaacacactcggaagaggccgatttggaggacagaacggaagaaaagacctaaaaggtagaatctcatgatgtcgagatgttaaaaccctcaaatttttccaaatatgcagggggggaaagaggataataatattcccaatatcgcaagagttatacacccccgcgtgaaatggtccttaataatattccaaggcggaggggatgatgttactacatatatcgcagaaagtgtacaccccccagggatattattcccatgatcctggagggaagaggatattact

SEQ ID NO: 284857 - DNA, 720 bp, Homo sapiens
aacctagagtgacttcccttacccttatttagatctgcatatatagttctagtatgaagtttaatagttaaggagttagctatttgttatctttaagagtagggtattgacgtgaacaattgcagtattttgcatgatactgttttatagatgaccttttaggaaagtggtgcatttattaattgaactgaagaagtagttcagttgaattcagtatcataattcacaaattggaggctgttgattttgattcatttaaggtttaaaatctttattaattgcaaacagtgcaattatttatacttcacagtgccttcccagaccttccaccttaggttctgctgcaaaaagcaccagtgctgaagatgctgcaagcaccaaatcatagctcataaaatcaggtcctgagatagttacccataaagaggaatcctttgagtgtatgccattggtgagccgatgagcatggaccatagaagggctcaatgtagaagaaactacccgtgtgtaaaaagaagattggcttaaaatggctactgtgatgggaacagtgtcttagggagatgcagcttggacttgaggtaaattgaatactttacaactgtggtttagagtttgctttaatgacattgtatgtaaaaggtcacatgattgctgtaattttgtattcattatggtttcctcaataaatgtacattgatgactattaaaaaaaaaaac

SEQ ID NO: 284858 - DNA, 489 bp, Homo sapiens
agccaccaccatttatattaaccactttttctttcttaaaggattcactcctgaattagctccatttcaaggattttctttaactttttgtgtatttcttatgtatctcttctgcacagggccaataataagaagtggacaatacagtatttgcttcattgtgtgggggaaaaaaacctttgttaaatatatggatgcagacgacttgatgaagatcttaattttgtttttggtttaaaatagtgtttccttttttttttttttttttgaaaatgtacaaaatatctatcactactgataggaggttaatatttctgtgtagaaatgaaaattggtttgtttttagtatttagtgtagatgtacacattccagcaaatgtatttgcaattatgtggttgatgctttgtgatataaatgtactttttcaatgtatactttcacttttaaaatgcctgttttgtgctttacaataaatgatatgaaacctc

SEQ ID NO: 284859 - DNA, 483 bp, Homo sapiens
  misc_feature (2)..(2): n is a, c, g, or t
cntgtatgttaactacaactcaaactaatggacaaggagatcagcagaatccagccccagctggacaggttgattataccaaggcttgggaagagtactacaagaaaatgggtcaggcagttcctgctccgactggggctcctccaggtggtcagccagattatagtgcagcctgggctgagtattatagacaacaagcagcctattatgcccagacaagtccccagggaatgccacagcatcctccagcacctcagaaactacccgtgtgtaaaaagaagattggcttaaaatggctactgtgatgggaacagtgtcttagggagatgcagcttggacttgaggtaaattgaatactttacaactgtggtttagagtttgctttaatgacattgtatgtaaaaggtcacatgattgctgtaattttgtattcattatggtttcctcaataaatgtacattgatgactattaaaaaaaaaaac

SEQ ID NO: 284860 - DNA, 443 bp, Homo sapiens
gatgagccggaccaacaaccggacaaggagatcagcagaatccagccccagctggacaggttgattataccaaggcttgggaagagtactacaagaaaatgggtcaggcagttcctgctccgactggggctcctccaggtggtcagccagattatagtgcagcctgggctgagtattatagacaacaagcagcctattatgcccagacaagtccccagggaatgccacagcatcctccagcacctcaggtataatgtaattgctaatttgttgatttctactccagtctgttttctgcatgtttactgtttgtctgtttgggagtgtttgccttttaaatttttatctggcaaagtataataactatttaaatgaagtactacggtgtattgtttgggtttttttgttttttataatgctttccagcatctgagtggtgaata

SEQ ID NO: 284861 - DNA, 471 bp, Homo sapiens
  misc_feature (455)..(455): n is a, c, g, or t
gcaccgtggtatgtttgttgtctccagatgccacttcagaaagatacctaaaataatctcctttcattttcaagtagaacaccttactttctggttgtgtagcattgggaataagatatttgtccaacagctccagaacatcattgcagatgtcctgcagttctgcctctatcttctcacggtactctttgcccatctgctgcttcttctcattcctctctgttttctgctcaatgctggagatgacacgccaggaagagcggcgggcgcctaccacattcttgtaggcaacagagagcccggcagattgcagcaaaaattggaggtgatgcagggacatcactgaattcaaatgactatggttatgggggacaaaaaagacctttagaagatggagatcaaccagatgctaagaaagttgctcctcaaaatgactcttttggaacacagtaccncgtgctataaaacggt

SEQ ID NO: 284862 - DNA, 458 bp, Homo sapiens
  misc_feature (33)..(33): n is a, c, g, or t
  misc_feature (36)..(36): n is a, c, g, or t
cccgtgttacgacctctagtacggatccccagncgntgacagtggtggccttccagaaaggtcctgtatgttaactggaacacctgaatctgtccagtaagtttgaaaaatcttaaaaatctacttaagtaactacagcagaactctttgaattttgtctcttctctttgttactgctttattttacactgtggtttcgctgccaccttccctcaaagtcctccaactcctttgaagtttatgcctcatgcctttctcaggtggggttcatcatctgaatcattaaacacagaaaatggttaaaacaactccatatctactccagtctctacttgtaaagccacgtgtagcctggagaagaatgcacagtcaggtcgactggtgacacttaaaactcagacattaagctcaagtggactgttgtgttgcctgcatttccctagttccattcacttttc

SEQ ID NO: 284863 - DNA, 5884 bp, Homo sapiens
ggtaatagagcttcgacggcgacggccgccattttctttctttcttagctgttagctgagaggaagtctctgaacaggcggcagcggctcttatagtgcaaccatggcagactattcaacagtgcctcccccctcttctggctcagctggtggcggtggtggcggcggtggtggtggaggagttaacgacgctttcaaagatgcactgcagagagcccggcagattgcagcaaaaattggaggtgatgcagggacatcactgaattcaaatgactatggttatgggggacaaaaaagacctttagaagatggagatcaaccagatgctaagaaagttgctcctcaaaatgactcttttggaacacagttaccaccgatgcatcagcagcaaagcagatctgtaatgacagaagaatacaaagttccagatggaatggttggattcataattggcagaggaggtgaacagatctcacgcatacaacaggaatctggatgcaaaatacagatagctcctgacagtggtggccttccagaaaggtcctgtatgttaactggaacacctgaatctgtccagtcagcaaaacggttactggaccagattgttgaaaaaggaagaccagctcctggcttccatcatggcgatggaccgggaaatgcagttcaagaaatcatgattccagctagcaaggcaggattagtcattggaaaagggggagaaactattaaacagcttcaggaacgggctggagttaaaatggttatgattcaagacgggccgcagaacactggtgctgacaaacctcttaggattacaggagacccatataaagttcaacaagccaaggaaatggtgttagagttaattcgtgatcaaggcggtttcagagaagttcggaatgagtatgggtcaagaataggaggaaatgaagggatagatgtccccattccaagatttgctgttggcattgtaataggaagaaatggagagatgatcaaaaaaatacaaaatgatgctggtgttcgcattcagtttaagccagatgatgggacaacacccgaaaggatagcacaaataacaggacctccagaccgatgtcaacatgctgcagaaattattacagaccttcttcgaagtgttcaggctggtaatcctggtggacctggacctggtggtcgaggaagaggtagaggtcaaggcaactggaacatgggaccacctggtggactacaggaatttaattttattgtgccaactgggaaaactggattaataataggaaaaggaggtgaaaccataaaaagcataagccagcagtctggtgcaagaatagaacttcagagaaatcctccaccaaatgcagatcctaatatgaagttatttacaattcgtggcactccacaacagatagactatgctcggcaactcatagaagaaaagattggtggcccagtaaatcctttagggccacctgtaccccatgggccccatggtgtcccaggcccccatggacctcctgggcctccagggcctggaactccaatgggaccatacaaccctgcaccttataatcctggaccaccaggcccggctcctcatggtcctccagccccatatgctccccagggatggggaaatgcatatccacactggcagcagcaggctcctcctgatccagctaaggcaggaacggatccaaattcagcagcttgggctgcttattacgctcactattatcaacagcaagcacagccaccaccagcagcccctgcaggtgcaccaactacaactcaaactaatggacaaggagatcagcagaatccagccccagctggacaggttgattataccaaggcttgggaagagtactacaagaaaatgggtcaggcagttcctgctccgactggggctcctccaggtggtcagccagattatagtgcagcctgggctgagtattatagacaacaagcagcctattatgcccagacaagtccccagggaatgccacagcatcctccagcacctcagggccaataataagaagtggacaatacagtatttgcttcattgtgtgggggaaaaaaacctttgttaaatatatggatgcagacgacttgatgaagatcttaattttgtttttggtttaaaatagtgtttccttttttttttttttttttgaaaatgtacaaaatatctatcactactgataggaggttaatatttctgtgtagaaatgaaaattggtttgtttttagtatttagtgtagatgtacacattccagcaaatgtatttgcaattatgtggttgatgctttgtgatataaatgtactttttcaatgtatactttcacttttaaaatgcctgttttgtgctttacaataaatgatatgaaacctcctgtgtcggtaagttggatatgtgggtatttaaaggattcataatttcttagcaatgataaattaagatacatatacacaaatatataagctttccccatgaaatattgagtttttaaacactggcatgtttttccccccttgcagtatagtggtagattggaggatcttttccatttattgtattggctctttcagcacaagtaatcctgatatcttcattttttttccttctgtttgattaaaaactgcatgtgtgtacaatgatcttttggcatacttccattgcattaacagtgaaatttccttttatacatgaccactgtttcagacctgtactgctgctataacagttaacctttctgttcttaatttgataatacttgatttccaagactgtttcggcataactaattttaaacagttttcagatagtgaatatgagtagtctaataagaacagtttttttccatgtgaagcaactctttcaatgtatataatgttagtgtgtttctttctaaatttaggatagaaaagtgaatagtgtgcaaaaagtatagctacattgcatctgccattgaaacataaatggggtatggaaacgttcaagctttttttttttctttatgcagtatagataagctttgttttgtaaatgcacaagtccaatcattgaatcaacttaatttttttatgtacttgaagtcattttattactctttaacactcatgctgaagttctgatattttgttgaaatccattgttttactctttgcatatttgttggctctttgcatattaatatattagactacatgcaaatacagtctgtcttgccattgtctgttgaagtgcaggtttgatccagccagtatagaactagctctgtaggggtgaggaggactgtgctgtgtatcatccttgattgtgttccttcaaggagcattgcacttgccttcccagaccttccaccttaggttctgctgcaaaaagcaccaggtaagcacaacctaaggacatatataaataaatatttcaatacattaatgttgtccctgtgaggtttttgtggttgtgtattcaaaggcaatctgctactgcttccccaaaatgtattttgttattttatgctaccatcttagtggaaagtctgtaagttgttaaagcaactgtttacatttctgggtaatgttttttattttacttttttttttttattaagacaagaaaatgatgagtagattgctgcagtaattgaactacatccaaatctttttgtattttttccccaaatatagaagtgttaatattaagaaaggacaattacacagttttcaagatttaggaaatcacttgtttagaaacttcaacagccttcacaatctgttttatatgatggacagaaaatttctttgccctccaaaattataatttctttatttttttcttattcttaaactataataattcagtaaggatattatgggttagaattttattatgatttttttcttagacaaaagttatatgctgaagaaggaaaaagttataaggcagtatgttttgataaaaggcatgtgcatcagtgaaatgttaactgtatagcaaataacctttcataatctgtagcaatcagtatttttctgatttaataatattttaataactgacgctgcatttaatttttttgccagtttaaaatgtttgtgtgtttttatagatgattttaactggtacatattttgagttaagttgaatgtatgaaagcagcatcttatcagttttgtttattcgatttctaaaatgtgctgatccttttaaaactcctgcttatctctgcaacaaagaaaaatattcaaaaatactgccttcattttcacacacagtgctgaagatgctgcaagcaccaaatcatagctcataaaatcaggtcctgagatagttacccataaagaggaatcctttgagtgtatgccattggtgagccgatgagcatggaccatagaagggctcaatgtagaaggtaaaattggcaaatcataattgagaaatatgaaatgtattcccatacataatatggtatagggtgtaatgtacctgcttttgatcacttttcattttaaagtgctattcacttgatcttaaatgttccatgaactgttaaatttcttaagttacatagttactacaccacatttatgtgtatgttatgttttaatagtcaatgataggtatgtacaattgataatataaaggggctcattgaaacttgagagcctgttgagttttggttagttgtagattgcatttttataaaaaaaaatacagatagattgatgataatagatattggggcattgtttctgtctcatgagaattcttttattcattaccataagccttcactgatactataagcattattttaaatgacgctgatcttaagtctgaaataaatggaaagcagaaaaggtgagccagttgatttgaatgcattggatattagtgttagaaacaatgtatagtttagattgaaactgaactgacttatttagcacttaaacaaaaatttgacaatgtttttagttttttttaagacagcttagtgtggtgatacttagaattctatggtttgatgtttcttttagaaatgagaagtatagttttattttttaatataaaaaatggttttaatactaaaactagtaatttgatactagttgtttataaacattgtaaaatatatcttttaaacaaattatcttggtagttaattcataagggtgggtttgggtaggaatagcagagtactttcagagggaaaggggagtcattcagaagtgatagcattttatttgtttgaatactctgccagtaaaatcagctgtacttagaaagttatctgttgtgtagaataatgatgtagagtttactaatcagtgaggatgtcttgtttttattttctgcaaactctgcctcactttaaaatgcattataacaatacctaattaaagataattttggctctgaaagttaccttattttttgttgagttagtgacttcatttttcttgccacaatataagcttttgagggatttttttaaattggtgcttttaataagcaaataaatcccagggttttattttcttcagtgatacccctatagaaactcttaaatgtatttgcgcatatatatatatatattttcttatgcatgctcgatgcattttcgtcctgagaaaaatgttctctacagaaactacccgtgtgtaaaaagaagattggcttaaaatggctactgtgatgggaacagtgtcttagggagatgcagcttggacttgaggtaaattgaatactttacaactgtggtttagagtttgctttaatgacattgtatgtaaaaggtcacatgattgctgtaattttgtattcattatggtttcctcaataaatgtacattgatgactattaaaaaaaaaaac

SEQ ID NO: 284864 - DNA, 5637 bp, Homo sapiens
ggtaatagagcttcgacggcgacggccgccattttctttctttcttagctgttagctgagaggaagtctctgaacaggcggcagcggctcttatagtgcaaccatggcagactattcaacagtgcctcccccctcttctggctcagctggtggcggtggtggcggcggtggtggtggaggagttaacgacgctttcaaagatgcactgcagagagcccggcagattgcagcaaaaattggaggtgatgcagggacatcactgaattcaaatgactatggttatgggggacaaaaaagacctttagaagatggagatcaaccagatgctaagaaagttgctcctcaaaatgactcttttggaacacagttaccaccgatgcatcagcagcaaagcagatctgtaatgacagaagaatacaaagttccagatggaatggttggattcataattggcagaggaggtgaacagatctcacgcatacaacaggaatctggatgcaaaatacagatagctcctgacagtggtggccttccagaaaggtcctgtatgttaactggaacacctgaatctgtccagtcagcaaaacggttactggaccagattgttgaaaaaggaagaccagctcctggcttccatcatggcgatggaccgggaaatgcagttcaagaaatcatgattccagctagcaaggcaggattagtcattggaaaagggggagaaactattaaacagcttcaggaacgggctggagttaaaatggttatgattcaagacgggccgcagaacactggtgctgacaaacctcttaggattacaggagacccatataaagttcaacaagccaaggaaatggtgttagagttaattcgtgatcaaggcggtttcagagaagttcggaatgagtatgggtcaagaataggaggaaatgaagggatagatgtccccattccaagatttgctgttggcattgtaataggaagaaatggagagatgatcaaaaaaatacaaaatgatgctggtgttcgcattcagtttaagccagatgatgggacaacacccgaaaggatagcacaaataacaggacctccagaccgatgtcaacatgctgcagaaattattacagaccttcttcgaagtgttcagctggacctggtggtcgaggaagaggtagaggtcaaggcaactggaacatgggaccacctggtggactacaggaatttaattttattgtgccaactgggaaaactggattaataataggaaaaggaggtgaaaccataaaaagcataagccagcagtctggtgcaagaatagaacttcagagaaatcctccaccaaatgcagatcctaatggtcctccagccccatatgctccccagggatggggaaatgcatatccacactggcagcagcaggctcctcctgatccagctaaggcaggaacggatccaaattcagcagcttgggctgcttattacgctcactattatcaacagcaagcacagccaccaccagcagcccctgcaggtgcaccaactacaactcaaactaatggacaaggagatcagcagaatccagccccagctggacaggttgattataccaaggcttgggaagagtactacaagaaaatgggtcaggcagttcctgctccgactggggctcctccaggtggtcagccagattatagtgcagcctgggctgagtattatagacaacaagcagcctattatgcccagacaagtccccagggaatgccacagcatcctccagcacctcagggccaataataagaagtggacaatacagtatttgcttcattgtgtgggggaaaaaaacctttgttaaatatatggatgcagacgacttgatgaagatcttaattttgtttttggtttaaaatagtgtttccttttttttttttttttttgaaaatgtacaaaatatctatcactactgataggaggttaatatttctgtgtagaaatgaaaattggtttgtttttagtatttagtgtagatgtacacattccagcaaatgtatttgcaattatgtggttgatgctttgtgatataaatgtactttttcaatgtatactttcacttttaaaatgcctgttttgtgctttacaataaatgatatgaaacctcctgtgtcggtaagttggatatgtgggtatttaaaggattcataatttcttagcaatgataaattaagatacatatacacaaatatataagctttccccatgaaatattgagtttttaaacactggcatgtttttccccccttgcagtatagtggtagattggaggatcttttccatttattgtattggctctttcagcacaagtaatcctgatatcttcattttttttccttctgtttgattaaaaactgcatgtgtgtacaatgatcttttggcatacttccattgcattaacagtgaaatttccttttatacatgaccactgtttcagacctgtactgctgctataacagttaacctttctgttcttaatttgataatacttgatttccaagactgtttcggcataactaattttaaacagttttcagatagtgaatatgagtagtctaataagaacagtttttttccatgtgaagcaactctttcaatgtatataatgttagtgtgtttctttctaaatttaggatagaaaagtgaatagtgtgcaaaaagtatagctacattgcatctgccattgaaacataaatggggtatggaaacgttcaagctttttttttttctttatgcagtatagataagctttgttttgtaaatgcacaagtccaatcattgaatcaacttaatttttttatgtacttgaagtcattttattactctttaacactcatgctgaagttctgatattttgttgaaatccattgttttactctttgcatatttgttggctctttgcatattaatatattagactacatgcaaatacagtctgtcttgccattgtctgttgaagtgcaggtttgatccagccagtatagaactagctctgtaggggtgaggaggactgtgctgtgtatcatccttgattgtgttccttcaaggagcattgcacttgccttcccagaccttccaccttaggttctgctgcaaaaagcaccaggtaagcacaacctaaggacatatataaataaatatttcaatacattaatgttgtccctgtgaggtttttgtggttgtgtattcaaaggcaatctgctactgcttccccaaaatgtattttgttattttatgctaccatcttagtggaaagtctgtaagttgttaaagcaactgtttacatttctgggtaatgttttttattttacttttttttttttattaagacaagaaaatgatgagtagattgctgcagtaattgaactacatccaaatctttttgtattttttccccaaatatagaagtgttaatattaagaaaggacaattacacagttttcaagatttaggaaatcacttgtttagaaacttcaacagccttcacaatctgttttatatgatggacagaaaatttctttgccctccaaaattataatttctttatttttttcttattcttaaactataataattcagtaaggatattatgggttagaattttattatgatttttttcttagacaaaagttatatgctgaagaaggaaaaagttataaggcagtatgttttgataaaaggcatgtgcatcagtgaaatgttaactgtatagcaaataacctttcataatctgtagcaatcagtatttttctgatttaataatattttaataactgacgctgcatttaatttttttgccagtttaaaatgtttgtgtgtttttatagatgattttaactggtacatattttgagttaagttgaatgtatgaaagcagcatcttatcagttttgtttattcgatttctaaaatgtgctgatccttttaaaactcctgcttatctctgcaacaaagaaaaatattcaaaaatactgccttcattttcacacacagtgctgaagatgctgcaagcaccaaatcatagctcataaaatcaggtcctgagatagttacccataaagaggaatcctttgagtgtatgccattggtgagccgatgagcatggaccatagaagggctcaatgtagaaggtaaaattggcaaatcataattgagaaatatgaaatgtattcccatacataatatggtatagggtgtaatgtacctgcttttgatcacttttcattttaaagtgctattcacttgatcttaaatgttccatgaactgttaaatttcttaagttacatagttactacaccacatttatgtgtatgttatgttttaatagtcaatgataggtatgtacaattgataatataaaggggctcattgaaacttgagagcctgttgagttttggttagttgtagattgcatttttataaaaaaaaatacagatagattgatgataatagatattggggcattgtttctgtctcatgagaattcttttattcattaccataagccttcactgatactataagcattattttaaatgacgctgatcttaagtctgaaataaatggaaagcagaaaaggtgagccagttgatttgaatgcattggatattagtgttagaaacaatgtatagtttagattgaaactgaactgacttatttagcacttaaacaaaaatttgacaatgtttttagttttttttaagacagcttagtgtggtgatacttagaattctatggtttgatgtttcttttagaaatgagaagtatagttttattttttaatataaaaaatggttttaatactaaaactagtaatttgatactagttgtttataaacattgtaaaatatatcttttaaacaaattatcttggtagttaattcataagggtgggtttgggtaggaatagcagagtactttcagagggaaaggggagtcattcagaagtgatagcattttatttgtttgaatactctgccagtaaaatcagctgtacttagaaagttatctgttgtgtagaataatgatgtagagtttactaatcagtgaggatgtcttgtttttattttctgcaaactctgcctcactttaaaatgcattataacaatacctaattaaagataattttggctctgaaagttaccttattttttgttgagttagtgacttcatttttcttgccacaatataagcttttgagggatttttttaaattggtgcttttaataagcaaataaatcccagggttttattttcttcagtgatacccctatagaaactcttaaatgtatttgcgcatatatatatatatattttcttatgcatgctcgatgcattttcgtcctgagaaaaatgttctctacagaaactacccgtgtgtaaaaagaagattggcttaaaatggctactgtgatgggaacagtgtcttagggagatgcagcttggacttgaggtaaattgaatactttacaactgtggtttagagtttgctttaatgacattgtatgtaaaaggtcacatgattgctgtaattttgtattcattatggtttcctcaataaatgtacattgatgactattaaaaaaaaaaac

SEQ ID NO: 284865 - DNA, 5676 bp, Homo sapiens
ggtaatagagcttcgacggcgacggccgccattttctttctttcttagctgttagctgagaggaagtctctgaacaggcggcagcggctcttatagtgcaaccatggcagactattcaacagtgcctcccccctcttctggctcagctggtggcggtggtggcggcggtggtggtggaggagttaacgacgctttcaaagatgcactgcagagagcccggcagattgcagcaaaaattggaggtgatgcagggacatcactgaattcaaatgactatggttatgggggacaaaaaagacctttagaagatggagatcaaccagatgctaagaaagttgctcctcaaaatgactcttttggaacacagttaccaccgatgcatcagcagcaaagcagatctgtaatgacagaagaatacaaagttccagatggaatggttggattcataattggcagaggaggtgaacagatctcacgcatacaacaggaatctggatgcaaaatacagatagctcctgacagtggtggccttccagaaaggtcctgtatgttaactggaacacctgaatctgtccagtcagcaaaacggttactggaccagattgttgaaaaaggaagaccagctcctggcttccatcatggcgatggaccgggaaatgcagttcaagaaatcatgattccagctagcaaggcaggattagtcattggaaaagggggagaaactattaaacagcttcaggaacgggctggagttaaaatggttatgattcaagacgggccgcagaacactggtgctgacaaacctcttaggattacaggagacccatataaagttcaacaagccaaggaaatggtgttagagttaattcgtgatcaaggcggtttcagagaagttcggaatgagtatgggtcaagaataggaggaaatgaagggatagatgtccccattccaagatttgctgttggcattgtaataggaagaaatggagagatgatcaaaaaaatacaaaatgatgctggtgttcgcattcagtttaagccagatgatgggacaacacccgaaaggatagcacaaataacaggacctccagaccgatgtcaacatgctgcagaaattattacagaccttcttcgaagtgttcaggctggtaatcctggtggacctggacctggtggtcgaggaagaggtagaggtcaaggcaactggaacatgggaccacctggtggactacaggaatttaattttattgtgccaactgggaaaactggattaataataggaaaaggaggtgaaaccataaaaagcataagccagcagtctggtgcaagaatagaacttcagagaaatcctccaccaaatgcagatcctaatatgaagttatttacaattctggtcctccagccccatatgctccccagggatggggaaatgcatatccacactggcagcagcaggctcctcctgatccagctaaggcaggaacggatccaaattcagcagcttgggctgcttattacgctcactattatcaacagcaagcacagccaccaccagcagcccctgcaggtgcaccaactacaactcaaactaatggacaaggagatcagcagaatccagccccagctggacaggttgattataccaaggcttgggaagagtactacaagaaaatgggtcaggcagttcctgctccgactggggctcctccaggtggtcagccagattatagtgcagcctgggctgagtattatagacaacaagcagcctattatgcccagacaagtccccagggaatgccacagcatcctccagcacctcagggccaataataagaagtggacaatacagtatttgcttcattgtgtgggggaaaaaaacctttgttaaatatatggatgcagacgacttgatgaagatcttaattttgtttttggtttaaaatagtgtttccttttttttttttttttttgaaaatgtacaaaatatctatcactactgataggaggttaatatttctgtgtagaaatgaaaattggtttgtttttagtatttagtgtagatgtacacattccagcaaatgtatttgcaattatgtggttgatgctttgtgatataaatgtactttttcaatgtatactttcacttttaaaatgcctgttttgtgctttacaataaatgatatgaaacctcctgtgtcggtaagttggatatgtgggtatttaaaggattcataatttcttagcaatgataaattaagatacatatacacaaatatataagctttccccatgaaatattgagtttttaaacactggcatgtttttccccccttgcagtatagtggtagattggaggatcttttccatttattgtattggctctttcagcacaagtaatcctgatatcttcattttttttccttctgtttgattaaaaactgcatgtgtgtacaatgatcttttggcatacttccattgcattaacagtgaaatttccttttatacatgaccactgtttcagacctgtactgctgctataacagttaacctttctgttcttaatttgataatacttgatttccaagactgtttcggcataactaattttaaacagttttcagatagtgaatatgagtagtctaataagaacagtttttttccatgtgaagcaactctttcaatgtatataatgttagtgtgtttctttctaaatttaggatagaaaagtgaatagtgtgcaaaaagtatagctacattgcatctgccattgaaacataaatggggtatggaaacgttcaagctttttttttttctttatgcagtatagataagctttgttttgtaaatgcacaagtccaatcattgaatcaacttaatttttttatgtacttgaagtcattttattactctttaacactcatgctgaagttctgatattttgttgaaatccattgttttactctttgcatatttgttggctctttgcatattaatatattagactacatgcaaatacagtctgtcttgccattgtctgttgaagtgcaggtttgatccagccagtatagaactagctctgtaggggtgaggaggactgtgctgtgtatcatccttgattgtgttccttcaaggagcattgcacttgccttcccagaccttccaccttaggttctgctgcaaaaagcaccaggtaagcacaacctaaggacatatataaataaatatttcaatacattaatgttgtccctgtgaggtttttgtggttgtgtattcaaaggcaatctgctactgcttccccaaaatgtattttgttattttatgctaccatcttagtggaaagtctgtaagttgttaaagcaactgtttacatttctgggtaatgttttttattttacttttttttttttattaagacaagaaaatgatgagtagattgctgcagtaattgaactacatccaaatctttttgtattttttccccaaatatagaagtgttaatattaagaaaggacaattacacagttttcaagatttaggaaatcacttgtttagaaacttcaacagccttcacaatctgttttatatgatggacagaaaatttctttgccctccaaaattataatttctttatttttttcttattcttaaactataataattcagtaaggatattatgggttagaattttattatgatttttttcttagacaaaagttatatgctgaagaaggaaaaagttataaggcagtatgttttgataaaaggcatgtgcatcagtgaaatgttaactgtatagcaaataacctttcataatctgtagcaatcagtatttttctgatttaataatattttaataactgacgctgcatttaatttttttgccagtttaaaatgtttgtgtgtttttatagatgattttaactggtacatattttgagttaagttgaatgtatgaaagcagcatcttatcagttttgtttattcgatttctaaaatgtgctgatccttttaaaactcctgcttatctctgcaacaaagaaaaatattcaaaaatactgccttcattttcacacacagtgctgaagatgctgcaagcaccaaatcatagctcataaaatcaggtcctgagatagttacccataaagaggaatcctttgagtgtatgccattggtgagccgatgagcatggaccatagaagggctcaatgtagaaggtaaaattggcaaatcataattgagaaatatgaaatgtattcccatacataatatggtatagggtgtaatgtacctgcttttgatcacttttcattttaaagtgctattcacttgatcttaaatgttccatgaactgttaaatttcttaagttacatagttactacaccacatttatgtgtatgttatgttttaatagtcaatgataggtatgtacaattgataatataaaggggctcattgaaacttgagagcctgttgagttttggttagttgtagattgcatttttataaaaaaaaatacagatagattgatgataatagatattggggcattgtttctgtctcatgagaattcttttattcattaccataagccttcactgatactataagcattattttaaatgacgctgatcttaagtctgaaataaatggaaagcagaaaaggtgagccagttgatttgaatgcattggatattagtgttagaaacaatgtatagtttagattgaaactgaactgacttatttagcacttaaacaaaaatttgacaatgtttttagttttttttaagacagcttagtgtggtgatacttagaattctatggtttgatgtttcttttagaaatgagaagtatagttttattttttaatataaaaaatggttttaatactaaaactagtaatttgatactagttgtttataaacattgtaaaatatatcttttaaacaaattatcttggtagttaattcataagggtgggtttgggtaggaatagcagagtactttcagagggaaaggggagtcattcagaagtgatagcattttatttgtttgaatactctgccagtaaaatcagctgtacttagaaagttatctgttgtgtagaataatgatgtagagtttactaatcagtgaggatgtcttgtttttattttctgcaaactctgcctcactttaaaatgcattataacaatacctaattaaagataattttggctctgaaagttaccttattttttgttgagttagtgacttcatttttcttgccacaatataagcttttgagggatttttttaaattggtgcttttaataagcaaataaatcccagggttttattttcttcagtgatacccctatagaaactcttaaatgtatttgcgcatatatatatatatattttcttatgcatgctcgatgcattttcgtcctgagaaaaatgttctctacagaaactacccgtgtgtaaaaagaagattggcttaaaatggctactgtgatgggaacagtgtcttagggagatgcagcttggacttgaggtaaattgaatactttacaactgtggtttagagtttgctttaatgacattgtatgtaaaaggtcacatgattgctgtaattttgtattcattatggtttcctcaataaatgtacattgatgactattaaaaaaaaaaac

SEQ ID NO: 284866 - DNA, 5847 bp, Homo sapiens
  misc_feature (11)..(12): n is a, c, g, or t
  misc_feature (17)..(17): n is a, c, g, or t
  misc_feature (22)..(22): n is a, c, g, or t
  misc_feature (24)..(25): n is a, c, g, or t
gggctaggtannaggcnggtgntnnggagtctctgaacaggcggcagcggctcttatagtgcaaccatggcagactattcaacagtgcctcccccctcttctggctcagctggtggcggtggtggcggcggtggtggtggaggagttaacgacgctttcaaagatgcactgcagagagcccggcagattgcagcaaaaattggaggtgatgcagggacatcactgaattcaaatgactatggttatgggggacaaaaaagacctttagaagatggagatcaaccagatgctaagaaagttgctcctcaaaatgactcttttggaacacagttaccaccgatgcatcagcagcaaagcagatctgtaatgacagaagaatacaaagttccagatggaatggttggattcataattggcagaggaggtgaacagatctcacgcatacaacaggaatctggatgcaaaatacagatagctcctgacagtggtggccttccagaaaggtcctgtatgttaactggaacacctgaatctgtccagtcagcaaaacggttactggaccagattgttgaaaaaggaagaccagctcctggcttccatcatggcgatggaccgggaaatgcagttcaagaaatcatgattccagctagcaaggcaggattagtcattggaaaagggggagaaactattaaacagcttcaggaacgggctggagttaaaatggttatgattcaagacgggccgcagaacactggtgctgacaaacctcttaggattacaggagacccatataaagttcaacaagccaaggaaatggtgttagagttaattcgtgatcaaggcggtttcagagaagttcggaatgagtatgggtcaagaataggaggaaatgaagggatagatgtccccattccaagatttgctgttggcattgtaataggaagaaatggagagatgatcaaaaaaatacaaaatgatgctggtgttcgcattcagtttaagccagatgatgggacaacacccgaaaggatagcacaaataacaggacctccagaccgatgtcaacatgctgcagaaattattacagaccttcttcgaagtgttcaggctggtaatcctggtggacctggacctggtggtcgaggaagaggtagaggtcaaggcaactggaacatgggaccacctggtggactacaggaatttaattttattgtgccaactgggaaaactggattaataataggaaaaggaggtgaaaccataaaaagcataagccagcagtctggtgcaagaatagaacttcagagaaatcctccaccaaatgcagatcctaatatgaagttatttacaattcgtggcactccacaacagatagactatgctcggcaactcatagaagaaaagattggtggcccagtaaatcctttagggccacctgtaccccatgggccccatggtgtcccaggcccccatggacctcctgggcctccagggcctggaactccaatgggaccatacaaccctgcaccttataatcctggaccaccaggcccggctcctcatggtcctccagccccatatgctccccagggatggggaaatgcatatccacactggcagcagcaggctcctcctgatccagctaaggcaggaacggatccaaattcagcagcttgggctgcttattacgctcactattatcaacagcaagcacagccaccaccagcagcccctgcaggtgcaccaactacaactcaaactaatggacaaggagatcagcagaatccagccccagctggacaggttgattataccaaggcttgggaagagtactacaagaaaatgggtcaggcagttcctgctccgactggggctcctccaggtggtcagccagattatagtgcagcctgggctgagtattatagacaacaagcagcctattatgcccagacaagtccccagggaatgccacagcatcctccagcacctcagggccaataataagaagtggacaatacagtatttgcttcattgtgtgggggaaaaaaacctttgttaaatatatggatgcagacgacttgatgaagatcttaattttgtttttggtttaaaatagtgtttccttttttttttttttttttgaaaatgtacaaaatatctatcactactgataggaggttaatatttctgtgtagaaatgaaaattggtttgtttttagtatttagtgtagatgtacacattccagcaaatgtatttgcaattatgtggttgatgctttgtgatataaatgtactttttcaatgtatactttcacttttaaaatgcctgttttgtgctttacaataaatgatatgaaacctcctgtgtcggtaagttggatatgtgggtatttaaaggattcataatttcttagcaatgataaattaagatacatatacacaaatatataagctttccccatgaaatattgagtttttaaacactggcatgtttttccccccttgcagtatagtggtagattggaggatcttttccatttattgtattggctctttcagcacaagtaatcctgatatcttcattttttttccttctgtttgattaaaaactgcatgtgtgtacaatgatcttttggcatacttccattgcattaacagtgaaatttccttttatacatgaccactgtttcagacctgtactgctgctataacagttaacctttctgttcttaatttgataatacttgatttccaagactgtttcggcataactaattttaaacagttttcagatagtgaatatgagtagtctaataagaacagtttttttccatgtgaagcaactctttcaatgtatataatgttagtgtgtttctttctaaatttaggatagaaaagtgaatagtgtgcaaaaagtatagctacattgcatctgccattgaaacataaatggggtatggaaacgttcaagctttttttttttctttatgcagtatagataagctttgttttgtaaatgcacaagtccaatcattgaatcaacttaatttttttatgtacttgaagtcattttattactctttaacactcatgctgaagttctgatattttgttgaaatccattgttttactctttgcatatttgttggctctttgcatattaatatattagactacatgcaaatacagtctgtcttgccattgtctgttgaagtgcaggtttgatccagccagtatagaactagctctgtaggggtgaggaggactgtgctgtgtatcatccttgattgtgttccttcaaggagcattgcacttgccttcccagaccttccaccttaggttctgctgcaaaaagcaccaggtaagcacaacctaaggacatatataaataaatatttcaatacattaatgttgtccctgtgaggtttttgtggttgtgtattcaaaggcaatctgctactgcttccccaaaatgtattttgttattttatgctaccatcttagtggaaagtctgtaagttgttaaagcaactgtttacatttctgggtaatgttttttattttacttttttttttttattaagacaagaaaatgatgagtagattgctgcagtaattgaactacatccaaatctttttgtattttttccccaaatatagaagtgttaatattaagaaaggacaattacacagttttcaagatttaggaaatcacttgtttagaaacttcaacagccttcacaatctgttttatatgatggacagaaaatttctttgccctccaaaattataatttctttatttttttcttattcttaaactataataattcagtaaggatattatgggttagaattttattatgatttttttcttagacaaaagttatatgctgaagaaggaaaaagttataaggcagtatgttttgataaaaggcatgtgcatcagtgaaatgttaactgtatagcaaataacctttcataatctgtagcaatcagtatttttctgatttaataatattttaataactgacgctgcatttaatttttttgccagtttaaaatgtttgtgtgtttttatagatgattttaactggtacatattttgagttaagttgaatgtatgaaagcagcatcttatcagttttgtttattcgatttctaaaatgtgctgatccttttaaaactcctgcttatctctgcaacaaagaaaaatattcaaaaatactgccttcattttcacacacagtgctgaagatgctgcaagcaccaaatcatagctcataaaatcaggtcctgagatagttacccataaagaggaatcctttgagtgtatgccattggtgagccgatgagcatggaccatagaagggctcaatgtagaaggtaaaattggcaaatcataattgagaaatatgaaatgtattcccatacataatatggtatagggtgtaatgtacctgcttttgatcacttttcattttaaagtgctattcacttgatcttaaatgttccatgaactgttaaatttcttaagttacatagttactacaccacatttatgtgtatgttatgttttaatagtcaatgataggtatgtacaattgataatataaaggggctcattgaaacttgagagcctgttgagttttggttagttgtagattgcatttttataaaaaaaaatacagatagattgatgataatagatattggggcattgtttctgtctcatgagaattcttttattcattaccataagccttcactgatactataagcattattttaaatgacgctgatcttaagtctgaaataaatggaaagcagaaaaggtgagccagttgatttgaatgcattggatattagtgttagaaacaatgtatagtttagattgaaactgaactgacttatttagcacttaaacaaaaatttgacaatgtttttagttttttttaagacagcttagtgtggtgatacttagaattctatggtttgatgtttcttttagaaatgagaagtatagttttattttttaatataaaaaatggttttaatactaaaactagtaatttgatactagttgtttataaacattgtaaaatatatcttttaaacaaattatcttggtagttaattcataagggtgggtttgggtaggaatagcagagtactttcagagggaaaggggagtcattcagaagtgatagcattttatttgtttgaatactctgccagtaaaatcagctgtacttagaaagttatctgttgtgtagaataatgatgtagagtttactaatcagtgaggatgtcttgtttttattttctgcaaactctgcctcactttaaaatgcattataacaatacctaattaaagataattttggctctgaaagttaccttattttttgttgagttagtgacttcatttttcttgccacaatataagcttttgagggatttttttaaattggtgcttttaataagcaaataaatcccagggttttattttcttcagtgatacccctatagaaactcttaaatgtatttgcgcatatatatatatatattttcttatgcatgctcgatgcattttcgtcctgagaaaaatgttctctacagaaactacccgtgtgtaaaaagaagattggcttaaaatggctactgtgatgggaacagtgtcttagggagatgcagcttggacttgaggtaaattgaatactttacaactgtggtttagagtttgctttaatgacattgtatgtaaaaggtcacatgattgctgtaattttgtattcattatggtttcctcaataaatgtacattgatgactattaaaaaaaaaaac

SEQ ID NO: 284867 - DNA, 5829 bp, Homo sapiens
ggtaatagagcttcgacggcgacggccgccattttctttctttcttagctgttagctgagaggaagtctctgaacaggcggcagcggctcttatagtgcaaccatggcagactattcaacagtgcctcccccctcttctggctcagctggtggcggtggtggcggcggtggtggtggaggagttaacgacgctttcaaagatgcactgcagagagcccggcagattgcagcaaaaattggaggtgatgcagggacatcactgaattcaaatgactatggttatgggggacaaaaaagacctttagaagatggagatcaaccagatgctaagaaagttgctcctcaaaatgactcttttggaacacagttaccaccgatgcatcagcagcaaagcagatctgtaatgacagaagaatacaaagttccagatggaatggttggattcataattggcagaggaggtgaacagatctcacgcatacaacaggaatctggatgcaaaatacagatagctcctgacagtggtggccttccagaaaggtcctgtatgttaactggaacacctgaatctgtccagtcagcaaaacggttactggaccagattgttgaaaaaggaagaccagctcctggcttccatcatggcgatggaccgggaaatgcagttcaagaaatcatgattccagctagcaaggcaggattagtcattggaaaagggggagaaactattaaacagcttcaggaacgggctggagttaaaatggttatgattcaagacgggccgcagaacactggtgctgacaaacctcttaggattacaggagacccatataaagttcaacaagccaaggaaatggtgttagagttaattcgtgatcaaggcggtttcagagaagttcggaatgagtatgggtcaagaataggaggaaatgaagggatagatgtccccattccaagatttgctgttggcattgtaataggaagaaatggagagatgatcaaaaaaatacaaaatgatgctggtgttcgcattcagtttaagccagatgatgggacaacacccgaaaggatagcacaaataacaggacctccagaccgatgtcaacatgctgcagaaattattacagaccttcttcgaagtgttcaggctggtaatcctggtggacctggacctggtggtcgaggaagaggtagaggtcaaggcaactggaacatgggaccacctggtggactacaggaatttaattttattgtgccaactgggaaaactggattaataataggaaaaggaggtgaaaccataaaaagcataagccagcagtctggtgcaagaatagaacttcagagaaatcctccaccaaatgcagatcctaatatgaagttatttacaattcgtggcactccacaacagatagactatgctcggcaactcatagaagaaaagattggtggcccagtaaatcctttagggccacctgtaccccatgggccccatggtgtcccaggcccccatggacctcctgggcctccagggcctggaactccaatgggaccatacaaccctgcaccttataatcctggaccaccaggcccggctcctcatggtcctccagccccatatgctccccagggatggggaaatgcatatccacactggcagcagcaggctcctcctgatccagctaaggcaggaacggatccaaattcagcagcttgggctgcttattacgctcactattatcaacagcaagcacagccaccaccagcagcccctgcaggtgcaccaactacaactcaaactaatggacaaggagatcagcagaatccagccccagctggacaggttgattataccaaggcttgggaagagtactacaagaaaatgggtcaggcagttcctgctccgactggggctcctccaggtggtcagccagattatagtgcagcctgggctgagtattatagacaacaagcagcctattatgcccagacaagtccccagggaatgccacagcatcctccagcacctcagggccaataataagaagtggacaatacagtatttgcttcattgtgtgggggaaaaaaacctttgttaaatatatggatgcagacgacttgatgaagatcttaattttgtttttggtttaaaatagtgtttccttttttttttttttttttgaaaatgtacaaaatatctatcactactgataggaggttaatatttctgtgtagaaatgaaaattggtttgtttttagtatttagtgtagatgtacacattccagcaaatgtatttgcaattatgtggttgatgctttgtgatataaatgtactttttcaatgtatactttcacttttaaaatgcctgttttgtgctttacaataaatgatatgaaacctcctgtgtcggtaagttggatatgtgggtatttaaaggattcataatttcttagcaatgataaattaagatacatatacacaaatatataagctttccccatgaaatattgagtttttaaacactggcatgtttttccccccttgcagtatagtggtagattggaggatcttttccatttattgtattggctctttcagcacaagtaatcctgatatcttcattttttttccttctgtttgattaaaaactgcatgtgtgtacaatgatcttttggcatacttccattgcattaacagtgaaatttccttttatacatgaccactgtttcagacctgtactgctgctataacagttaacctttctgttcttaatttgataatacttgatttccaagactgtttcggcataactaattttaaacagttttcagatagtgaatatgagtagtctaataagaacagtttttttccatgtgaagcaactctttcaatgtatataatgttagtgtgtttctttctaaatttaggatagaaaagtgaatagtgtgcaaaaagtatagctacattgcatctgccattgaaacataaatggggtatggaaacgttcaagctttttttttttctttatgcagtatagataagctttgttttgtaaatgcacaagtccaatcattgaatcaacttaatttttttatgtacttgaagtcattttattactctttaacactcatgctgaagttctgatattttgttgaaatccattgttttactctttgcatatttgttggctctttgcatattaatatattagactacatgcaaatacagtctgtcttgccattgtctgttgaagtgcaggtttgatccagccagtatagaactagctctgtaggggtgaggaggactgtgctgtgtatcatccttgattgtgttccttcaaggagcattgcacttgccttcccagaccttccaccttaggttctgctgcaaaaagcaccaggtaagcacaacctaaggacatatataaataaatatttcaatacattaatgttgtccctgtgaggtttttgtggttgtgtattcaaaggcaatctgctactgcttccccaaaatgtattttgttattttatgctaccatcttagtggaaagtctgtaagttgttaaagcaactgtttacatttctgggtaatgttttttattttacttttttttttttattaagacaagaaaatgatgagtagattgctgcagtaattgaactacatccaaatctttttgtattttttccccaaatatagaagtgttaatattaagaaaggacaattacacagttttcaagatttaggaaatcacttgtttagaaacttcaacagccttcacaatctgttttatatgatggacagaaaatttctttgccctccaaaattataatttctttatttttttcttattcttaaactataataattcagtaaggatattatgggttagaattttattatgatttttttcttagacaaaagttatatgctgaagaaggaaaaagttataaggcagtatgttttgataaaaggcatgtgcatcagtgaaatgttaactgtatagcaaataacctttcataatctgtagcaatcagtatttttctgatttaataatattttaataactgacgctgcatttaatttttttgccagtttaaaatgtttgtgtgtttttatagatgattttaactggtacatattttgagttaagttgaatgtatgaaagcagcatcttatcagttttgtttattcgatttctaaaatgtgctgatccttttaaaactcctgcttatctctgcaacaaagaaaaatattcaaaaatactgccttcattttcacacacagtgctgaagatgctgcaagcaccaaatcatagctcataaaatcaggtcctgagatagttacccataaagaggaatcctttgagtgtatgccattggtgagccgatgagcatggaccatagaagggctcaatgtagaagggtatagggtgtaatgtacctgcttttgatcacttttcattttaaagtgctattcacttgatcttaaatgttccatgaactgttaaatttcttaagttacatagttactacaccacatttatgtgtatgttatgttttaatagtcaatgataggtatgtacaattgataatataaaggggctcattgaaacttgagagcctgttgagttttggttagttgtagattgcatttttataaaaaaaaatacagatagattgatgataatagatattggggcattgtttctgtctcatgagaattcttttattcattaccataagccttcactgatactataagcattattttaaatgacgctgatcttaagtctgaaataaatggaaagcagaaaaggtgagccagttgatttgaatgcattggatattagtgttagaaacaatgtatagtttagattgaaactgaactgacttatttagcacttaaacaaaaatttgacaatgtttttagttttttttaagacagcttagtgtggtgatacttagaattctatggtttgatgtttcttttagaaatgagaagtatagttttattttttaatataaaaaatggttttaatactaaaactagtaatttgatactagttgtttataaacattgtaaaatatatcttttaaacaaattatcttggtagttaattcataagggtgggtttgggtaggaatagcagagtactttcagagggaaaggggagtcattcagaagtgatagcattttatttgtttgaatactctgccagtaaaatcagctgtacttagaaagttatctgttgtgtagaataatgatgtagagtttactaatcagtgaggatgtcttgtttttattttctgcaaactctgcctcactttaaaatgcattataacaatacctaattaaagataattttggctctgaaagttaccttattttttgttgagttagtgacttcatttttcttgccacaatataagcttttgagggatttttttaaattggtgcttttaataagcaaataaatcccagggttttattttcttcagtgatacccctatagaaactcttaaatgtatttgcgcatatatatatatatattttcttatgcatgctcgatgcattttcgtcctgagaaaaatgttctctacagaaactacccgtgtgtaaaaagaagattggcttaaaatggctactgtgatgggaacagtgtcttagggagatgcagcttggacttgaggtaaattgaatactttacaactgtggtttagagtttgctttaatgacattgtatgtaaaaggtcacatgattgctgtaattttgtattcattatggtttcctcaataaatgtacattgatgactattaaaaaaaaaaac

SEQ ID NO: 284868 - DNA, 2607 bp, Homo sapiens
ggtaatagagcttcgacggcgacggccgccattttctttctttcttagctgttagctgagaggaagtctctgaacaggcggcagcggctcttatagtgcaaccatggcagactattcaacagtgcctcccccctcttctggctcagctggtggcggtggtggcggcggtggtggtggaggagttaacgacgctttcaaagatgcactgcagagagcccggcagattgcagcaaaaattggaggtgatgcagggacatcactgaattcaaatgactatggttatgggggacaaaaaagacctttagaagatggagatcaaccagatgctaagaaagttgctcctcaaaatgactcttttggaacacagttaccaccgatgcatcagcagcaaagcagatctgtaatgacagaagaatacaaagttccagatggaatggttggattcataattggcagaggaggtgaacagatctcacgcatacaacaggaatctggatgcaaaatacagatagctcctgacagtggtggccttccagaaaggtcctgtatgttaactggaacacctgaatctgtccagtcagcaaaacggttactggaccagattgttgaaaaaggaagaccagctcctggcttccatcatggcgatggaccgggaaatgcagttcaagaaatcatgattccagctagcaaggcaggattagtcattggaaaagggggagaaactattaaacagcttcaggaacgggctggagttaaaatggttatgattcaagacgggccgcagaacactggtgctgacaaacctcttaggattacaggagacccatataaagttcaacaagccaaggaaatggtgttagagttaattcgtgatcaaggcggtttcagagaagttcggaatgagtatgggtcaagaataggaggaaatgaagggatagatgtccccattccaagatttgctgttggcattgtaataggaagaaatggagagatgatcaaaaaaatacaaaatgatgctggtgttcgcattcagtttaagccagatgatgggacaacacccgaaaggatagcacaaataacaggacctccagaccgatgtcaacatgctgcagaaattattacagaccttcttcgaagtgttcaggctggtaatcctggtggacctggacctggtggtcgaggaagaggtagaggtcaaggcaactggaacatgggaccacctggtggactacaggaatttaattttattgtgccaactgggaaaactggattaataataggaaaaggaggtgaaaccataaaaagcataagccagcagtctggtgcaagaatagaacttcagagaaatcctccaccaaatgcagatcctaatatgaagttatttacaattcgtggcactccacaacagatagactatgctcggcaactcatagaagaaaagattggtggcccagtaaatcctttagggccacctgtaccccatgggccccatggtgtcccaggcccccatggacctcctgggcctccagggcctggaactccaatgggaccatacaaccctgcaccttataatcctggaccaccaggcccggctcctcatggtcctccagccccatatgctccccagggatggggaaatgcatatccacactggcagcagcaggctcctcctgatccagctaaggcaggaacggatccaaattcagcagcttgggctgcttattacgctcactattatcaacagcaagcacagccaccaccagcagcccctgcaggtgcaccaactacaactcaaactaatggacaaggagatcagcagaatccagccccagctggacaggttgattataccaaggcttgggaagagtactacaagaaaatgggtcaggcagttcctgctccgactggggctcctccaggtggtcagccagattatagtgcagcctgggctgagtattatagacaacaagcagcctattatgcccagacaagtccccagggaatgccacagcatcctccagcacctcagggccaataataagaagtggacaatacagtatttgcttcattgtgtgggggaaaaaaacctttgttaaatatatggatgcagacgacttgatgaagatcttaattttgtttttggtttaaaatagtgtttccttttttttttttttttttgaaaatgtacaaaatatctatcactactgataggaggttaatatttctgtgtagaaatgaaaattggtttgtttttagtatttagtgtagatgtacacattccagcaaatgtatttgcaattatgtggttgatgctttgtgatataaatgtactttttcaatgtatactttcacttttaaaatgcctgttttgtgctttacaataaatgatatgaaacctcaaaaaaaaaaaaaaaaaaaaaaggaattcctctcagctgcacccagaacagggctggccagttggaaccacggagatctccttgccctagatgagcccagccctgttctgggtgcagctgagaaaatgagtgactagacgttcatttgtgtgctcatgtatgtgcgaagtatataaattggctcggaattccggaattccggaattcc

SEQ ID NO: 284869 - DNA, 5829 bp, Homo sapiens
ggtaatagagcttcgacggcgacggccgccattttctttctttcttagctgttagctgagaggaagtctctgaacaggcggcagcggctcttatagtgcaaccatggcagactattcaacagtgcctcccccctcttctggctcagctggtggcggtggtggcggcggtggtggtggaggagttaacgacgctttcaaagatgcactgcagagagcccggcagattgcagcaaaaattggaggtgatgcagggacatcactgaattcaaatgactatggttatgggggacaaaaaagacctttagaagatggagatcaaccagatgctaagaaagttgctcctcaaaatgactcttttggaacacagttaccaccgatgcatcagcagcaaagcagatctgtaatgacagaagaatacaaagttccagatggaatggttggattcataattggcagaggaggtgaacagatctcacgcatacaacaggaatctggatgcaaaatacagatagctcctgacagtggtggccttccagaaaggtcctgtatgttaactggaacacctgaatctgtccagtcagcaaaacggttactggaccagattgttgaaaaaggaagaccagctcctggcttccatcatggcgatggaccgggaaatgcagttcaagaaatcatgattccagctagcaaggcaggattagtcattggaaaagggggagaaactattaaacagcttcagaacgcgctggagttaggattacaggagacccatatatagtgcaacaagccaaggaaatggtgttagagttaattcgtgatcaaggcggtttcagagaagttcggaatgagtatgggtcaagaataggaggaaatgaagggatagatgtccccattccaagatttgctgttggcattgtaataggaagaaatggagagatgatcaaaaaaatacaaaatgatgctggtgttcgcattcagtttaagccagatgatgggacaacacccgaaaggatagcacaaataacaggacctccagaccgatgtcaacatgctgcagaaattattacagaccttcttcgaagtgttcaggctggtaatcctggtggacctggacctggtggtcgaggaagaggtagaggtcaaggcaactggaacatgggaccacctggtggactacaggaatttaattttattgtgccaactgggaaaactggattaataataggaaaaggaggtgaaaccataaaaagcataagccagcagtctggtgcaagaatagaacttcagagaaatcctccaccaaatgcagatcctaatatgaagttatttacaattcgtggcactccacaacagatagactatgctcggcaactcatagaagaaaagattggtggcccagtaaatcctttagggccacctgtaccccatgggccccatggtgtcccaggcccccatggacctcctgggcctccagggcctggaactccaatgggaccatacaaccctgcaccttataatcctggaccaccaggcccggctcctcatggtcctccagccccatatgctccccagggatggggaaatgcatatccacactggcagcagcaggctcctcctgatccagctaaggcaggaacggatccaaattcagcagcttgggctgcttattacgctcactattatcaacagcaagcacagccaccaccagcagcccctgcaggtgcaccaactacaactcaaactaatggacaaggagatcagcagaatccagccccagctggacaggttgattataccaaggcttgggaagagtactacaagaaaatgggtcaggcagttcctgctccgactggggctcctccaggtggtcagccagattatagtgcagcctgggctgagtattatagacaacaagcagcctattatgcccagacaagtccccagggaatgccacagcatcctccagcacctcagggccaataataagaagtggacaatacagtatttgcttcattgtgtgggggaaaaaaacctttgttaaatatatggatgcagacgacttgatgaagatcttaattttgtttttggtttaaaatagtgtttccttttttttttttttttttgaaaatgtacaaaatatctatcactactgataggaggttaatatttctgtgtagaaatgaaaattggtttgtttttagtatttagtgtagatgtacacattccagcaaatgtatttgcaattatgtggttgatgctttgtgatataaatgtactttttcaatgtatactttcacttttaaaatgcctgttttgtgctttacaataaatgatatgaaacctcctgtgtcggtaagttggatatgtgggtatttaaaggattcataatttcttagcaatgataaattaagatacatatacacaaatatataagctttccccatgaaatattgagtttttaaacactggcatgtttttccccccttgcagtatagtggtagattggaggatcttttccatttattgtattggctctttcagcacaagtaatcctgatatcttcattttttttccttctgtttgattaaaaactgcatgtgtgtacaatgatcttttggcatacttccattgcattaacagtgaaatttccttttatacatgaccactgtttcagacctgtactgctgctataacagttaacctttctgttcttaatttgataatacttgatttccaagactgtttcggcataactaattttaaacagttttcagatagtgaatatgagtagtctaataagaacagtttttttccatgtgaagcaactctttcaatgtatataatgttagtgtgtttctttctaaatttaggatagaaaagtgaatagtgtgcaaaaagtatagctacattgcatctgccattgaaacataaatggggtatggaaacgttcaagctttttttttttctttatgcagtatagataagctttgttttgtaaatgcacaagtccaatcattgaatcaacttaatttttttatgtacttgaagtcattttattactctttaacactcatgctgaagttctgatattttgttgaaatccattgttttactctttgcatatttgttggctctttgcatattaatatattagactacatgcaaatacagtctgtcttgccattgtctgttgaagtgcaggtttgatccagccagtatagaactagctctgtaggggtgaggaggactgtgctgtgtatcatccttgattgtgttccttcaaggagcattgcacttgccttcccagaccttccaccttaggttctgctgcaaaaagcaccaggtaagcacaacctaaggacatatataaataaatatttcaatacattaatgttgtccctgtgaggtttttgtggttgtgtattcaaaggcaatctgctactgcttccccaaaatgtattttgttattttatgctaccatcttagtggaaagtctgtaagttgttaaagcaactgtttacatttctgggtaatgttttttattttacttttttttttttattaagacaagaaaatgatgagtagattgctgcagtaattgaactacatccaaatctttttgtattttttccccaaatatagaagtgttaatattaagaaaggacaattacacagttttcaagatttaggaaatcacttgtttagaaacttcaacagccttcacaatctgttttatatgatggacagaaaatttctttgccctccaaaattataatttctttatttttttcttattcttaaactataataattcagtaaggatattatgggttagaattttattatgatttttttcttagacaaaagttatatgctgaagaaggaaaaagttataaggcagtatgttttgataaaaggcatgtgcatcagtgaaatgttaactgtatagcaaataacctttcataatctgtagcaatcagtatttttctgatttaataatattttaataactgacgctgcatttaatttttttgccagtttaaaatgtttgtgtgtttttatagatgattttaactggtacatattttgagttaagttgaatgtatgaaagcagcatcttatcagttttgtttattcgatttctaaaatgtgctgatccttttaaaactcctgcttatctctgcaacaaagaaaaatattcaaaaatactgccttcattttcacacacagtgctgaagatgctgcaagcaccaaatcatagctcataaaatcaggtcctgagatagttacccataaagaggaatcctttgagtgtatgccattggtgagccgatgagcatggaccatagaagggctcaatgtagaaggtaaaattggcaaatcataattgagaaatatgaaatgtattcccatacataatatggtatagggtgtaatgtacctgcttttgatcacttttcattttaaagtgctattcacttgatcttaaatgttccatgaactgttaaatttcttaagttacatagttactacaccacatttatgtgtatgttatgttttaatagtcaatgataggtatgtacaattgataatataaaggggctcattgaaacttgagagcctgttgagttttggttagttgtagattgcatttttataaaaaaaaatacagatagattgatgataatagatattggggcattgtttctgtctcatgagaattcttttattcattaccataagccttcactgatactataagcattattttaaatgacgctgatcttaagtctgaaataaatggaaagcagaaaaggtgagccagttgatttgaatgcattggatattagtgttagaaacaatgtatagtttagattgaaactgaactgacttatttagcacttaaacaaaaatttgacaatgtttttagttttttttaagacagcttagtgtggtgatacttagaattctatggtttgatgtttcttttagaaatgagaagtatagttttattttttaatataaaaaatggttttaatactaaaactagtaatttgatactagttgtttataaacattgtaaaatatatcttttaaacaaattatcttggtagttaattcataagggtgggtttgggtaggaatagcagagtactttcagagggaaaggggagtcattcagaagtgatagcattttatttgtttgaatactctgccagtaaaatcagctgtacttagaaagttatctgttgtgtagaataatgatgtagagtttactaatcagtgaggatgtcttgtttttattttctgcaaactctgcctcactttaaaatgcattataacaatacctaattaaagataattttggctctgaaagttaccttattttttgttgagttagtgacttcatttttcttgccacaatataagcttttgagggatttttttaaattggtgcttttaataagcaaataaatcccagggttttattttcttcagtgatacccctatagaaactcttaaatgtatttgcgcatatatatatatatattttcttatgcatgctcgatgcattttcgtcctgagaaaaatgttctctacagaaactacccgtgtgtaaaaagaagattggcttaaaatggctactgtgatgggaacagtgtcttagggagatgcagcttggacttgaggtaaattgaatactttacaactgtggtttagagtttgctttaatgacattgtatgtaaaaggtcacatgattgctgtaattttgtattcattatggtttcctcaataaatgtacattgatgactattaaaaaaaaaaac

SEQ ID NO: 284870 - DNA, 5689 bp, Homo sapiens
atcatggagcacatcaggaagctggcagattgcagcaaaaattggaggtgatgcagggacatcactgaattcaaatgactatggttatgggggacaaaaaagacctttagaagatggagatcaaccagatgctaagaaagttgctcctcaaaatgactcttttggaacacagttaccaccgatgcatcagcagcaaagcagatctgtaatgacagaagaatacaaagttccagatggaatggttggattcataattggcagaggaggtgaacagatctcacgcatacaacaggaatctggatgcaaaatacagatagctcctgacagtggtggccttccagaaaggtcctgtatgttaactggaacacctgaatctgtccagtcagcaaaacggttactggaccagattgttgaaaaaggaagaccagctcctggcttccatcatggcgatggaccgggaaatgcagttcaagaaatcatgattccagctagcaaggcaggattagtcattggaaaagggggagaaactattaaacagcttcaggaacgggctggagttaaaatggttatgattcaagacgggccgcagaacactggtgctgacaaacctcttaggattacaggagacccatataaagttcaacaagccaaggaaatggtgttagagttaattcgtgatcaaggcggtttcagagaagttcggaatgagtatgggtcaagaataggaggaaatgaagggatagatgtccccattccaagatttgctgttggcattgtaataggaagaaatggagagatgatcaaaaaaatacaaaatgatgctggtgttcgcattcagtttaagccagatgatgggacaacacccgaaaggatagcacaaataacaggacctccagaccgatgtcaacatgctgcagaaattattacagaccttcttcgaagtgttcaggctggtaatcctggtggacctggacctggtggtcgaggaagaggtagaggtcaaggcaactggaacatgggaccacctggtggactacaggaatttaattttattgtgccaactgggaaaactggattaataataggaaaaggaggtgaaaccataaaaagcataagccagcagtctggtgcaagaatagaacttcagagaaatcctccaccaaatgcagatcctaatatgaagttatttacaattcgtggcactccacaacagatagactatgctcggcaactcatagaagaaaagattggtggcccagtaaatcctttagggccacctgtaccccatgggccccatggtgtcccaggcccccatggacctcctgggcctccagggcctggaactccaatgggaccatacaaccctgcaccttataatcctggaccaccaggcccggctcctcatggtcctccagccccatatgctccccagggatggggaaatgcatatccacactggcagcagcaggctcctcctgatccagctaaggcaggaacggatccaaattcagcagcttgggctgcttattacgctcactattatcaacagcaagcacagccaccaccagcagcccctgcaggtgcaccaactacaactcaaactaatggacaaggagatcagcagaatccagccccagctggacaggttgattataccaaggcttgggaagagtactacaagaaaatgggtcaggcagttcctgctccgactggggctcctccaggtggtcagccagattatagtgcagcctgggctgagtattatagacaacaagcagcctattatgcccagacaagtccccagggaatgccacagcatcctccagcacctcagggccaataataagaagtggacaatacagtatttgcttcattgtgtgggggaaaaaaacctttgttaaatatatggatgcagacgacttgatgaagatcttaattttgtttttggtttaaaatagtgtttccttttttttttttttttttgaaaatgtacaaaatatctatcactactgataggaggttaatatttctgtgtagaaatgaaaattggtttgtttttagtatttagtgtagatgtacacattccagcaaatgtatttgcaattatgtggttgatgctttgtgatataaatgtactttttcaatgtatactttcacttttaaaatgcctgttttgtgctttacaataaatgatatgaaacctcctgtgtcggtaagttggatatgtgggtatttaaaggattcataatttcttagcaatgataaattaagatacatatacacaaatatataagctttccccatgaaatattgagtttttaaacactggcatgtttttccccccttgcagtatagtggtagattggaggatcttttccatttattgtattggctctttcagcacaagtaatcctgatatcttcattttttttccttctgtttgattaaaaactgcatgtgtgtacaatgatcttttggcatacttccattgcattaacagtgaaatttccttttatacatgaccactgtttcagacctgtactgctgctataacagttaacctttctgttcttaatttgataatacttgatttccaagactgtttcggcataactaattttaaacagttttcagatagtgaatatgagtagtctaataagaacagtttttttccatgtgaagcaactctttcaatgtatataatgttagtgtgtttctttctaaatttaggatagaaaagtgaatagtgtgcaaaaagtatagctacattgcatctgccattgaaacataaatggggtatggaaacgttcaagctttttttttttctttatgcagtatagataagctttgttttgtaaatgcacaagtccaatcattgaatcaacttaatttttttatgtacttgaagtcattttattactctttaacactcatgctgaagttctgatattttgttgaaatccattgttttactctttgcatatttgttggctctttgcatattaatatattagactacatgcaaatacagtctgtcttgccattgtctgttgaagtgcaggtttgatccagccagtatagaactagctctgtaggggtgaggaggactgtgctgtgtatcatccttgattgtgttccttcaaggagcattgcacttgccttcccagaccttccaccttaggttctgctgcaaaaagcaccaggtaagcacaacctaaggacatatataaataaatatttcaatacattaatgttgtccctgtgaggtttttgtggttgtgtattcaaaggcaatctgctactgcttccccaaaatgtattttgttattttatgctaccatcttagtggaaagtctgtaagttgttaaagcaactgtttacatttctgggtaatgttttttattttacttttttttttttattaagacaagaaaatgatgagtagattgctgcagtaattgaactacatccaaatctttttgtattttttccccaaatatagaagtgttaatattaagaaaggacaattacacagttttcaagatttaggaaatcacttgtttagaaacttcaacagccttcacaatctgttttatatgatggacagaaaatttctttgccctccaaaattataatttctttatttttttcttattcttaaactataataattcagtaaggatattatgggttagaattttattatgatttttttcttagacaaaagttatatgctgaagaaggaaaaagttataaggcagtatgttttgataaaaggcatgtgcatcagtgaaatgttaactgtatagcaaataacctttcataatctgtagcaatcagtatttttctgatttaataatattttaataactgacgctgcatttaatttttttgccagtttaaaatgtttgtgtgtttttatagatgattttaactggtacatattttgagttaagttgaatgtatgaaagcagcatcttatcagttttgtttattcgatttctaaaatgtgctgatccttttaaaactcctgcttatctctgcaacaaagaaaaatattcaaaaatactgccttcattttcacacacagtgctgaagatgctgcaagcaccaaatcatagctcataaaatcaggtcctgagatagttacccataaagaggaatcctttgagtgtatgccattggtgagccgatgagcatggaccatagaagggctcaatgtagaaggtaaaattggcaaatcataattgagaaatatgaaatgtattcccatacataatatggtatagggtgtaatgtacctgcttttgatcacttttcattttaaagtgctattcacttgatcttaaatgttccatgaactgttaaatttcttaagttacatagttactacaccacatttatgtgtatgttatgttttaatagtcaatgataggtatgtacaattgataatataaaggggctcattgaaacttgagagcctgttgagttttggttagttgtagattgcatttttataaaaaaaaatacagatagattgatgataatagatattggggcattgtttctgtctcatgagaattcttttattcattaccataagccttcactgatactataagcattattttaaatgacgctgatcttaagtctgaaataaatggaaagcagaaaaggtgagccagttgatttgaatgcattggatattagtgttagaaacaatgtatagtttagattgaaactgaactgacttatttagcacttaaacaaaaatttgacaatgtttttagttttttttaagacagcttagtgtggtgatacttagaattctatggtttgatgtttcttttagaaatgagaagtatagttttattttttaatataaaaaatggttttaatactaaaactagtaatttgatactagttgtttataaacattgtaaaatatatcttttaaacaaattatcttggtagttaattcataagggtgggtttgggtaggaatagcagagtactttcagagggaaaggggagtcattcagaagtgatagcattttatttgtttgaatactctgccagtaaaatcagctgtacttagaaagttatctgttgtgtagaataatgatgtagagtttactaatcagtgaggatgtcttgtttttattttctgcaaactctgcctcactttaaaatgcattataacaatacctaattaaagataattttggctctgaaagttaccttattttttgttgagttagtgacttcatttttcttgccacaatataagcttttgagggatttttttaaattggtgcttttaataagcaaataaatcccagggttttattttcttcagtgatacccctatagaaactcttaaatgtatttgcgcatatatatatatatattttcttatgcatgctcgatgcattttcgtcctgagaaaaatgttctctacagaaactacccgtgtgtaaaaagaagattggcttaaaatggctactgtgatgggaacagtgtcttagggagatgcagcttggacttgaggtaaattgaatactttacaactgtggtttagagtttgctttaatgacattgtatgtaaaaggtcacatgattgctgtaattttgtattcattatggtttcctcaataaatgtacattgatgactattaaaaaaaaaaac

SEQ ID NO: 284871 - DNA, 5947 bp, Homo sapiens
ggtaatagagcttcgacggcgacggccgccattttctttctttcttagctgttagctgagaggaagtctctgaacaggcggcagcggctcttatagtgcaaccatggcagactattcaacagtgcctcccccctcttctggctcagctggtggcggtggtggcggcggtggtggtggaggagttaacgacgctttcaaagatgcactgcagagagcccggcagattgcagcaaaaattggaggtgatgcagggacatcactgaattcaaatgactatggttatgggggacaaaaaagacctttagaagatggagatggctcttggacaagtccgagcagtacaacacactgggagggaatgccctctccttttaaagatcaaccagatgctaagaaagttgctcctcaaaatgactcttttggaacacagttaccaccgatgcatcagcagcaaagcagatctgtaatgacagaagaatacaaagttccagatggaatggttggattcataattggcagaggaggtgaacagatctcacgcatacaacaggaatctggatgcaaaatacagatagctcctgacagtggtggccttccagaaaggtcctgtatgttaactggaacacctgaatctgtccagtcagcaaaacggttactggaccagattgttgaaaaaggaagaccagctcctggcttccatcatggcgatggaccgggaaatgcagttcaagaaatcatgattccagctagcaaggcaggattagtcattggaaaagggggagaaactattaaacagcttcaggaacgggctggagttaaaatggttatgattcaagacgggccgcagaacactggtgctgacaaacctcttaggattacaggagacccatataaagttcaacaagccaaggaaatggtgttagagttaattcgtgatcaaggcggtttcagagaagttcggaatgagtatgggtcaagaataggaggaaatgaagggatagatgtccccattccaagatttgctgttggcattgtaataggaagaaatggagagatgatcaaaaaaatacaaaatgatgctggtgttcgcattcagtttaagccagatgatgggacaacacccgaaaggatagcacaaataacaggacctccagaccgatgtcaacatgctgcagaaattattacagaccttcttcgaagtgttcaggctggtaatcctggtggacctggacctggtggtcgaggaagaggtagaggtcaaggcaactggaacatgggaccacctggtggactacaggaatttaattttattgtgccaactgggaaaactggattaataataggaaaaggaggtgaaaccataaaaagcataagccagcagtctggtgcaagaatagaacttcagagaaatcctccaccaaatgcagatcctaatatgaagttatttacaattcgtggcactccacaacagatagactatgctcggcaactcatagaagaaaagattggtggcccagtaaatcctttagggccacctgtaccccatgggccccatggtgtcccaggcccccatggacctcctgggcctccagggcctggaactccaatgggaccatacaaccctgcaccttataatcctggaccaccaggcccggctcctcatggtcctccagccccatatgctccccagggatggggaaatgcatatccacactggcagcagcaggctcctcctgatccagctaaggcaggaacggatccaaattcagcagcttgggctgcttattacgctcactattatcaacagcaagcacagccaccaccagcagcccctgcaggtgcaccaactacaactcaaactaatggacaaggagatcagcagaatccagccccagctggacaggttgattataccaaggcttgggaagagtactacaagaaaatgggtcaggcagttcctgctccgactggggctcctccaggtggtcagccagattatagtgcagcctgggctgagtattatagacaacaagcagcctattatgcccagacaagtccccagggaatgccacagcatcctccagcacctcagggccaataataagaagtggacaatacagtatttgcttcattgtgtgggggaaaaaaacctttgttaaatatatggatgcagacgacttgatgaagatcttaattttgtttttggtttaaaatagtgtttccttttttttttttttttttgaaaatgtacaaaatatctatcactactgataggaggttaatatttctgtgtagaaatgaaaattggtttgtttttagtatttagtgtagatgtacacattccagcaaatgtatttgcaattatgtggttgatgctttgtgatataaatgtactttttcaatgtatactttcacttttaaaatgcctgttttgtgctttacaataaatgatatgaaacctcctgtgtcggtaagttggatatgtgggtatttaaaggattcataatttcttagcaatgataaattaagatacatatacacaaatatataagctttccccatgaaatattgagtttttaaacactggcatgtttttccccccttgcagtatagtggtagattggaggatcttttccatttattgtattggctctttcagcacaagtaatcctgatatcttcattttttttccttctgtttgattaaaaactgcatgtgtgtacaatgatcttttggcatacttccattgcattaacagtgaaatttccttttatacatgaccactgtttcagacctgtactgctgctataacagttaacctttctgttcttaatttgataatacttgatttccaagactgtttcggcataactaattttaaacagttttcagatagtgaatatgagtagtctaataagaacagtttttttccatgtgaagcaactctttcaatgtatataatgttagtgtgtttctttctaaatttaggatagaaaagtgaatagtgtgcaaaaagtatagctacattgcatctgccattgaaacataaatggggtatggaaacgttcaagctttttttttttctttatgcagtatagataagctttgttttgtaaatgcacaagtccaatcattgaatcaacttaatttttttatgtacttgaagtcattttattactctttaacactcatgctgaagttctgatattttgttgaaatccattgttttactctttgcatatttgttggctctttgcatattaatatattagactacatgcaaatacagtctgtcttgccattgtctgttgaagtgcaggtttgatccagccagtatagaactagctctgtaggggtgaggaggactgtgctgtgtatcatccttgattgtgttccttcaaggagcattgcacttgccttcccagaccttccaccttaggttctgctgcaaaaagcaccaggtaagcacaacctaaggacatatataaataaatatttcaatacattaatgttgtccctgtgaggtttttgtggttgtgtattcaaaggcaatctgctactgcttccccaaaatgtattttgttattttatgctaccatcttagtggaaagtctgtaagttgttaaagcaactgtttacatttctgggtaatgttttttattttacttttttttttttattaagacaagaaaatgatgagtagattgctgcagtaattgaactacatccaaatctttttgtattttttccccaaatatagaagtgttaatattaagaaaggacaattacacagttttcaagatttaggaaatcacttgtttagaaacttcaacagccttcacaatctgttttatatgatggacagaaaatttctttgccctccaaaattataatttctttatttttttcttattcttaaactataataattcagtaaggatattatgggttagaattttattatgatttttttcttagacaaaagttatatgctgaagaaggaaaaagttataaggcagtatgttttgataaaaggcatgtgcatcagtgaaatgttaactgtatagcaaataacctttcataatctgtagcaatcagtatttttctgatttaataatattttaataactgacgctgcatttaatttttttgccagtttaaaatgtttgtgtgtttttatagatgattttaactggtacatattttgagttaagttgaatgtatgaaagcagcatcttatcagttttgtttattcgatttctaaaatgtgctgatccttttaaaactcctgcttatctctgcaacaaagaaaaatattcaaaaatactgccttcattttcacacacagtgctgaagatgctgcaagcaccaaatcatagctcataaaatcaggtcctgagatagttacccataaagaggaatcctttgagtgtatgccattggtgagccgatgagcatggaccatagaagggctcaatgtagaaggtaaaattggcaaatcataattgagaaatatgaaatgtattcccatacataatatggtatagggtgtaatgtacctgcttttgatcacttttcattttaaagtgctattcacttgatcttaaatgttccatgaactgttaaatttcttaagttacatagttactacaccacatttatgtgtatgttatgttttaatagtcaatgataggtatgtacaattgataatataaaggggctcattgaaacttgagagcctgttgagttttggttagttgtagattgcatttttataaaaaaaaatacagatagattgatgataatagatattggggcattgtttctgtctcatgagaattcttttattcattaccataagccttcactgatactataagcattattttaaatgacgctgatcttaagtctgaaataaatggaaagcagaaaaggtgagccagttgatttgaatgcattggatattagtgttagaaacaatgtatagtttagattgaaactgaactgacttatttagcacttaaacaaaaatttgacaatgtttttagttttttttaagacagcttagtgtggtgatacttagaattctatggtttgatgtttcttttagaaatgagaagtatagttttattttttaatataaaaaatggttttaatactaaaactagtaatttgatactagttgtttataaacattgtaaaatatatcttttaaacaaattatcttggtagttaattcataagggtgggtttgggtaggaatagcagagtactttcagagggaaaggggagtcattcagaagtgatagcattttatttgtttgaatactctgccagtaaaatcagctgtacttagaaagttatctgttgtgtagaataatgatgtagagtttactaatcagtgaggatgtcttgtttttattttctgcaaactctgcctcactttaaaatgcattataacaatacctaattaaagataattttggctctgaaagttaccttattttttgttgagttagtgacttcatttttcttgccacaatataagcttttgagggatttttttaaattggtgcttttaataagcaaataaatcccagggttttattttcttcagtgatacccctatagaaactcttaaatgtatttgcgcatatatatatatatattttcttatgcatgctcgatgcattttcgtcctgagaaaaatgttctctacagaaactacccgtgtgtaaaaagaagattggcttaaaatggctactgtgatgggaacagtgtcttagggagatgcagcttggacttgaggtaaattgaatactttacaactgtggtttagagtttgctttaatgacattgtatgtaaaaggtcacatgattgctgtaattttgtattcattatggtttcctcaataaatgtacattgatgactattaaaaaaaaaaac

SEQ ID NO: 284872 - DNA, 5254 bp, Homo sapiens
aacgttgggcccatcctatgcaaagtgtttctgagtaagacatagttcctttctttaaggagcctaaaatcctttggaaatcaaacgtaatataaggagcctgaactttggagtcatatgttcagtttcaaattttgtgctgcctattatatgtctggcattatacatatgctgtctcatttaatttttacatcgattaaggtcattatttatgaatgaggaaattaagttcaaaggggtaactaacttttaccaaagtgacttgtcagacatggtggagctgggaaaggatggggccaactttatgtcggtccccattccaagatttgctgttggcattgtaataggaagaaatggagagatgatcaaaaaaatacaaaatgatgctggtgttcgcattcagtttaagccagatgatgggacaacacccgaaaggatagcacaaataacaggacctccagaccgatgtcaacatgctgcagaaattattacagaccttcttcgaagtgttcaggctggtaatcctggtggacctggacctggtggtcgaggaagaggtagaggtcaaggcaactggaacatgggaccacctggtggactacaggaatttaattttattgtgccaactgggaaaactggattaataataggaaaaggaggtgaaaccataaaaagcataagccagcagtctggtgcaagaatagaacttcagagaaatcctccaccaaatgcagatcctaatatgaagttatttacaattcgtggcactccacaacagatagactatgctcggcaactcatagaagaaaagattggtggcccagtaaatcctttagggccacctgtaccccatgggccccatggtgtcccaggcccccatggacctcctgggcctccagggcctggaactccaatgggaccatacaaccctgcaccttataatcctggaccaccaggcccggctcctcatggtcctccagccccatatgctccccagggatggggaaatgcatatccacactggcagcagcaggctcctcctgatccagctaaggcaggaacggatccaaattcagcagcttgggctgcttattacgctcactattatcaacagcaagcacagccaccaccagcagcccctgcaggtgcaccaactacaactcaaactaatggacaaggagatcagcagaatccagccccagctggacaggttgattataccaaggcttgggaagagtactacaagaaaatgggtcaggcagttcctgctccgactggggctcctccaggtggtcagccagattatagtgcagcctgggctgagtattatagacaacaagcagcctattatgcccagacaagtccccagggaatgccacagcatcctccagcacctcagggccaataataagaagtggacaatacagtatttgcttcattgtgtgggggaaaaaaacctttgttaaatatatggatgcagacgacttgatgaagatcttaattttgtttttggtttaaaatagtgtttccttttttttttttttttttgaaaatgtacaaaatatctatcactactgataggaggttaatatttctgtgtagaaatgaaaattggtttgtttttagtatttagtgtagatgtacacattccagcaaatgtatttgcaattatgtggttgatgctttgtgatataaatgtactttttcaatgtatactttcacttttaaaatgcctgttttgtgctttacaataaatgatatgaaacctcctgtgtcggtaagttggatatgtgggtatttaaaggattcataatttcttagcaatgataaattaagatacatatacacaaatatataagctttccccatgaaatattgagtttttaaacactggcatgtttttccccccttgcagtatagtggtagattggaggatcttttccatttattgtattggctctttcagcacaagtaatcctgatatcttcattttttttccttctgtttgattaaaaactgcatgtgtgtacaatgatcttttggcatacttccattgcattaacagtgaaatttccttttatacatgaccactgtttcagacctgtactgctgctataacagttaacctttctgttcttaatttgataatacttgatttccaagactgtttcggcataactaattttaaacagttttcagatagtgaatatgagtagtctaataagaacagtttttttccatgtgaagcaactctttcaatgtatataatgttagtgtgtttctttctaaatttaggatagaaaagtgaatagtgtgcaaaaagtatagctacattgcatctgccattgaaacataaatggggtatggaaacgttcaagctttttttttttctttatgcagtatagataagctttgttttgtaaatgcacaagtccaatcattgaatcaacttaatttttttatgtacttgaagtcattttattactctttaacactcatgctgaagttctgatattttgttgaaatccattgttttactctttgcatatttgttggctctttgcatattaatatattagactacatgcaaatacagtctgtcttgccattgtctgttgaagtgcaggtttgatccagccagtatagaactagctctgtaggggtgaggaggactgtgctgtgtatcatccttgattgtgttccttcaaggagcattgcacttgccttcccagaccttccaccttaggttctgctgcaaaaagcaccaggtaagcacaacctaaggacatatataaataaatatttcaatacattaatgttgtccctgtgaggtttttgtggttgtgtattcaaaggcaatctgctactgcttccccaaaatgtattttgttattttatgctaccatcttagtggaaagtctgtaagttgttaaagcaactgtttacatttctgggtaatgttttttattttacttttttttttttattaagacaagaaaatgatgagtagattgctgcagtaattgaactacatccaaatctttttgtattttttccccaaatatagaagtgttaatattaagaaaggacaattacacagttttcaagatttaggaaatcacttgtttagaaacttcaacagccttcacaatctgttttatatgatggacagaaaatttctttgccctccaaaattataatttctttatttttttcttattcttaaactataataattcagtaaggatattatgggttagaattttattatgatttttttcttagacaaaagttatatgctgaagaaggaaaaagttataaggcagtatgttttgataaaaggcatgtgcatcagtgaaatgttaactgtatagcaaataacctttcataatctgtagcaatcagtatttttctgatttaataatattttaataactgacgctgcatttaatttttttgccagtttaaaatgtttgtgtgtttttatagatgattttaactggtacatattttgagttaagttgaatgtatgaaagcagcatcttatcagttttgtttattcgatttctaaaatgtgctgatccttttaaaactcctgcttatctctgcaacaaagaaaaatattcaaaaatactgccttcattttcacacacagtgctgaagatgctgcaagcaccaaatcatagctcataaaatcaggtcctgagatagttacccataaagaggaatcctttgagtgtatgccattggtgagccgatgagcatggaccatagaagggctcaatgtagaaggtaaaattggcaaatcataattgagaaatatgaaatgtattcccatacataatatggtatagggtgtaatgtacctgcttttgatcacttttcattttaaagtgctattcacttgatcttaaatgttccatgaactgttaaatttcttaagttacatagttactacaccacatttatgtgtatgttatgttttaatagtcaatgataggtatgtacaattgataatataaaggggctcattgaaacttgagagcctgttgagttttggttagttgtagattgcatttttataaaaaaaaatacagatagattgatgataatagatattggggcattgtttctgtctcatgagaattcttttattcattaccataagccttcactgatactataagcattattttaaatgacgctgatcttaagtctgaaataaatggaaagcagaaaaggtgagccagttgatttgaatgcattggatattagtgttagaaacaatgtatagtttagattgaaactgaactgacttatttagcacttaaacaaaaatttgacaatgtttttagttttttttaagacagcttagtgtggtgatacttagaattctatggtttgatgtttcttttagaaatgagaagtatagttttattttttaatataaaaaatggttttaatactaaaactagtaatttgatactagttgtttataaacattgtaaaatatatcttttaaacaaattatcttggtagttaattcataagggtgggtttgggtaggaatagcagagtactttcagagggaaaggggagtcattcagaagtgatagcattttatttgtttgaatactctgccagtaaaatcagctgtacttagaaagttatctgttgtgtagaataatgatgtagagtttactaatcagtgaggatgtcttgtttttattttctgcaaactctgcctcactttaaaatgcattataacaatacctaattaaagataattttggctctgaaagttaccttattttttgttgagttagtgacttcatttttcttgccacaatataagcttttgagggatttttttaaattggtgcttttaataagcaaataaatcccagggttttattttcttcagtgatacccctatagaaactcttaaatgtatttgcgcatatatatatatatattttcttatgcatgctcgatgcattttcgtcctgagaaaaatgttctctacagaaactacccgtgtgtaaaaagaagattggcttaaaatggctactgtgatgggaacagtgtcttagggagatgcagcttggacttgaggtaaattgaatactttacaactgtggtttagagtttgctttaatgacattgtatgtaaaaggtcacatgattgctgtaattttgtattcattatggtttcctcaataaatgtacattgatgactattaaaaaaaaaaac

SEQ ID NO: 284873 - DNA, 4974 bp, Homo sapiens
tgctgcgtcgttctagaggatcccaatgttgtccccattccaagatttgctgttggcattgtaataggaagaaatggagagatgatcaaaaaaatacaaaatgatgctggtgttcgcattcagtttaagccagatgatgggacaacacccgaaaggatagcacaaataacaggacctccagaccgatgtcaacatgctgcagaaattattacagaccttcttcgaagtgttcaggctggtaatcctggtggacctggacctggtggtcgaggaagaggtagaggtcaaggcaactggaacatgggaccacctggtggactacaggaatttaattttattgtgccaactgggaaaactggattaataataggaaaaggaggtgaaaccataaaaagcataagccagcagtctggtgcaagaatagaacttcagagaaatcctccaccaaatgcagatcctaatatgaagttatttacaattcgtggcactccacaacagatagactatgctcggcaactcatagaagaaaagattggtggcccagtaaatcctttagggccacctgtaccccatgggccccatggtgtcccaggcccccatggacctcctgggcctccagggcctggaactccaatgggaccatacaaccctgcaccttataatcctggaccaccaggcccggctcctcatggtcctccagccccatatgctccccagggatggggaaatgcatatccacactggcagcagcaggctcctcctgatccagctaaggcaggaacggatccaaattcagcagcttgggctgcttattacgctcactattatcaacagcaagcacagccaccaccagcagcccctgcaggtgcaccaactacaactcaaactaatggacaaggagatcagcagaatccagccccagctggacaggttgattataccaaggcttgggaagagtactacaagaaaatgggtcaggcagttcctgctccgactggggctcctccaggtggtcagccagattatagtgcagcctgggctgagtattatagacaacaagcagcctattatgcccagacaagtccccagggaatgccacagcatcctccagcacctcagggccaataataagaagtggacaatacagtatttgcttcattgtgtgggggaaaaaaacctttgttaaatatatggatgcagacgacttgatgaagatcttaattttgtttttggtttaaaatagtgtttccttttttttttttttttttgaaaatgtacaaaatatctatcactactgataggaggttaatatttctgtgtagaaatgaaaattggtttgtttttagtatttagtgtagatgtacacattccagcaaatgtatttgcaattatgtggttgatgctttgtgatataaatgtactttttcaatgtatactttcacttttaaaatgcctgttttgtgctttacaataaatgatatgaaacctcctgtgtcggtaagttggatatgtgggtatttaaaggattcataatttcttagcaatgataaattaagatacatatacacaaatatataagctttccccatgaaatattgagtttttaaacactggcatgtttttccccccttgcagtatagtggtagattggaggatcttttccatttattgtattggctctttcagcacaagtaatcctgatatcttcattttttttccttctgtttgattaaaaactgcatgtgtgtacaatgatcttttggcatacttccattgcattaacagtgaaatttccttttatacatgaccactgtttcagacctgtactgctgctataacagttaacctttctgttcttaatttgataatacttgatttccaagactgtttcggcataactaattttaaacagttttcagatagtgaatatgagtagtctaataagaacagtttttttccatgtgaagcaactctttcaatgtatataatgttagtgtgtttctttctaaatttaggatagaaaagtgaatagtgtgcaaaaagtatagctacattgcatctgccattgaaacataaatggggtatggaaacgttcaagctttttttttttctttatgcagtatagataagctttgttttgtaaatgcacaagtccaatcattgaatcaacttaatttttttatgtacttgaagtcattttattactctttaacactcatgctgaagttctgatattttgttgaaatccattgttttactctttgcatatttgttggctctttgcatattaatatattagactacatgcaaatacagtctgtcttgccattgtctgttgaagtgcaggtttgatccagccagtatagaactagctctgtaggggtgaggaggactgtgctgtgtatcatccttgattgtgttccttcaaggagcattgcacttgccttcccagaccttccaccttaggttctgctgcaaaaagcaccaggtaagcacaacctaaggacatatataaataaatatttcaatacattaatgttgtccctgtgaggtttttgtggttgtgtattcaaaggcaatctgctactgcttccccaaaatgtattttgttattttatgctaccatcttagtggaaagtctgtaagttgttaaagcaactgtttacatttctgggtaatgttttttattttacttttttttttttattaagacaagaaaatgatgagtagattgctgcagtaattgaactacatccaaatctttttgtattttttccccaaatatagaagtgttaatattaagaaaggacaattacacagttttcaagatttaggaaatcacttgtttagaaacttcaacagccttcacaatctgttttatatgatggacagaaaatttctttgccctccaaaattataatttctttatttttttcttattcttaaactataataattcagtaaggatattatgggttagaattttattatgatttttttcttagacaaaagttatatgctgaagaaggaaaaagttataaggcagtatgttttgataaaaggcatgtgcatcagtgaaatgttaactgtatagcaaataacctttcataatctgtagcaatcagtatttttctgatttaataatattttaataactgacgctgcatttaatttttttgccagtttaaaatgtttgtgtgtttttatagatgattttaactggtacatattttgagttaagttgaatgtatgaaagcagcatcttatcagttttgtttattcgatttctaaaatgtgctgatccttttaaaactcctgcttatctctgcaacaaagaaaaatattcaaaaatactgccttcattttcacacacagtgctgaagatgctgcaagcaccaaatcatagctcataaaatcaggtcctgagatagttacccataaagaggaatcctttgagtgtatgccattggtgagccgatgagcatggaccatagaagggctcaatgtagaaggtaaaattggcaaatcataattgagaaatatgaaatgtattcccatacataatatggtatagggtgtaatgtacctgcttttgatcacttttcattttaaagtgctattcacttgatcttaaatgttccatgaactgttaaatttcttaagttacatagttactacaccacatttatgtgtatgttatgttttaatagtcaatgataggtatgtacaattgataatataaaggggctcattgaaacttgagagcctgttgagttttggttagttgtagattgcatttttataaaaaaaaatacagatagattgatgataatagatattggggcattgtttctgtctcatgagaattcttttattcattaccataagccttcactgatactataagcattattttaaatgacgctgatcttaagtctgaaataaatggaaagcagaaaaggtgagccagttgatttgaatgcattggatattagtgttagaaacaatgtatagtttagattgaaactgaactgacttatttagcacttaaacaaaaatttgacaatgtttttagttttttttaagacagcttagtgtggtgatacttagaattctatggtttgatgtttcttttagaaatgagaagtatagttttattttttaatataaaaaatggttttaatactaaaactagtaatttgatactagttgtttataaacattgtaaaatatatcttttaaacaaattatcttggtagttaattcataagggtgggtttgggtaggaatagcagagtactttcagagggaaaggggagtcattcagaagtgatagcattttatttgtttgaatactctgccagtaaaatcagctgtacttagaaagttatctgttgtgtagaataatgatgtagagtttactaatcagtgaggatgtcttgtttttattttctgcaaactctgcctcactttaaaatgcattataacaatacctaattaaagataattttggctctgaaagttaccttattttttgttgagttagtgacttcatttttcttgccacaatataagcttttgagggatttttttaaattggtgcttttaataagcaaataaatcccagggttttattttcttcagtgatacccctatagaaactcttaaatgtatttgcgcatatatatatatatattttcttatgcatgctcgatgcattttcgtcctgagaaaaatgttctctacagaaactacccgtgtgtaaaaagaagattggcttaaaatggctactgtgatgggaacagtgtcttagggagatgcagcttggacttgaggtaaattgaatactttacaactgtggtttagagtttgctttaatgacattgtatgtaaaaggtcacatgattgctgtaattttgtattcattatggtttcctcaataaatgtacattgatgactattaaaaaaaaaaac

SEQ ID NO: 284874 - DNA, 4648 bp, Homo sapiens
ggtaatagagcttcgacggcgacggccgccattttctttctttcttagctgttagctgagaggaagtctctgaacaggcggcagcggctcttatagtgcaaccatggcagactattcaacagtgcctcccccctcttctggctcagctggtggcggtggtggcggcggtggtggtggaggagttaacgacgctttcaaagatgcactgcagagagcccggcagattgcagcaaaaattggaggtgatgcagggacatcactgaattcaaatgactatggttatgggggacaaaaaagacctttagaagatggagatcaaccagatgctaagaaagttgctcctcaaaatgactcttttggaacacagttaccaccgatgcatcagcagcaaagcagatctgtaatgacagaagaatacaaagttccagatggaatggttggattcataattggcagaggaggtgaacagatctcacgcatacaacaggaatctggatgcaaaatacagatagctcctgacagtggtggccttccagaaaggtcctgtatgttaactggaacacctgaatctgtccagtcagcaaaacggttactggaccagattgttgaaaaaggaagaccagctcctggcttccatcatggcgatggaccgggaaatgcagttcaagaaatcatgattccagctagcaaggcaggattagtcattggaaaagggggagaaactattaaacagcttcaggaacgggctggagttaaaatggttatgattcaagacgggccgcagaacactggtgctgacaaacctcttaggattacaggagacccatataaagttcaacaagccaaggaaatggtgttagagttaattcgtgatcaaggcggtttcagagaagttcggaatgagtatgggtcaagaataggaggaaatgaagggatagatgtccccattccaagatttgctgttggcattgtaataggaagaaatggagagatgatcaaaaaaatacaaaatgatgctggtgttcgcattcagtttaagccagatgatgggacaacacccgaaaggatagcacaaataacaggacctccagaccgatgtcaacatgctgcagaaattattacagaccttcttcgaagtgttcaggctggtaatcctggtggacctggacctggtggtcgaggaagaggtagaggtcaaggcaactggaacatgggaccacctggtggactacaggaatttaattttattgtgccaactgggaaaactggattaataataggaaaaggaggtgaaaccataaaaagcataagccagcagtctggtgcaagaatagaacttcagagaaatcctccaccaaatgcagatcctaatatgaagttatttacaattcgtggcactccacaacagatagactatgctcggcaactcatagaagaaaagattggtggcccagtaaatcctttagggccacctgtaccccatgggccccatggtgtcccaggcccccatggacctcctgggcctccagggcctggaactccaatgggaccatacaaccctgcaccttataatcctggaccaccaggcccggctcctcatggtcctccagccccatatgctccccagggatggggaaatgcatatccacactggcagcagcaggctcctcctgatccagctaaggcaggaacggatccaaattcagcagcttgggctgcttattacgctcactattatcaacagcaagcacagccaccaccagcagcccctgcaggtgcaccaactacaactcaaactaatggacaaggagatcagcagaatccagccccagctggacaggttgattataccaaggcttgggaagagtactacaagaaaatgggtcaggcagttcctgctccgactggggctcctccaggtggtcagccagattatagtgcagcctgggctgagtattatagacaacaagcagcctattatgcccagacaagtccccagggaatgccacagcatcctccagcacctcagggccaataataagaagtggacaatacagtatttgcttcattgtgtgggggaaaaaaacctttgttaaatatatggatgcagacgacttgatgaagatcttaattttgtttttggtttaaaatagtgtttccttttttttttttttttttgaaaatgtacaaaatatctatcactactgataggaggttaatatttctgtgtagaaatgaaaattggtttgtttttagtatttagtgtagatgtacacattccagcaaatgtatttgcaattatgtggttgatgctttgtgatataaatgtactttttcaatgtatactttcacttttaaaatgcctgttttgtgctttacaataaatgatatgaaacctcctgtgtcggtaagttggatatgtgggtatttaaaggattcataatttcttagcaatgataaattaagatacatatacacaaatatataagctttccccatgaaatattgagtttttaaacactggcatgtttttccccccttgcagtatagtggtagattggaggatcttttccatttattgtattggctctttcagcacaagtaatcctgatatcttcattttttttccttctgtttgattaaaaactgcatgtgtgtacaatgatcttttggcatacttccattgcattaacagtgaaatttccttttatacatgaccactgtttcagacctgtactgctgctataacagttaacctttctgttcttaatttgataatacttgatttccaagactgtttcggcataactaattttaaacagttttcagatagtgaatatgagtagtctaataagaacagtttttttccatgtgaagcaactctttcaatgtatataatgttagtgtgtttctttctaaatttaggatagaaaagtgaatagtgtgcaaaaagtatagctacattgcatctgccattgaaacataaatggggtatggaaacgttcaagctttttttttttctttatgcagtatagataagctttgttttgtaaatgcacaagtccaatcattgaatcaacttaatttttttatgtacttgaagtcattttattactctttaacactcatgctgaagttctgatattttgttgaaatccattgttttactctttgcatatttgttggctctttgcatattaatatattagactacatgcaaatacagtctgtcttgccattgtctgttgaagtgcaggtttgatccagccagtatagaactagctctgtaggggtgaggaggactgtgctgtgtatcatccttgattgtgttccttcaaggagcattgcacttgccttcccagaccttccaccttaggttctgctgcaaaaagcaccaggtaagcacaacctaaggacatatataaataaatatttcaatacattaatgttgtccctgtgaggtttttgtggttgtgtattcaaaggcaatctgctactgcttccccaaaatgtattttgttattttatgctaccatcttagtggaaagtctgtaagttgttaaagcaactgtttacatttctgggtaatgttttttattttacttttttttttttattaagacaagaaaatgatgagtagattgctgcagtaattgaactacatccaaatctttttgtattttttccccaaatatagaagtgttaatattaagaaaggacaattacacagttttcaagatttaggaaatcacttgtttagaaacttcaacagccttcacaatctgttttatatgatggacagaaaatttctttgccctccaaaattataatttctttatttttttcttattcttaaactataataattcagtaaggatattatgggttagaattttattatgatttttttcttagacaaaagttatatgctgaagaaggaaaaagttataaggcagtatgttttgataaaaggcatgtgcatcagtgaaatgttaactgtatagcaaataacctttcataatctgtagcaatcagtatttttctgatttaataatattttaataactgacgctgcatttaatttttttgccagtttaaaatgtttgtgtgtttttatagatgattttaactggtacatattttgagttaagttgaatgtatgaaagcagcatcttatcagttttgtttattcgatttctaaaatgtgctgatccttttaaaactcctgcttatctctgcaacaaagaaaaatattcaaaaatactgccttcattttcacacacagtgctgaagatgctgcaagcaccaaatcatagctcataaaatcaggtcctgagatagttacccataaagaggaatcctttgagtgtatgccattggtgagccgatgagcatggaccatagaagggctcaatgtagaagaaactacccgtgtgtaaaaagaagattggcttaaaatggctactgtgatgggaacagtgtcttagggagatgcagcttggacttgaggtaaattgaatactttacaactgtggtttagagtttgctttaatgacattgtatgtaaaaggtcacatgattgctgtaattttgtattcattatggtttcctcaataaatgtacattgatgactattaaaaaaaaaaac

SEQ ID NO: 284875 - DNA, 3761 bp, Homo sapiens
ggtaatagagcttcgacggcgacggccgccattttctttctttcttagctgttagctgagaggaagtctctgaacaggcggcagcggctcttatagtgcaaccatggcagactattcaacagtgcctcccccctcttctggctcagctggtggcggtggtggcggcggtggtggtggaggagttaacgacgctttcaaagatgcactgcagagagcccggcagattgcagcaaaaattggaggtgatgcagggacatcactgaattcaaatgactatggttatgggggacaaaaaagacctttagaagatggagatcaaccagatgctaagaaagttgctcctcaaaatgactcttttggaacacagttaccaccgatgcatcagcagcaaagcagatctgtaatgacagaagaatacaaagttccagatggaatggttggattcataattggcagaggaggtgaacagatctcacgcatacaacaggaatctggatgcaaaatacagatagctcctgacagtggtggccttccagaaaggtcctgtatgttaactggaacacctgaatctgtccagtcagcaaaacggttactggaccagattgttgaaaaaggaagaccagctcctggcttccatcatggcgatggaccgggaaatgcagttcaagaaatcatgattccagctagcaaggcaggattagtcattggaaaagggggagaaactattaaacagcttcaggaacgggctggagttaaaatggttatgattcaagacgggccgcagaacactggtgctgacaaacctcttaggattacaggagacccatataaagttcaacaagccaaggaaatggtgttagagttaattcgtgatcaaggcggtttcagagaagttcggaatgagtatgggtcaagaataggaggaaatgaagggatagatgtccccattccaagatttgctgttggcattgtaataggaagaaatggagagatgatcaaaaaaatacaaaatgatgctggtgttcgcattcagtttaagccagatgatgggacaacacccgaaaggatagcacaaataacaggacctccagaccgatgtcaacatgctgcagaaattattacagaccttcttcgaagtgttcaggctggtaatcctggtggacctggacctggtggtcgaggaagaggtagaggtcaaggcaactggaacatgggaccacctggtggactacaggaatttaattttattgtgccaactgggaaaactggattaataataggaaaaggaggtgaaaccataaaaagcataagccagcagtctggtgcaagaatagaacttcagagaaatcctccaccaaatgcagatcctaatatgaagttatttacaattcgtggcactccacaacagatagactatgctcggcaactcatagaagaaaagattggtggcccagtaaatcctttagggccacctgtaccccatgggccccatggtgtcccaggcccccatggacctcctgggcctccagggcctggaactccaatgggaccatacaaccctgcaccttataatcctggaccaccaggcccggctcctcatggtcctccagccccatatgctccccagggatggggaaatgcatatccacactggcagcagcaggctcctcctgatccagctaaggcaggaacggatccaaattcagcagcttgggctgcttattacgctcactattatcaacagcaagcacagccaccaccagcagcccctgcaggtgcaccaactacaactcaaactaatggacaaggagatcagcagaatccagccccagctggacaggttgattataccaaggcttgggaagagtactacaagaaaatgggtcaggcagttcctgctccgactggggctcctccaggtggtcagccagattatagtgcagcctgggctgagtattatagacaacaagcagcctattatgcccagacaagtccccagggaatgccacagcatcctccagcacctcagggccaataataagaagtggacaatacagtatttgcttcattgtgtgggggaaaaaaacctttgttaaatatatggatgcagacgacttgatgaagatcttaattttgtttttggtttaaaatagtgtttccttttttttttttttttttgaaaatgtacaaaatatctatcactactgataggaggttaatatttctgtgtagaaatgaaaattggtttgtttttagtatttagtgtagatgtacacattccagcaaatgtatttgcaattatgtggttgatgctttgtgatataaatgtactttttcaatgtatactttcacttttaaaatgcctgttttgtgctttacaataaatgatatgaaacctcctgtgtcggtaagttggatatgtgggtatttaaaggattcataatttcttagcaatgataaattaagatacatatacacaaatatataagctttccccatgaaatattgagtttttaaacactggcatgtttttccccccttgcagtatagtggtagattggaggatcttttccatttattgtattggctctttcagcacaagtaatcctgatatcttcattttttttccttctgtttgattaaaaactgcatgtgtgtacaatgatcttttggcatacttccattgcattaacagtgaaatttccttttatacatgaccactgtttcagacctgtactgctgctataacagttaacctttctgttcttaatttgataatacttgatttccaagactgtttcggcataactaattttaaacagttttcagatagtgaatatgagtagtctaataagaacagtttttttccatgtgaagcaactctttcaatgtatataatgttagtgtgtttctttctaaatttaggatagaaaagtgaatagtgtgcaaaaagtatagctacattgcatctgccattgaaacataaatggggtatggaaacgttcaagctttttttttttctttatgcagtatagataagctttgttttgtaaatgcacaagtccaatcattgaatcaacttaatttttttatgtacttgaagtcattttattactctttaacactcatgctgaagttctgatattttgttgaaatccattgttttactctttgcatatttgttggctctttgcatattaatatattagactacatgcaaatacagtctgtcttgccattgtctgttgaagtgcaggtttgatccagccagtatagaactagctctgtaggggtgaggaggactgtgctgtgtatcatccttgattgtgttccttcaaggagcattgcacttgccttcccagaccttccaccttaggttctgctgcaaaaagcaccagtgctgaagatgctgcaagcaccaaatcatagctcataaaatcaggtcctgagatagttacccataaagaggaatcctttgagtgtatgccattggtgagccgatgagcatggaccatagaagggctcaatgtagaagaaactacccgtgtgtaaaaagaagattggcttaaaatggctactgtgatgggaacagtgtcttagggagatgcagcttggacttgaggtaaattgaatactttacaactgtggtttagagtttgctttaatgacattgtatgtaaaaggtcacatgattgctgtaattttgtattcattatggtttcctcaataaatgtacattgatgactattaaaaaaaaaaac

SEQ ID NO: 284876 - DNA, 2399 bp, Homo sapiens
ggtaatagagcttcgacggcgacggccgccattttctttctttcttagctgttagctgagaggaagtctctgaacaggcggcagcggctcttatagtgcaaccatggcagactattcaacagtgcctcccccctcttctggctcagctggtggcggtggtggcggcggtggtggtggaggagttaacgacgctttcaaagatgcactgcagagagcccggcagattgcagcaaaaattggaggtgatgcagggacatcactgaattcaaatgactatggttatgggggacaaaaaagacctttagaagatggagatcaaccagatgctaagaaagttgctcctcaaaatgactcttttggaacacagttaccaccgatgcatcagcagcaaagcagatctgtaatgacagaagaatacaaagttccagatggaatggttggattcataattggcagaggaggtgaacagatctcacgcatacaacaggaatctggatgcaaaatacagatagctcctgacagtggtggccttccagaaaggtcctgtatgttaactggaacacctgaatctgtccagtcagcaaaacggttactggaccagattgttgaaaaaggaagaccagctcctggcttccatcatggcgatggaccgggaaatgcagttcaagaaatcatgattccagctagcaaggcaggattagtcattggaaaagggggagaaactattaaacagcttcaggaacgggctggagttaaaatggttatgattcaagacgggccgcagaacactggtgctgacaaacctcttaggattacaggagacccatataaagttcaacaagccaaggaaatggtgttagagttaattcgtgatcaaggcggtttcagagaagttcggaatgagtatgggtcaagaataggaggaaatgaagggatagatgtccccattccaagatttgctgttggcattgtaataggaagaaatggagagatgatcaaaaaaatacaaaatgatgctggtgttcgcattcagtttaagccagatgatgggacaacacccgaaaggatagcacaaataacaggacctccagaccgatgtcaacatgctgcagaaattattacagaccttcttcgaagtgttcaggctggtaatcctggtggacctggacctggtggtcgaggaagaggtagaggtcaaggcaactggaacatgggaccacctggtggactacaggaatttaattttattgtgccaactgggaaaactggattaataataggaaaaggaggtgaaaccataaaaagcataagccagcagtctggtgcaagaatagaacttcagagaaatcctccaccaaatgcagatcctaatatgaagttatttacaattcgtggcactccacaacagatagactatgctcggcaactcatagaagaaaagattggtggcccagtaaatcctttagggccacctgtaccccatgggccccatggtgtcccaggcccccatggacctcctgggcctccagggcctggaactccaatgggaccatacaaccctgcaccttataatcctggaccaccaggcccggctcctcatggtcctccagccccatatgctccccagggatggggaaatgcatatccacactggcagcagcaggctcctcctgatccagctaaggcaggaacggatccaaattcagcagcttgggctgcttattacgctcactattatcaacagcaagcacagccaccaccagcagcccctgcaggtgcaccaactacaactcaaactaatggacaaggagatcagcagaatccagccccagctggacaggttgattataccaaggcttgggaagagtactacaagaaaatgggtcaggcagttcctgctccgactggggctcctccaggtggtcagccagattatagtgcagcctgggctgagtattatagacaacaagcagcctattatgcccagacaagtccccagggaatgccacagcatcctccagcacctcagggccaataataagaagtggacaatacagtatttgcttcattgtgtgggggaaaaaaacctttgttaaatatatggatgcagacgacttgatgaagatcttaattttgtttttggtttaaaatagtgtttccttttttttttttttttttgaaaatgtacaaaatatctatcactactgataggaggttaatatttctgtgtagaaatgaaaattggtttgtttttagtatttagtgtagatgtacacattccagcaaatgtatttgcaattatgtggttgatgctttgtgatataaatgtactttttcaatgtatactttcacttttaaaatgcctgttttgtgctttacaataaatgatatgaaacctc

SEQ ID NO: 284877 - DNA, 3910 bp, Homo sapiens
ggtaatagagcttcgacggcgacggccgccattttctttctttcttagctgttagctgagaggaagtctctgaacaggcggcagcggctcttatagtgcaaccatggcagactattcaacagtgcctcccccctcttctggctcagctggtggcggtggtggcggcggtggtggtggaggagttaacgacgctttcaaagatgcactgcagagagcccggcagattgcagcaaaaattggaggtgatgcagggacatcactgaattcaaatgactatggttatgggggacaaaaaagacctttagaagatggagatcaaccagatgctaagaaagttgctcctcaaaatgactcttttggaacacagttaccaccgatgcatcagcagcaaagcagatctgtaatgacagaagaatacaaagttccagatggaatggttggattcataattggcagaggaggtgaacagatctcacgcatacaacaggaatctggatgcaaaatacagatagctcctgacagtggtggccttccagaaaggtcctgtatgttaactggaacacctgaatctgtccagtcagcaaaacggttactggaccagattgttgaaaaaggaagaccagctcctggcttccatcatggcgatggaccgggaaatgcagttcaagaaatcatgattccagctagcaaggcaggattagtcattggaaaagggggagaaactattaaacagcttcaggaacgggctggagttaaaatggttatgattcaagacgggccgcagaacactggtgctgacaaacctcttaggattacaggagacccatataaagttcaacaagccaaggaaatggtgttagagttaattcgtgatcaaggcggtttcagagaagttcggaatgagtatgggtcaagaataggaggaaatgaagggatagatgtccccattccaagatttgctgttggcattgtaataggaagaaatggagagatgatcaaaaaaatacaaaatgatgctggtgttcgcattcagtttaagccagatgatgggacaacacccgaaaggatagcacaaataacaggacctccagaccgatgtcaacatgctgcagaaattattacagaccttcttcgaagtgttcaggctggtaatcctggtggacctggacctggtggtcgaggaagaggtagaggtcaaggcaactggaacatgggaccacctggtggactacaggaatttaattttattgtgccaactgggaaaactggattaataataggaaaaggaggtgaaaccataaaaagcataagccagcagtctggtgcaagaatagaacttcagagaaatcctccaccaaatgcagatcctaatatgaagttatttacaattcgtggcactccacaacagatagactatgctcggcaactcatagaagaaaagattggtggcccagtaaatcctttagggccacctgtaccccatgggccccatggtgtcccaggcccccatggacctcctgggcctccagggcctggaactccaatgggaccatacaaccctgcaccttataatcctggaccaccaggcccggctcctcatggtcctccagccccatatgctccccagggatggggaaatgcatatccacactggcagcagcaggctcctcctgatccagctaaggcaggaacggatccaaattcagcagcttgggctgcttattacgctcactattatcaacagcaagcacagccaccaccagcagcccctgcaggtgcaccaactacaactcaaactaatggacaaggagatcagcagaatccagccccagctggacaggttgattataccaaggcttgggaagagtactacaagaaaatgggtcaggcagttcctgctccgactggggctcctccaggtggtcagccagattatagtgcagcctgggctgagtattatagacaacaagcagcctattatgcccagacaagtccccagggaatgccacagcatcctccagcacctcagggccaataataagaagtggacaatacagtatttgcttcattgtgtgggggaaaaaaacctttgttaaatatatggatgcagacgacttgatgaagatcttaattttgtttttggtttaaaatagtgtttccttttttttttttttttttgaaaatgtacaaaatatctatcactactgataggaggttaatatttctgtgtagaaatgaaaattggtttgtttttagtatttagtgtagatgtacacattccagcaaatgtatttgcaattatgtggttgatgctttgtgatataaatgtactttttcaatgtatactttcacttttaaaatgcctgttttgtgctttacaataaatgatatgaaacctcctgtgtcggtaagttggatatgtgggtatttaaaggattcataatttcttagcaatgataaattaagatacatatacacaaatatataagctttccccatgaaatattgagtttttaaacactggcatgtttttccccccttgcagtatagtggtagattggaggatcttttccatttattgtattggctctttcagcacaagtaatcctgatatcttcattttttttccttctgtttgattaaaaactgcatgtgtgtacaatgatcttttggcatacttccattgcattaacagtgaaatttccttttatacatgaccactgtttcagacctgtactgctgctataacagttaacctttctgttcttaatttgataatacttgatttccaagactgtttcggcataactaattttaaacagttttcagatagtgaatatgagtagtctaataagaacagtttttttccatgtgaagcaactctttcaatgtatataatgttagtgtgtttctttctaaatttaggatagaaaagtgaatagtgtgcaaaaagtatagctacattgcatctgccattgaaacataaatggggtatggaaacgttcaagctttttttttttctttatgcagtatagataagctttgttttgtaaatgcacaagtccaatcattgaatcaacttaatttttttatgtacttgaagtcattttattactctttaacactcatgctgaagttctgatattttgttgaaatccattgttttactctttgcatatttgttggctctttgcatattaatatattagactacatgcaaatacagtctgtcttgccattgtctgttgaagtgcaggtttgatccagccagtatagaactagctctgtaggggtgaggaggactgtgctgtgtatcatccttgattgtgttccttcaaggagcattgcactgtaagtacatcagaatgacaaattgatgaactgcaacagtatctttttgtcaatgttccacataatgcaaatgccatacgttgtgtgaatattatgttggaatacagtgctgatatcttggaaaaccataactgcctcttaatttaacatagaataatacatagttctgtattttttttaaagtgagcttaatgggtaagtattttttatatgctttagctatagctaaagaaaactgatacttaacaaagttgaatagtattattcactggtgctcctaaaatattgtttttcagtgtaaaatatgcatatcttctatatttaatatgaaagtcttgaaatgtatcagacagaaggggatttcagtttgcaaataatgagcaatgtagcaattttaacacatttcataaatatatattttgtcattggtggagagcaccatttgttgttttgaatatactttaaaggaagaggtacaaggacataaatgttgagattacctacaggatggaaatagcagtacagttcattgtagatattttgaaatgtttttgattgt

SEQ ID NO: 284878 - DNA, 3709 bp, Homo sapiens
ggtaatagagcttcgacggcgacggccgccattttctttctttcttagctgttagctgagaggaagtctctgaacaggcggcagcggctcttatagtgcaaccatggcagactattcaacagtgcctcccccctcttctggctcagctggtggcggtggtggcggcggtggtggtggaggagttaacgacgctttcaaagatgcactgcagagagcccggcagattgcagcaaaaattggaggtgatgcagggacatcactgaattcaaatgactatggttatgggggacaaaaaagacctttagaagatggagatcaaccagatgctaagaaagttgctcctcaaaatgactcttttggaacacagttaccaccgatgcatcagcagcaaagcagatctgtaatgacagaagaatacaaagttccagatggaatggttggattcataattggcagaggaggtgaacagatctcacgcatacaacaggaatctggatgcaaaatacagatagctcctgacagtggtggccttccagaaaggtcctgtatgttaactggaacacctgaatctgtccagtcagcaaaacggttactggaccagattgttgaaaaaggaagaccagctcctggcttccatcatggcgatggaccgggaaatgcagttcaagaaatcatgattccagctagcaaggcaggattagtcattggaaaagggggagaaactattaaacagcttcaggaacgggctggagttaaaatggttatgattcaagacgggccgcagaacactggtgctgacaaacctcttaggattacaggagacccatataaagttcaacaagccaaggaaatggtgttagagttaattcgtgatcaaggcggtttcagagaagttcggaatgagtatgggtcaagaataggaggaaatgaagggatagatgtccccattccaagatttgctgttggcattgtaataggaagaaatggagagatgatcaaaaaaatacaaaatgatgctggtgttcgcattcagtttaagccagatgatgggacaacacccgaaaggatagcacaaataacaggacctccagaccgatgtcaacatgctgcagaaattattacagaccttcttcgaagtgttcaggctggtaatcctggtggacctggacctggtggtcgaggaagaggtagaggtcaaggcaactggaacatgggaccacctggtggactacaggaatttaattttattgtgccaactgggaaaactggattaataataggaaaaggaggtgaaaccataaaaagcataagccagcagtctggtgcaagaatagaacttcagagaaatcctccaccaaatgcagatcctaatatgaagttatttacaattcgtggcactccacaacagatagactatgctcggcaactcatagaagaaaagattggtggcccagtaaatcctttagggccacctgtaccccatgggccccatggtgtcccaggcccccatggacctcctgggcctccagggcctggaactccaatgggaccatacaaccctgcaccttataatcctggaccaccaggcccggctcctcatggtcctccagccccatatgctccccagggatggggaaatgcatatccacactggcagcagcaggctcctcctgatccagctaaggcaggaacggatccaaattcagcagcttgggctgcttattacgctcactattatcaacagcaagcacagccaccaccagcagcccctgcaggtgcaccaactacaactcaaactaatggacaaggagatcagcagaatccagccccagctggacaggttgattataccaaggcttgggaagagtactacaagaaaatgggtcaggcagttcctgctccgactggggctcctccaggtggtcagccagattatagtgcagcctgggctgagtattatagacaacaagcagcctattatgcccagacaagtccccagggaatgccacagcatcctccagcacctcagggccaataataagaagtggacaatacagtatttgcttcattgtgtgggggaaaaaaacctttgttaaatatatggatgcagacgacttgatgaagatcttaattttgtttttggtttaaaatagtgtttccttttttttttttttttttgaaaatgtacaaaatatctatcactactgataggaggttaatatttctgtgtagaaatgaaaattggtttgtttttagtatttagtgtagatgtacacattccagcaaatgtatttgcaattatgtggttgatgctttgtgatataaatgtactttttcaatgtatactttcacttttaaaatgcctgttttgtgctttacaataaatgatatgaaacctcctgtgtcggtaagttggatatgtgggtatttaaaggattcataatttcttagcaatgataaattaagatacatatacacaaatatataagctttccccatgaaatattgagtttttaaacactggcatgtttttccccccttgcagtatagtggtagattggaggatcttttccatttattgtattggctctttcagcacaagtaatcctgatatcttcattttttttccttctgtttgattaaaaactgcatgtgtgtacaatgatcttttggcatacttccattgcattaacagtgaaatttccttttatacatgaccactgtttcagacctgtactgctgctataacagttaacctttctgttcttaatttgataatacttgatttccaagactgtttcggcataactaattttaaacagttttcagatagtgaatatgagtagtctaataagaacagtttttttccatgtgaagcaactctttcaatgtatataatgttagtgtgtttctttctaaatttaggatagaaaagtgaatagtgtgcaaaaagtatagctacattgcatctgccattgaaacataaatggggtatggaaacgttcaagctttttttttttctttatgcagtatagataagctttgttttgtaaatgcacaagtccaatcattgaatcaacttaatttttttatgtacttgaagtcattttattactctttaacactcatgctgaagttctgatattttgttgaaatccattgttttactctttgcatatttgttggctctttgcatattaatatattagactacatgcaaatgccatacgttgtgtgaatattatgttggaatacagtgctgatatcttggaaaaccataactgcctcttaatttaacatagaataatacatagttctgtattttttttaaagtgagcttaatgggtaagtattttttatatgctttagctatagctaaagaaaactgatacttaacaaagttgaatagtattattcactggtgctcctaaaatattgtttttcagtgtaaaatatgcatatcttctatatttaatatgaaagtcttgaaatgtatcagacagaaggggatttcagtttgcaaataatgagcaatgtagcaattttaacacatttcataaatatatattttgtcattggtggagagcaccatttgttgttttgaatatactttaaaggaagaggtacaaggacataaatgttgagattacctacaggatggaaatagcagtacagttcattgtagatattttgaaatgtttttgattgt

SEQ ID NO: 284879 - DNA, 2843 bp, Homo sapiens
aacctagagtgacttcccttacccttatttagatctgcatatatagttctagtatgaagtttaatagttaaggagttagctatttgttatctttaagagtagggtattgacgtgaacaattgcagtattttgcatgatactgttttatagatgaccttttaggaaagtggtgcatttattaattgaactgaagaagtagttcagttgaattcagtatcataattcacaaattggaggctgttgattttgattcatttaaggtttaaaatctttattaattgcaaacagtgcaattatttatacttcacagtgccttcccagaccttccaccttaggttctgctgcaaaaagcaccaggtaagcacaacctaaggacatatataaataaatatttcaatacattaatgttgtccctgtgaggtttttgtggttgtgtattcaaaggcaatctgctactgcttccccaaaatgtattttgttattttatgctaccatcttagtggaaagtctgtaagttgttaaagcaactgtttacatttctgggtaatgttttttattttacttttttttttttattaagacaagaaaatgatgagtagattgctgcagtaattgaactacatccaaatctttttgtattttttccccaaatatagaagtgttaatattaagaaaggacaattacacagttttcaagatttaggaaatcacttgtttagaaacttcaacagccttcacaatctgttttatatgatggacagaaaatttctttgccctccaaaattataatttctttatttttttcttattcttaaactataataattcagtaaggatattatgggttagaattttattatgatttttttcttagacaaaagttatatgctgaagaaggaaaaagttataaggcagtatgttttgataaaaggcatgtgcatcagtgaaatgttaactgtatagcaaataacctttcataatctgtagcaatcagtatttttctgatttaataatattttaataactgacgctgcatttaatttttttgccagtttaaaatgtttgtgtgtttttatagatgattttaactggtacatattttgagttaagttgaatgtatgaaagcagcatcttatcagttttgtttattcgatttctaaaatgtgctgatccttttaaaactcctgcttatctctgcaacaaagaaaaatattcaaaaatactgccttcattttcacacacagtgctgaagatgctgcaagcaccaaatcatagctcataaaatcaggtcctgagatagttacccataaagaggaatcctttgagtgtatgccattggtgagccgatgagcatggaccatagaagggctcaatgtagaaggtaaaattggcaaatcataattgagaaatatgaaatgtattcccatacataatatggtatagggtgtaatgtacctgcttttgatcacttttcattttaaagtgctattcacttgatcttaaatgttccatgaactgttaaatttcttaagttacatagttactacaccacatttatgtgtatgttatgttttaatagtcaatgataggtatgtacaattgataatataaaggggctcattgaaacttgagagcctgttgagttttggttagttgtagattgcatttttataaaaaaaaatacagatagattgatgataatagatattggggcattgtttctgtctcatgagaattcttttattcattaccataagccttcactgatactataagcattattttaaatgacgctgatcttaagtctgaaataaatggaaagcagaaaaggtgagccagttgatttgaatgcattggatattagtgttagaaacaatgtatagtttagattgaaactgaactgacttatttagcacttaaacaaaaatttgacaatgtttttagttttttttaagacagcttagtgtggtgatacttagaattctatggtttgatgtttcttttagaaatgagaagtatagttttattttttaatataaaaaatggttttaatactaaaactagtaatttgatactagttgtttataaacattgtaaaatatatcttttaaacaaattatcttggtagttaattcataagggtgggtttgggtaggaatagcagagtactttcagagggaaaggggagtcattcagaagtgatagcattttatttgtttgaatactctgccagtaaaatcagctgtacttagaaagttatctgttgtgtagaataatgatgtagagtttactaatcagtgaggatgtcttgtttttattttctgcaaactctgcctcactttaaaatgcattataacaatacctaattaaagataattttggctctgaaagttaccttattttttgttgagttagtgacttcatttttcttgccacaatataagcttttgagggatttttttaaattggtgcttttaataagcaaataaatcccagggttttattttcttcagtgatacccctatagaaactcttaaatgtatttgcgcatatatatatatatattttcttatgcatgctcgatgcattttcgtcctgagaaaaatgttctctacagaaactacccgtgtgtaaaaagaagattggcttaaaatggctactgtgatgggaacagtgtcttagggagatgcagcttggacttgaggtaaattgaatactttacaactgtggtttagagtttgctttaatgacattgtatgtaaaaggtcacatgattgctgtaattttgtattcattatggtttcctcaataaatgtacattgatgactattaaaaaaaaaaac

SEQ ID NO: 284880 - DNA, 2147 bp, Homo sapiens
ggtaatagagcttcgacggcgacggccgccattttctttctttcttagctgttagctgagaggaagtctctgaacaggcggcagcggctcttatagtgcaaccatggcagactattcaacagtgcctcccccctcttctggctcagctggtggcggtggtggcggcggtggtggtggaggagttaacgacgctttcaaagatgcactgcagagagcccggcagattgcagcaaaaattggaggtgatgcagggacatcactgaattcaaatgactatggttatgggggacaaaaaagacctttagaagatggagatcaaccagatgctaagaaagttgctcctcaaaatgactcttttggaacacagttaccaccgatgcatcagcagcaaagcagatctgtaatgacagaagaatacaaagttccagatggaatggttggattcataattggcagaggaggtgaacagatctcacgcatacaacaggaatctggatgcaaaatacagatagctcctgacagtggtggccttccagaaaggtcctgtatgttaactggaacacctgaatctgtccagtcagcaaaacggttactggaccagattgttgaaaaaggaagaccagctcctggcttccatcatggcgatggaccgggaaatgcagttcaagaaatcatgattccagctagcaaggcaggattagtcattggaaaagggggagaaactattaaacagcttcaggaacgggctggagttaaaatggttatgattcaagacgggccgcagaacactggtgctgacaaacctcttaggattacaggagacccatataaagttcaacaagccaaggaaatggtgttagagttaattcgtgatcaaggcggtttcagagaagttcggaatgagtatgggtcaagaataggaggaaatgaagggatagatgtccccattccaagatttgctgttggcattgtaataggaagaaatggagagatgatcaaaaaaatacaaaatgatgctggtgttcgcattcagtttaagccagatgatgggacaacacccgaaaggatagcacaaataacaggacctccagaccgatgtcaacatgctgcagaaattattacagaccttcttcgaagtgttcaggctggtaatcctggtggacctggacctggtggtcgaggaagaggtagaggtcaaggcaactggaacatgggaccacctggtggactacaggaatttaattttattgtgccaactgggaaaactggattaataataggaaaaggaggtgaaaccataaaaagcataagccagcagtctggtgcaagaatagaacttcagagaaatcctccaccaaatgcagatcctaatatgaagttatttacaattcgtggcactccacaacagatagactatgctcggcaactcatagaagaaaagattggtggcccagtaaatcctttagggccacctgtaccccatgggccccatggtgtcccaggcccccatggacctcctgggcctccagggcctggaactccaatgggaccatacaaccctgcaccttataatcctggaccaccaggcccggctcctcatggtcctccagccccatatgctccccagggatggggaaatgcatatccacactggcagcagcaggctcctcctgatccagctaaggcaggaacggatccaaattcagcagcttgggctgcttattacgctcactattatcaacagcaagcacagccaccaccagcagcccctgcaggtgcaccaactacaactcaaactaatggacaaggagatcagcagaatccagccccagctggacaggttgattataccaaggcttgggaagagtactacaagaaaatgggtcaggcagttcctgctccgactggggctcctccaggtggtcagccagattatagtgcagcctgggctgagtattatagacaacaagcagcctattatgcccagacaagtccccagggaatgccacagcatcctccagcacctcagggccaataataagaagtggacaatacagtatttgcttcattgtgtgggggaaaaaaacctttgttaaatatatggatgcagacgacttgatgaagcgtcgcgctgggtcctctggcag

SEQ ID NO: 284881 - DNA, 2302 bp, Homo sapiens
ggtaatagagcttcgacggcgacggccgccattttctttctttcttagctgttagctgagaggaagtctctgaacaggcggcagcggctcttatagtgcaaccatggcagactattcaacagtgcctcccccctcttctggctcagctggtggcggtggtggcggcggtggtggtggaggagttaacgacgctttcaaagatgcactgcagagagcccggcagattgcagcaaaaattggaggtgatgcagggacatcactgaattcaaatgactatggttatgggggacaaaaaagacctttagaagatggagatcaaccagatgctaagaaagttgctcctcaaaatgactcttttggaacacagttaccaccgatgcatcagcagcaaagcagatctgtaatgacagaagaatacaaagttccagatggaatggttggattcataattggcagaggaggtgaacagatctcacgcatacaacaggaatctggatgcaaaatacagatagctcctgacagtggtggccttccagaaaggtcctgtatgttaactggaacacctgaatctgtccagtcagcaaaacggttactggaccagattgttgaaaaaggaagaccagctcctggcttccatcatggcgatggaccgggaaatgcagttcaagaaatcatgattccagctagcaaggcaggattagtcattggaaaagggggagaaactattaaacagcttcaggaacgggctggagttaaaatggttatgattcaagacgggccgcagaacactggtgctgacaaacctcttaggattacaggagacccatataaagttcaacaagccaaggaaatggtgttagagttaattcgtgatcaaggcggtttcagagaagttcggaatgagtatgggtcaagaataggaggaaatgaagggatagatgtccccattccaagatttgctgttggcattgtaataggaagaaatggagagatgatcaaaaaaatacaaaatgatgctggtgttcgcattcagtttaagccagatgatgggacaacacccgaaaggatagcacaaataacaggacctccagaccgatgtcaacatgctgcagaaattattacagaccttcttcgaagtgttcaggctggtaatcctggtggacctggacctggtggtcgaggaagaggtagaggtcaaggcaactggaacatgggaccacctggtggactacaggaatttaattttattgtgccaactgggaaaactggattaataataggaaaaggaggtgaaaccataaaaagcataagccagcagtctggtgcaagaatagaacttcagagaaatcctccaccaaatgcagatcctaatatgaagttatttacaattcgtggcactccacaacagatagactatgctcggcaactcatagaagaaaagattggtggcccagtaaatcctttagggccacctgtaccccatgggccccatggtgtcccaggcccccatggacctcctgggcctccagggcctggaactccaatgggaccatacaaccctgcaccttataatcctggaccaccaggcccggctcctcatggtcctccagccccatatgctccccagggatggggaaatgcatatccacactggcagcagcaggctcctcctgatccagctaaggcaggaacggatccaaattcagcagcttgggctgcttattacgctcactattatcaacagcaagcacagccaccaccagcagcccctgcaggtgcaccaactacaactcaaactaatggacaaggagatcagcagaatccagccccagctggacaggttgattataccaaggcttgggaagagtactacaagaaaatgggtcaggcagttcctgctccgactggggctcctccaggtggtcagccagattatagtgcagcctgggctgagtattatagacaacaagcagcctattatgcccagacaagtccccagggaatgccacagcatcctccagcacctcagtgccttcccagaccttccaccttaggttctgctgcaaaaagcaccagaaactacccgtgtgtaaaaagaagattggcttaaaatggctactgtgatgggaacagtgtcttagggagatgcagcttggacttgaggtaaattgaatactttacaactgtggtttagagtttgctttaatgacattgtatgtaaaaggtcacatgattgctgtaattttgtattcattatggtttcctcaataaatgtacattgatgactattaaaaaaaaaaac

SEQ ID NO: 284882 - DNA, 2224 bp, Homo sapiens
ggtaatagagcttcgacggcgacggccgccattttctttctttcttagctgttagctgagaggaagtctctgaacaggcggcagcggctcttatagtgcaaccatggcagactattcaacagtgcctcccccctcttctggctcagctggtggcggtggtggcggcggtggtggtggaggagttaacgacgctttcaaagatgcactgcagagagcccggcagattgcagcaaaaattggaggtgatgcagggacatcactgaattcaaatgactatggttatgggggacaaaaaagacctttagaagatggagatcaaccagatgctaagaaagttgctcctcaaaatgactcttttggaacacagttaccaccgatgcatcagcagcaaagcagatctgtaatgacagaagaatacaaagttccagatggaatggttggattcataattggcagaggaggtgaacagatctcacgcatacaacaggaatctggatgcaaaatacagatagctcctgacagtggtggccttccagaaaggtcctgtatgttaactggaacacctgaatctgtccagtcagcaaaacggttactggaccagattgttgaaaaaggaagaccagctcctggcttccatcatggcgatggaccgggaaatgcagttcaagaaatcatgattccagctagcaaggcaggattagtcattggaaaagggggagaaactattaaacagcttcaggaacgggctggagttaaaatggttatgattcaagacgggccgcagaacactggtgctgacaaacctcttaggattacaggagacccatataaagttcaacaagccaaggaaatggtgttagagttaattcgtgatcaaggcggtttcagagaagttcggaatgagtatgggtcaagaataggaggaaatgaagggatagatgtccccattccaagatttgctgttggcattgtaataggaagaaatggagagatgatcaaaaaaatacaaaatgatgctggtgttcgcattcagtttaagccagatgatgggacaacacccgaaaggatagcacaaataacaggacctccagaccgatgtcaacatgctgcagaaattattacagaccttcttcgaagtgttcaggctggtaatcctggtggacctggacctggtggtcgaggaagaggtagaggtcaaggcaactggaacatgggaccacctggtggactacaggaatttaattttattgtgccaactgggaaaactggattaataataggaaaaggaggtgaaaccataaaaagcataagccagcagtctggtgcaagaatagaacttcagagaaatcctccaccaaatgcagatcctaatatgaagttatttacaattcgtggcactccacaacagatagactatgctcggcaactcatagaagaaaagattggtggcccagtaaatcctttagggccacctgtaccccatgggccccatggtgtcccaggcccccatggacctcctgggcctccagggcctggaactccaatgggaccatacaaccctgcaccttataatcctggaccaccaggcccggctcctcatggtcctccagccccatatgctccccagggatggggaaatgcatatccacactggcagcagcaggctcctcctgatccagctaaggcaggaacggatccaaattcagcagcttgggctgcttattacgctcactattatcaacagcaagcacagccaccaccagcagcccctgcaggtgcaccaactacaactcaaactaatggacaaggagatcagcagaatccagccccagctggacaggttgattataccaaggcttgggaagagtactacaagaaaatgggtcaggcagttcctgctccgactggggctcctccaggtggtcagccagattatagtgcagcctgggctgagtattatagacaacaagcagcctattatgcccagacaagtccccagggaatgccacagcatcctccagcacctcaggtataatgtaattgctaatttgttgatttctactccagtctgttttctgcatgtttactgtttgtctgtttgggagtgtttgccttttaaatttttatctggcaaagtataataactatttaaatgaagtactacggtgtattgtttgggtttttttgttttttataatgctttccagcatctgagtggtgaata

SEQ ID NO: 284883 - DNA, 2368 bp, Homo sapiens
ggtaatagagcttcgacggcgacggccgccattttctttctttcttagctgttagctgagaggaagtctctgaacaggcggcagcggctcttatagtgcaaccatggcagactattcaacagtgcctcccccctcttctggctcagctggtggcggtggtggcggcggtggtggtggaggagttaacgacgctttcaaagatgcactgcagagagcccggcagattgcagcaaaaattggaggtgatgcagggacatcactgaattcaaatgactatggttatgggggacaaaaaagacctttagaagatggagatcaaccagatgctaagaaagttgctcctcaaaatgactcttttggaacacagttaccaccgatgcatcagcagcaaagcagatctgtaatgacagaagaatacaaagttccagatggaatggttggattcataattggcagaggaggtgaacagatctcacgcatacaacaggaatctggatgcaaaatacagatagctcctgacagtggtggccttccagaaaggtcctgtatgttaactggaacacctgaatctgtccagtcagcaaaacggttactggaccagattgttgaaaaaggaagaccagctcctggcttccatcatggcgatggaccgggaaatgcagttcaagaaatcatgattccagctagcaaggcaggattagtcattggaaaagggggagaaactattaaacagcttcaggaacgggctggagttaaaatggttatgattcaagacgggccgcagaacactggtgctgacaaacctcttaggattacaggagacccatataaagttcaacaagccaaggaaatggtgttagagttaattcgtgatcaaggcggtttcagagaagttcggaatgagtatgggtcaagaataggaggaaatgaagggatagatgtccccattccaagatttgctgttggcattgtaataggaagaaatggagagatgatcaaaaaaatacaaaatgatgctggtgttcgcattcagtttaagccagatgatgggacaacacccgaaaggatagcacaaataacaggacctccagaccgatgtcaacatgctgcagaaattattacagaccttcttcgaagtgttcaggctggtaatcctggtggacctggacctggtggtcgaggaagaggtagaggtcaaggcaactggaacatgggaccacctggtggactacaggaatttaattttattgtgccaactgggaaaactggattaataataggaaaaggaggtgaaaccataaaaagcataagccagcagtctggtgcaagaatagaacttcagagaaatcctccaccaaatgcagatcctaatatgaagttatttacaattcgtggcactccacaacagatagactatgctcggcaactcatagaagaaaagattggtgtgagtatactttaaacttttaatttttagtgtagacccttagactgtagttaaattaagacgtttattcaaatacatcaaaggaaaatgtatcattactagtcagcatttatagatttcatgatatgtataatagatacaacgtgaagattttccagcaatgaaaataacctaattaaatgtgtagttacaggttttgagaacaaccttacatttgggtgtggctagataagaggagggtagtgttacctgtaggcatggtattagtgttggtgtaggattgtggaacatacttgaaggacatagttaacgggaattcattatttattaagattttactctactgaaccccagcgaggcaaacaagataaatcagatacatctgccactctacagtagaaattcataaatcctaggttttggactggctcacagatcatctgggggtattaaaatgtagactatttgggtgcttcccactcctacacataatatacagagacagacctgactcaaaatgtctgggatagggcccagcatctaattttacatagatgtttgggtgattctggtgcacagacaaatttggaaatttttcctccaggaaagttttctgttagaacaaaaaagtatgaaacgctttgactgcttttttgtaagtgaggcagacagtgtcttactggagtttttaacacaaagtgtgcagggggcatcttaaattattagaattgcctaggaaaaattatttttggtgtttgccatgctgtgaatggggtgcgtgcaaaacaaggttgacactgtttctgtcaacttgggaagacaaaaatagatgtacaaaagacgcttaaggaacgtcttacaaaatgtacacaaacattgtgagttctgttgtatggatagtttaatggttcaaaaaatgaa

SEQ ID NO: 284884 - DNA, 1493 bp, Homo sapiens
ggtaatagagcttcgacggcgacggccgccattttctttctttcttagctgttagctgagaggaagtctctgaacaggcggcagcggctcttatagtgcaaccatggcagactattcaacagtgcctcccccctcttctggctcagctggtggcggtggtggcggcggtggtggtggaggagttaacgacgctttcaaagatgcactgcagagagcccggcagattgcagcaaaaattggaggtgatgcagggacatcactgaattcaaatgactatggttatgggggacaaaaaagacctttagaagatggagatcaaccagatgctaagaaagttgctcctcaaaatgactcttttggaacacagttaccaccgatgcatcagcagcaaagcagatctgtaatgacagaagaatacaaagttccagatggaatggttggattcataattggcagaggaggtgaacagatctcacgcatacaacaggaatctggatgcaaaatacagatagctcctgacagtggtggccttccagaaaggtcctgtatgttaactggaacacctgaatctgtccagtcagcaaaacggttactggaccagattgttgaaaaaggaagaccagctcctggcttccatcatggcgatggaccgggaaatgcagttcaagaaatcatgattccagctagcaaggcaggattagtcattggaaaagggggagaaactattaaacagcttcaggaacgggctggagttaaaatggttatgattcaagacgggccgcagaacactggtgctgacaaacctcttaggattacaggagacccatataaagttcaacaagccaaggaaatggtgttagagttaattcgtgatcaaggcggtttcagagaagttcggaatgagtatgggtcaagaataggaggaaatgaagggatagatgtccccattccaagatttgctgttggcattgtaataggaagaaatggagagatgatcaaaaaaatacaaaatgatgctggtgttcgcattcagtttaagccagatgatgggacaacacccgaaaggatagcacaaataacaggacctccagaccgatgtcaacatgctgcagaaattattacagaccttcttcgaagtgttcaggctggtaatcctggtggacctggacctggtggtcgaggaagaggtagaggtcaaggcaactggaacatgggaccacctggtggactacaggaatttaattttattgtgccaactgggaaaactggattaataataggaaaaggaggtgaaaccataaaaagcataagccagcagtctggtgcaagaatagaacttcagagaaatcctccaccaaatgcagatcctaatatgaagttatttacaattcgtggcactccacaacagatagactatgctcggcaactcatagaagaaaagattggtggcccagtaaatcctttaggcccccttacgccctggtcacaccgag

SEQ ID NO: 284885 - DNA, 983 bp, Homo sapiens
tgctctagaggatcaccgtcttagtcctctcagaaaggcctggcttgtaggacttggaagcaggccctaaagcgcatcggcaggtcagagctttgtgttcaggaacactgggatctgcttagagctggtgtagtcgctctaaaactgcacactgcttttcccaatcagtttacacaaaaaaaatggttttaatactaaaactagtaatttgatactagttgtttataaacattgtaaaatatatcttttaaacaaattatcttggtagttaattcataagggtgggtttgggtaggaatagcagagtactttcagagggaaaggggagtcattcagaagtgatagcattttatttgtttgaatactctgccagtaaaatcagctgtacttagaaagttatctgttgtgtagaataatgatgtagagtttactaatcagtgaggatgtcttgtttttattttctgcaaactctgcctcactttaaaatgcattataacaatacctaattaaagataattttggctctgaaagttaccttattttttgttgagttagtgacttcatttttcttgccacaatataagcttttgagggatttttttaaattggtgcttttaataagcaaataaatcccagggttttattttcttcagtgatacccctatagaaactcttaaatgtatttgcgcatatatatatatatattttcttatgcatgctcgatgcattttcgtcctgagaaaaatgttctctacagaaactacccgtgtgtaaaaagaagattggcttaaaatggctactgtgatgggaacagtgtcttagggagatgcagcttggacttgaggtaaattgaatactttacaactgtggtttagagtttgctttaatgacattgtatgtaaaaggtcacatgattgctgtaattttgtattcattatggtttcctcaataaatgtacattgatgactattaaaaaaaaaaac

SEQ ID NO: 284886 - DNA, 924 bp, Homo sapiens
ggtaatagagcttcgacggcgacggccgccattttctttctttcttagctgttagctgagaggaagtctctgaacaggcggcagcggctcttatagtgcaaccatggcagactattcaacagtgcctcccccctcttctggctcagctggtggcggtggtggcggcggtggtggtggaggagttaacgacgctttcaaagatgcactgcagagagcccggcagattgcagcaaaaattggaggtgatgcagggacatcactgaattcaaatgactatggttatgggggacaaaaaagacctttagaagatggagatcaaccagatgctaagaaagttgctcctcaaaatgactcttttggaacacagttaccaccgatgcatcagcagcaaagcagatctgtaatgacagaagaatacaaagttccagatggaatggttggattcataattggcagaggaggtgaacagatctcacgcatacaacaggaatctggatgcaaaatacagatagctcctgacagtggtggccttccagaaaggtcctgtatgttaactggaacacctgaatctgtccagtcagcaaaacggttactggaccagattgttgaaaaaggaagaccagctcctggcttccatcatggcgatggaccgggaaatgcagttcaagaaatcatgattccagctagcaaggcaggattagtcattggaaaagggggagaaactattaaacagcttcaggtattgttatttttgtgaaatggctacttttgatctgttttgatgcccatttttgtccacttcttttgttaatatatattatttctatgattgtaacaggaacgggctggagttaaaatggttatgattcaagacgggccgcagaacactggtgctgacaaaaaataaaaattattattgatttt

SEQ ID NO: 284887 - DNA, 194 bp, Homo sapiens
gtccccattccaagatttgctgttggcattgtaataggaagaaatggagagatgatcaaaaaaatacaaaatgatgctggtgttcgcattcagtttaagccaggtgagtacatataataatcttgtaagtgttggcagcagtgagttttgacatacatttattgtttaattaattttgtttctttgttttgaag

SEQ ID NO: 284888 - DNA, 5533 bp, Homo sapiens
aagtactgactgttcaaagctcaggcaaaccatgcagatccacgtgttgttggaggaggcgctcccttcaggagaccacagagggggagtgactgtggctgaccatgtgggcagaggggctggcgggctggcccctgcgagaggcggactcagggctgctggatgctccgtccttggccgctttgatctggagccacgtgtcacccagagctttggcaaagtggtcgtccacggagcccgtgatggacacggagttgggtgccggctcgggctccttgtaattcttgcccaggctcctgcggaaatgctcctccaccacggggtcacaggtggtggcagcgctcggtggcctccggtagctggcaggcccgggcgcggcctcgtgccgaattcggcacgagggggtttcggcggccgggagggagttgtcggcgccgcggccgctgcggacggacgctcgcctgccggctgaggaaaaagaagcaactaacaaaacactgtgataataaggattattcagtatgcagtttgcaggatatccatgacgacattgaaaatgaattttttgtattcaccagatattcttatatgagaagatctattttaaacagtctaaatattttttcttctgttggaccagcatggcaggatttaagcgagggtatgatggaaagattgctggattatatgatctggataaaaccttgggtcgaggccattttgccgtggttaaacttgccaggcatgtctttacgggtgaaaaggtggcagtaaaagttattgacaagacaaaactggacactctagctactggtcatcttttccaggaagtgagatgcatgaaactagtgcagcatcctaacatcgtccgcctttatgaagttattgacacccagaccaaactatatcttattctagaacttggggatggaggagatatgtttgattatataatgaaacatgaggagggtcttaatgaagacttggccaagaagtattttgctcagatagttcatgctatatcttattgccataaactccatgtggttcacagagacttaaaaccagagaatgtagtcttctttgaaaaacaaggtcttgtaaagttgacagactttgggttcagcaacaaatttcaaccagggaagaagctcactacaagctgtggatctcttgcatattccgctccagaaattctgcttggtgatgagtatgatgcacctgcagtagatatttggagtctgggagtgatccttttcatgttggtgtgtgggcagccgccctttcaagaagccaatgacagtgaaacactgacaatgatcatggattgcaaatatacagtaccatcccatgtgtctaaagagtgtaaagacctaatcacacggatgctacagagagatcccaagagaagggcttctttagaagagattgaaaatcatccttggcttcagggagtggacccttcaccagctacaaagtataacattccccttgtgtcatacaaaaatctctcggaagaggagcacaacagcatcattcagcgcatggtgcttggggacatagcggatcgagacgccattgtagaagccctggaaaccaacaggtataaccatatcacagccacatacttcctgctggctgaaaggatcctgagagaaaagcaagagaaagaaatacagaccagatctgcaagcccgagcaatatcaaggcccagtttaggcagtcatggccaaccaaaattgatgtaccccaggaccttgaggatgacctcacggccactcctttgtcccacgcgactgtccctcagtctcctgctcgggctgctgacagtgtcctcaatggccacaggagcaaaggcctgtgtgactcagctaagaaagatgacctccctgagttggctggaccagcactctctacggtgccacccgcaagcttaaaacccacagccagtgggcggaagtgtctgttcagggtggaagaagatgaagaggaagatgaggaggacaagaaacccatgtccctctcaacacaagtggttttgcgccggaagccatctgtaaccaaccgcctgacatccaggaagagtgcgcccgtcctcaaccagatctttgaggaaggggaatctgacgatgagtttgacatggatgagaatctgcctcccaagttgagcaggttaaagatgaatatagcttctccaggtacagttcacaaacgctaccaccggaggaaaagtcagggccggggctccagctgcagtagttcggagaccagtgatgatgattctgaaagccggcggcggctcgataaagatagcgggttcacctactcctggcaccgacgggatagcagcgaggggccccctggcagtgagggggatggcgggggccagagcaagccaagcaatgccagtggaggggtggacaaggccagccccagtgagaacaatgctggtgggggcagtccctccagcggctcgggtggcaaccccaccaatacatcgggtaccacacgccgctgtgccggccccagcaactccatgcagctggcctctcgcagtgctggggagctcgttgagagcctcaaactcatgagcctctgcctcggctcccagcttcatgggagcaccaagtacattattgatccacagaatggcttgtcattttccagtgtgaaagtccaagagaaatctacgtggaaaatgtgcattagctccacagggaatgcagggcaggtccctgcagtgggcggcataaagtttttctctgaccacatggcagataccaccactgaattggaacggataaagagcaagaacctgaaaaataacgtgctgcagctacctctgtgcgaaaagaccatctctgtgaacatccagcggaaccctaaggaggggctgctgtgcgcatccagcccagccagctgttgccatgtcatctgactgtggccccatctggccgctagcacgcttcctgctcagagcagtgaagaccggctcacttcactgttccatttggttttactattttaaagtgggcgttaggagcaattatttattacctttccatttgttcgcctgatgatgtgacaatgcatggtctttgtgcatgctgctagacacttttctttcccagccgaaaagcctattatgtaatttttacattcataattttaatgtggatgatcaggattaaatcaagatatatatctggaacctcttataaatggagcacttagaaatttgttgttctgcacttaacctagagagagaaaaaatgctttttctttgtgaaaaatctgaattcctgtcctgaccttctgtgatgtggaaaccctaggctctgagacacactctctggtgtctgagacagaaccaaagcaataacgttgtgatgcccacaggcctggagccagctagcgaccttgtgccgcccagctgtccatggcccgtgcagagcagaggacagtgagtgtctgcactgagaaccttaaaccacagttgaacatacccacacctgtttgtcttaagctatagtgtaaaaacaaagtttgggctctgaaaatttaactgaaaaagatttccttgtttttgtaataggtgagataaagtacttagatttataaggcagcttcccctgtagtgataaattacaagcagacaatcttattttgtaatgtgatgaagtgatgatgtcttaactctacttagagagtgtatgtctgtctaacagaacaaaaagatgctctgtgtaaattccttcctgtagggcacactgcaggatttccatgtagatagaagaactatagggcctagtacagaaggtgcacacaaatgttggcaaagtcaaaaccccatgaattaaaacctactggaatttggtttttaggagtttggtaattagattatctcttttgttattttcattcagttatatcctttggctcagctagctttgaaattggctgatgaaaaaatatacataaaagggtaaaattcacacatacagcaaacaaaaatgcacaaagcctgcttcgtaacttttttttctggaattgtttttcactttgcctttttctgccaaaacaataatcaaagaactcttgctttaacctattcctgtacaaagactgtttttgaccagataatcatctgttgtggcattctatcttgtaggacactgtatattgcaaattgctgattatggaaggggccagttgctgttttttcatgcagtgccctgggagtcttaaaagcagtgcttagcaacattggtgatagcatgtggctgggacccagggcccttccccactcttcagccccgagtcatgtgtctgaggtgacggactgagacgcatctggtcctgtaattcagagagtgggcacatcaccaaagaactgcattgctgtggtcactgtttcttcaagtacacactgactctgctactttaggataaatatattttactcagaactctgaatttcacagtatacttactaaactaagtaaaaatgatacttaaaatacttattttactttctagacctaggctagatgttttaagctacagctctagttcattgtgatatttataatttgaaagctatgagaatagatgtgtgggtgaagccatagaacatatttgcttgaaattcttgagcagggatcttataaagggccagaaataagatgtgtggttcacatagatagtgagcgtaacatctgtattaaacataggagagaagtttataaagggcattggcaataaactctttgttgcagctgttttccaagcagtgtaaatactttttcctgtgattatgtatagccttggaatggcaccttttaactaacccatatgtgtttggtttcaatggttttttatattcagatgtatatatggtgctcactttaggatcagcagtgttgaccatttatgctgcatagctgtattatagccttattagttgtgtggttgacccttggggtatacaaatgtcagtctgagtggtgtcttactcctttgtttataagtgaatgattgtgcatgttttgtatgtcatagtatgtcgtcacataaaagggagggagcgaaaaaccattacattaagataatattggaccaaactacttacttgctctaaacagttacttgtaccccttaacctgtcttcaaaagttgcatatagttacagtagtgtataaattaaatattgtggaaaaacagtcttgtatttttctgtatgtgtgtatatatatataattatgtacttctggcaattctatctgtatttaaagatgtgacaatcttgacaccaattttaagaatagctgtgagaccgaattaaagataatccctaccaagtgaaaattgatgtgtgttaagagggtacagaattatcaactgatttggtcagttgcttccaatgctggttgatttccctcattgtgtaaacattgacaggtatgtgacaaatgggaaaaaaaatccaaataataaagtgacatattggtgttcagcaataaaaaaaaaaaa

SEQ ID NO: 284889 - DNA, 511 bp, Homo sapiens
caccgtaacccttgttcactattatttcttcattccagtggaataatttttctgacctgtctacctggaacaatctctgttcactctgaaatccctgtttattaaatttcgcttaaaggagttgtaattcacagaaggcagaaggataataggagactgggttactaaagacaaattttactatttttatacatgtgtctagatccagccttagagtatatactttgactttaagcaaaattcaaacaaatagaactaaacctgtatctttttctttattttcttttaggaaaaagaagcaactaacaaaacactgtgataataaggattattcagtatgcagtttgcagggtatgtcttggagacagtacaaattcacctttactttatataagccacatcttaacattgggcattgatgttcagaatgacttttgggagctgcaagatcctcagagatcaaaaaaaatgatttagttactttgacgcgggggatcgtctagtagcgcaa

SEQ ID NO: 284890 - DNA, 1224 bp, Homo sapiens
gtccaatattttaaagtatgtctttgatttatagatatttggagtctgggagtgatccttttcatgttggtgtgtgggcagccgccctttcaagaagccaatgacagtgaaacactgacaatgatcatggattgcaaatatacagtaccatcccatgtgtctaaagagtgtaaagagtaagtaaaacaaagtatgtggaaaccttaaggactcagattaaaaccagaagttttaattccattaatatgtcaagaaaatttgagaggacttcaaacatccaagcatctgggttgattttaatttttgaatttaatatttctgctgttgtttcagagtgttcggtcggcgggggtgggggtggttagcccctgaatatgatctgaaatttaatattagagtacaaaatgtattcatctatttcttattcaagaaatctattacatgcctcttcaaccttcaggagtggtggttatttcacttgaactgaagaaataccatgggaactacctttctctgcatgagcaaaaagcaagatcacctggaattgttttaagttccagagaagagttagggcattttctttcctgaatagaccatcaacacactattttagggtttacatagtatgtctcataattttcttcacacaccttctgctaattgactaaagagctgtttaggtttatgtgactatgggaagccagcataaaaagtatactcaattatttggaatttaaagtagtacatagtactatgatatgtgtagtgagaaatacagtaatggaatagaactgttggaagttcagtattgacattttaagtgacattttttaatgagctcagctgagattatagccactacttacaggactttgctgtagaaacagagttttgagtttctcctatcagctggtaagaaggaaatctgattgcccaaggactttttttctctaaatgaagccccatctcaggtggatgtttaagaacttaggtattcaaggccgaggcaggcagatcacaaggtcaggagatcgagaccatcctgacttacatggtgaaaccccgtctctactaaaaatacagaaaattacctgggcgcctgtagttccagctactcaggaggctgaggcgggagaatggcgtgaaccctggaggtggagcttgcagtgagccgagatcgcgccactgcattccagcctgggcgacagagcgagactctgtctc

SEQ ID NO: 284891 - DNA, 5349 bp, Homo sapiens
caccgtaacccttgttcactattatttcttcattccagtggaataatttttctgacctgtctacctggaacaatctctgttcactctgaaatccctgtttattaaatttcgcttaaaggagttgtaattcacagaaggcagaaggataataggagactgggttactaaagacaaattttactatttttatacatgtgtctagatccagccttagagtatatactttgactttaagcaaaattcaaacaaatagaactaaacctgtatctttttctttattttcttttaggaaaaagaagcaactaacaaaacactgtgataataaggattattcagtatgcagtttgcaggatatccatgacgacattgaaaatgaattttttgtattcaccagatattcttatatgagaagatctattttaaacagtctaaatattttttcttctgttggaccagcatggcaggatttaagcgagggtatgatggaaagattgctggattatatgatctggataaaaccttgggtcgaggccattttgccgtggttaaacttgccaggcatgtctttacgggtgaaaaggtggcagtaaaagttattgacaagacaaaactggacactctagctactggtcatcttttccaggaagtgagatgcatgaaactagtgcagcatcctaacatcgtccgcctttatgaagttattgacacccagaccaaactatatcttattctagaacttggggatggaggagatatgtttgattatataatgaaacatgaggagggtcttaatgaagacttggccaagaagtattttgctcagatagttcatgctatatcttattgccataaactccatgtggttcacagagacttaaaaccagagaatgtagtcttctttgaaaaacaaggtcttgtaaagttgacagactttgggttcagcaacaaatttcaaccagggaagaagctcactacaagctgtggatctcttgcatattccgctccagaaattctgcttggtgatgagtatgatgcacctgcagtagatatttggagtctgggagtgatccttttcatgttggtgtgtgggcagccgccctttcaagaagccaatgacagtgaaacactgacaatgatcatggattgcaaatatacagtaccatcccatgtgtctaaagagtgtaaagacctaatcacacggatgctacagagagatcccaagagaagggcttctttagaagagattgaaaatcatccttggcttcagggagtggacccttcaccagctacaaagtataacattccccttgtgtcatacaaaaatctctcggaagaggagcacaacagcatcattcagcgcatggtgcttggggacatagcggatcgagacgccattgtagaagccctggaaaccaacaggtataaccatatcacagccacatacttcctgctggctgaaaggatcctgagagaaaagcaagagaaagaaatacagaccagatctgcaagcccgagcaatatcaaggcccagtttaggcagtcatggccaaccaaaattgatgtaccccaggaccttgaggatgacctcacggccactcctttgtcccacgcgactgtccctcagtctcctgctcgggctgctgacagtgtcctcaatggccacaggagcaaaggcctgtgtgactcagctaagaaagatgacctccctgagttggctggaccagcactctctacggtgccacccgcaagcttaaaacccacagccagtgggcggaagtgtctgttcagggtggaagaagatgaagaggaagatgaggaggacaagaaacccatgtccctctcaacacaagtggttttgcgccggaagccatctgtaaccaaccgcctgacatccaggaagagtgcgcccgtcctcaaccagatctttgaggaaggggaatctgacgatgagtttgacatggatgagaatctgcctcccaagttgagcaggttaaagatgaatatagcttctccaggtacagttcacaaacgctaccaccggaggaaaagtcagggccggggctccagctgcagtagttcggagaccagtgatgatgattctgaaagccggcggcggctcgataaagatagcgggttcacctactcctggcaccgacgggatagcagcgaggggccccctggcagtgagggggatggcgggggccagagcaagccaagcaatgccagtggaggggtggacaaggccagccccagtgagaacaatgctggtgggggcagtccctccagcggctcgggtggcaaccccaccaatacatcgggtaccacacgccgctgtgccggccccagcaactccatgcagctggcctctcgcagtgctggggagctcgttgagagcctcaaactcatgagcctctgcctcggctcccagcttcatgggagcaccaagtacattattgatccacagaatggcttgtcattttccagtgtgaaagtccaagagaaatctacgtggaaaatgtgcattagctccacagggaatgcagggcaggtccctgcagtgggcggcataaagtttttctctgaccacatggcagataccaccactgaattggaacggataaagagcaagaacctgaaaaataacgtgctgcagctacctctgtgcgaaaagaccatctctgtgaacatccagcggaaccctaaggaggggctgctgtgcgcatccagcccagccagctgttgccatgtcatctgactgtggccccatctggccgctagcacgcttcctgctcagagcagtgaagaccggctcacttcactgttccatttggttttactattttaaagtgggcgttaggagcaattatttattacctttccatttgttcgcctgatgatgtgacaatgcatggtctttgtgcatgctgctagacacttttctttcccagccgaaaagcctattatgtaatttttacattcataattttaatgtggatgatcaggattaaatcaagatatatatctggaacctcttataaatggagcacttagaaatttgttgttctgcacttaacctagagagagaaaaaatgctttttctttgtgaaaaatctgaattcctgtcctgaccttctgtgatgtggaaaccctaggctctgagacacactctctggtgtctgagacagaaccaaagcaataacgttgtgatgcccacaggcctggagccagctagcgaccttgtgccgcccagctgtccatggcccgtgcagagcagaggacagtgagtgtctgcactgagaaccttaaaccacagttgaacatacccacacctgtttgtcttaagctatagtgtaaaaacaaagtttgggctctgaaaatttaactgaaaaagatttccttgtttttgtaataggtgagataaagtacttagatttataaggcagcttcccctgtagtgataaattacaagcagacaatcttattttgtaatgtgatgaagtgatgatgtcttaactctacttagagagtgtatgtctgtctaacagaacaaaaagatgctctgtgtaaattccttcctgtagggcacactgcaggatttccatgtagatagaagaactatagggcctagtacagaaggtgcacacaaatgttggcaaagtcaaaaccccatgaattaaaacctactggaatttggtttttaggagtttggtaattagattatctcttttgttattttcattcagttatatcctttggctcagctagctttgaaattggctgatgaaaaaatatacataaaagggtaaaattcacacatacagcaaacaaaaatgcacaaagcctgcttcgtaacttttttttctggaattgtttttcactttgcctttttctgccaaaacaataatcaaagaactcttgctttaacctattcctgtacaaagactgtttttgaccagataatcatctgttgtggcattctatcttgtaggacactgtatattgcaaattgctgattatggaaggggccagttgctgttttttcatgcagtgccctgggagtcttaaaagcagtgcttagcaacattggtgatagcatgtggctgggacccagggcccttccccactcttcagccccgagtcatgtgtctgaggtgacggactgagacgcatctggtcctgtaattcagagagtgggcacatcaccaaagaactgcattgctgtggtcactgtttcttcaagtacacactgactctgctactttaggataaatatattttactcagaactctgaatttcacagtatacttactaaactaagtaaaaatgatacttaaaatacttattttactttctagacctaggctagatgttttaagctacagctctagttcattgtgatatttataatttgaaagctatgagaatagatgtgtgggtgaagccatagaacatatttgcttgaaattcttgagcagggatcttataaagggccagaaataagatgtgtggttcacatagatagtgagcgtaacatctgtattaaacataggagagaagtttataaagggcattggcaataaactctttgttgcagctgttttccaagcagtgtaaatactttttcctgtgattatgtatagccttggaatggcaccttttaactaacccatatgtgtttggtttcaatggttttttatattcagatgtatatatggtgctcactttaggatcagcagtgttgaccatttatgctgcatagctgtattatagccttattagttgtgtggttgacccttggggtatacaaatgtcagtctgagtggtgtcttactcctttgtttataagtgaatgattgtgcatgttttgtatgtcatagtatgtcgtcacataaaagggagggagcgaaaaaccattacattaagataatattggaccaaactacttacttgctctaaacagttacttgtaccccttaacctgtcttcaaaagttgcatatagttacagtagtgtataaattaaatattgtggaaaaacagtcttgtatttttctgtatgtgtgtatatatatataattatgtacttctggcaattctatctgtatttaaagatgtgacaatcttgacaccaattttaagaatagctgtgagaccgaattaaagataatccctaccaagtgaaaattgatgtgtgttaagagggtacagaattatcaactgatttggtcagttgcttccaatgctggttgatttccctcattgtgtaaacattgacaggtatgtgacaaatgggaaaaaaaatccaaataataaagtgacatattggtgttcagcaataaaaaaaaaaaa

SEQ ID NO: 284892 - DNA, 5140 bp, Homo sapiens
aggcgcagctacccggcaccccctccccgcggccggcagcccgctcggtattatgattagcgctgggtgcggggtttcggcggccgggagggagttgtcggcgccgcggccgctgcggacggacgctcgcctgccggctgagatatccatgacgacattgaaaatgaattttttgtattcaccagatattcttatatgagaagatctattttaaacagtctaaatattttttcttctgttggaccagcatggcaggatttaagcgagggtatgatggaaagattgctggattatatgatctggataaaaccttgggtcgaggccattttgccgtggttaaacttgccaggcatgtctttacgggtgaaaaggtggcagtaaaagttattgacaagacaaaactggacactctagctactggtcatcttttccaggaagtgagatgcatgaaactagtgcagcatcctaacatcgtccgcctttatgaagttattgacacccagaccaaactatatcttattctagaacttggggatggaggagatatgtttgattatataatgaaacatgaggagggtcttaatgaagacttggccaagaagtattttgctcagatagttcatgctatatcttattgccataaactccatgtggttcacagagacttaaaaccagagaatgtagtcttctttgaaaaacaaggtcttgtaaagttgacagactttgggttcagcaacaaatttcaaccagggaagaagctcactacaagctgtggatctcttgcatattccgctccagaaattctgcttggtgatgagtatgatgcacctgcagtagatatttggagtctgggagtgatccttttcatgttggtgtgtgggcagccgccctttcaagaagccaatgacagtgaaacactgacaatgatcatggattgcaaatatacagtaccatcccatgtgtctaaagagtgtaaagacctaatcacacggatgctacagagagatcccaagagaagggcttctttagaagagattgaaaatcatccttggcttcagggagtggacccttcaccagctacaaagtataacattccccttgtgtcatacaaaaatctctcggaagaggagcacaacagcatcattcagcgcatggtgcttggggacatagcggatcgagacgccattgtagaagccctggaaaccaacaggtataaccatatcacagccacatacttcctgctggctgaaaggatcctgagagaaaagcaagagaaagaaatacagaccagatctgcaagcccgagcaatatcaaggcccagtttaggcagtcatggccaaccaaaattgatgtaccccaggaccttgaggatgacctcacggccactcctttgtcccacgcgactgtccctcagtctcctgctcgggctgctgacagtgtcctcaatggccacaggagcaaaggcctgtgtgactcagctaagaaagatgacctccctgagttggctggaccagcactctctacggtgccacccgcaagcttaaaacccacagccagtgggcggaagtgtctgttcagggtggaagaagatgaagaggaagatgaggaggacaagaaacccatgtccctctcaacacaagtggttttgcgccggaagccatctgtaaccaaccgcctgacatccaggaagagtgcgcccgtcctcaaccagatctttgaggaaggggaatctgacgatgagtttgacatggatgagaatctgcctcccaagttgagcaggttaaagatgaatatagcttctccaggtacagttcacaaacgctaccaccggaggaaaagtcagggccggggctccagctgcagtagttcggagaccagtgatgatgattctgaaagccggcggcggctcgataaagatagcgggttcacctactcctggcaccgacgggatagcagcgaggggccccctggcagtgagggggatggcgggggccagagcaagccaagcaatgccagtggaggggtggacaaggccagccccagtgagaacaatgctggtgggggcagtccctccagcggctcgggtggcaaccccaccaatacatcgggtaccacacgccgctgtgccggccccagcaactccatgcagctggcctctcgcagtgctggggagctcgttgagagcctcaaactcatgagcctctgcctcggctcccagcttcatgggagcaccaagtacattattgatccacagaatggcttgtcattttccagtgtgaaagtccaagagaaatctacgtggaaaatgtgcattagctccacagggaatgcagggcaggtccctgcagtgggcggcataaagtttttctctgaccacatggcagataccaccactgaattggaacggataaagagcaagaacctgaaaaataacgtgctgcagctacctctgtgcgaaaagaccatctctgtgaacatccagcggaaccctaaggaggggctgctgtgcgcatccagcccagccagctgttgccatgtcatctgactgtggccccatctggccgctagcacgcttcctgctcagagcagtgaagaccggctcacttcactgttccatttggttttactattttaaagtgggcgttaggagcaattatttattacctttccatttgttcgcctgatgatgtgacaatgcatggtctttgtgcatgctgctagacacttttctttcccagccgaaaagcctattatgtaatttttacattcataattttaatgtggatgatcaggattaaatcaagatatatatctggaacctcttataaatggagcacttagaaatttgttgttctgcacttaacctagagagagaaaaaatgctttttctttgtgaaaaatctgaattcctgtcctgaccttctgtgatgtggaaaccctaggctctgagacacactctctggtgtctgagacagaaccaaagcaataacgttgtgatgcccacaggcctggagccagctagcgaccttgtgccgcccagctgtccatggcccgtgcagagcagaggacagtgagtgtctgcactgagaaccttaaaccacagttgaacatacccacacctgtttgtcttaagctatagtgtaaaaacaaagtttgggctctgaaaatttaactgaaaaagatttccttgtttttgtaataggtgagataaagtacttagatttataaggcagcttcccctgtagtgataaattacaagcagacaatcttattttgtaatgtgatgaagtgatgatgtcttaactctacttagagagtgtatgtctgtctaacagaacaaaaagatgctctgtgtaaattccttcctgtagggcacactgcaggatttccatgtagatagaagaactatagggcctagtacagaaggtgcacacaaatgttggcaaagtcaaaaccccatgaattaaaacctactggaatttggtttttaggagtttggtaattagattatctcttttgttattttcattcagttatatcctttggctcagctagctttgaaattggctgatgaaaaaatatacataaaagggtaaaattcacacatacagcaaacaaaaatgcacaaagcctgcttcgtaacttttttttctggaattgtttttcactttgcctttttctgccaaaacaataatcaaagaactcttgctttaacctattcctgtacaaagactgtttttgaccagataatcatctgttgtggcattctatcttgtaggacactgtatattgcaaattgctgattatggaaggggccagttgctgttttttcatgcagtgccctgggagtcttaaaagcagtgcttagcaacattggtgatagcatgtggctgggacccagggcccttccccactcttcagccccgagtcatgtgtctgaggtgacggactgagacgcatctggtcctgtaattcagagagtgggcacatcaccaaagaactgcattgctgtggtcactgtttcttcaagtacacactgactctgctactttaggataaatatattttactcagaactctgaatttcacagtatacttactaaactaagtaaaaatgatacttaaaatacttattttactttctagacctaggctagatgttttaagctacagctctagttcattgtgatatttataatttgaaagctatgagaatagatgtgtgggtgaagccatagaacatatttgcttgaaattcttgagcagggatcttataaagggccagaaataagatgtgtggttcacatagatagtgagcgtaacatctgtattaaacataggagagaagtttataaagggcattggcaataaactctttgttgcagctgttttccaagcagtgtaaatactttttcctgtgattatgtatagccttggaatggcaccttttaactaacccatatgtgtttggtttcaatggttttttatattcagatgtatatatggtgctcactttaggatcagcagtgttgaccatttatgctgcatagctgtattatagccttattagttgtgtggttgacccttggggtatacaaatgtcagtctgagtggtgtcttactcctttgtttataagtgaatgattgtgcatgttttgtatgtcatagtatgtcgtcacataaaagggagggagcgaaaaaccattacattaagataatattggaccaaactacttacttgctctaaacagttacttgtaccccttaacctgtcttcaaaagttgcatatagttacagtagtgtataaattaaatattgtggaaaaacagtcttgtatttttctgtatgtgtgtatatatatataattatgtacttctggcaattctatctgtatttaaagatgtgacaatcttgacaccaattttaagaatagctgtgagaccgaattaaagataatccctaccaagtgaaaattgatgtgtgttaagagggtacagaattatcaactgatttggtcagttgcttccaatgctggttgatttccctcattgtgtaaacattgacaggtatgtgacaaatgggaaaaaaaatccaaataataaagtgacatattggtgttcagcaataaaaaaaaaaaa

SEQ ID NO: 284893 - DNA, 4235 bp, Homo sapiens
ttgaaatttcaggtgaattttatttgtagtaatatacctttatgtgatctaagaaccaaagaaacaagacgtggtgttcaggttttgctttgccaataacctccatgggcttctaaaaaatgtttagtataaagcttttgtatagaaaagatggagtagctctttgccctattttcttttctgacacctgtgatgaagttttcacttggccaataagccacaaactgaaccatgtttcaaaaccacatttgcccttctggtggccttgctgatgtttacaggatgttgaatgggtttgcaaggctgctgcttttttctttaagtctgtagattttgtcccagtaagttcattgtgatgtactttactatcatctgcataatgattatatggcttttttccccccaatctatctgttacataggcagtcatggccaaccaaaattgatgtaccccaggaccttgaggatgacctcacggccactcctttgtcccacgcgactgtccctcagtctcctgctcgggctgctgacagtgtcctcaatggccacaggagcaaaggcctgtgtgactcagctaagaaagatgacctccctgagttggctggaccagcactctctacggtgccacccgcaagcttaaaacccacagccagtgggcggaagtgtctgttcagggtggaagaagatgaagaggaagatgaggaggacaagaaacccatgtccctctcaacacaagtggttttgcgccggaagccatctgtaaccaaccgcctgacatccaggaagagtgcgcccgtcctcaaccagatctttgaggaaggggaatctgacgatgagtttgacatggatgagaatctgcctcccaagttgagcaggttaaagatgaatatagcttctccaggtacagttcacaaacgctaccaccggaggaaaagtcagggccggggctccagctgcagtagttcggagaccagtgatgatgattctgaaagccggcggcggctcgataaagatagcgggttcacctactcctggcaccgacgggatagcagcgaggggccccctggcagtgagggggatggcgggggccagagcaagccaagcaatgccagtggaggggtggacaaggccagccccagtgagaacaatgctggtgggggcagtccctccagcggctcgggtggcaaccccaccaatacatcgggtaccacacgccgctgtgccggccccagcaactccatgcagctggcctctcgcagtgctggggagctcgttgagagcctcaaactcatgagcctctgcctcggctcccagcttcatgggagcaccaagtacattattgatccacagaatggcttgtcattttccagtgtgaaagtccaagagaaatctacgtggaaaatgtgcattagctccacagggaatgcagggcaggtccctgcagtgggcggcataaagtttttctctgaccacatggcagataccaccactgaattggaacggataaagagcaagaacctgaaaaataacgtgctgcagctacctctgtgcgaaaagaccatctctgtgaacatccagcggaaccctaaggaggggctgctgtgcgcatccagcccagccagctgttgccatgtcatctgactgtggccccatctggccgctagcacgcttcctgctcagagcagtgaagaccggctcacttcactgttccatttggttttactattttaaagtgggcgttaggagcaattatttattacctttccatttgttcgcctgatgatgtgacaatgcatggtctttgtgcatgctgctagacacttttctttcccagccgaaaagcctattatgtaatttttacattcataattttaatgtggatgatcaggattaaatcaagatatatatctggaacctcttataaatggagcacttagaaatttgttgttctgcacttaacctagagagagaaaaaatgctttttctttgtgaaaaatctgaattcctgtcctgaccttctgtgatgtggaaaccctaggctctgagacacactctctggtgtctgagacagaaccaaagcaataacgttgtgatgcccacaggcctggagccagctagcgaccttgtgccgcccagctgtccatggcccgtgcagagcagaggacagtgagtgtctgcactgagaaccttaaaccacagttgaacatacccacacctgtttgtcttaagctatagtgtaaaaacaaagtttgggctctgaaaatttaactgaaaaagatttccttgtttttgtaataggtgagataaagtacttagatttataaggcagcttcccctgtagtgataaattacaagcagacaatcttattttgtaatgtgatgaagtgatgatgtcttaactctacttagagagtgtatgtctgtctaacagaacaaaaagatgctctgtgtaaattccttcctgtagggcacactgcaggatttccatgtagatagaagaactatagggcctagtacagaaggtgcacacaaatgttggcaaagtcaaaaccccatgaattaaaacctactggaatttggtttttaggagtttggtaattagattatctcttttgttattttcattcagttatatcctttggctcagctagctttgaaattggctgatgaaaaaatatacataaaagggtaaaattcacacatacagcaaacaaaaatgcacaaagcctgcttcgtaacttttttttctggaattgtttttcactttgcctttttctgccaaaacaataatcaaagaactcttgctttaacctattcctgtacaaagactgtttttgaccagataatcatctgttgtggcattctatcttgtaggacactgtatattgcaaattgctgattatggaaggggccagttgctgttttttcatgcagtgccctgggagtcttaaaagcagtgcttagcaacattggtgatagcatgtggctgggacccagggcccttccccactcttcagccccgagtcatgtgtctgaggtgacggactgagacgcatctggtcctgtaattcagagagtgggcacatcaccaaagaactgcattgctgtggtcactgtttcttcaagtacacactgactctgctactttaggataaatatattttactcagaactctgaatttcacagtatacttactaaactaagtaaaaatgatacttaaaatacttattttactttctagacctaggctagatgttttaagctacagctctagttcattgtgatatttataatttgaaagctatgagaatagatgtgtgggtgaagccatagaacatatttgcttgaaattcttgagcagggatcttataaagggccagaaataagatgtgtggttcacatagatagtgagcgtaacatctgtattaaacataggagagaagtttataaagggcattggcaataaactctttgttgcagctgttttccaagcagtgtaaatactttttcctgtgattatgtatagccttggaatggcaccttttaactaacccatatgtgtttggtttcaatggttttttatattcagatgtatatatggtgctcactttaggatcagcagtgttgaccatttatgctgcatagctgtattatagccttattagttgtgtggttgacccttggggtatacaaatgtcagtctgagtggtgtcttactcctttgtttataagtgaatgattgtgcatgttttgtatgtcatagtatgtcgtcacataaaagggagggagcgaaaaaccattacattaagataatattggaccaaactacttacttgctctaaacagttacttgtaccccttaacctgtcttcaaaagttgcatatagttacagtagtgtataaattaaatattgtggaaaaacagtcttgtatttttctgtatgtgtgtatatatatataattatgtacttctggcaattctatctgtatttaaagatgtgacaatcttgacaccaattttaagaatagctgtgagaccgaattaaagataatccctaccaagtgaaaattgatgtgtgttaagagggtacagaattatcaactgatttggtcagttgcttccaatgctggttgatttccctcattgtgtaaacattgacaggtatgtgacaaatgggaaaaaaaatccaaataataaagtgacatattggtgttcagcaataaaaaaaaaaaa

SEQ ID NO: 284894 - DNA, 2946 bp, Homo sapiens
gccggtcgactactagagcgattctctgtggtgcagcaccaagtacattattgatccacagaatggcttgtcattttccagtgtgaaagtccaagagaaatctacgtggaaaatgtgcattagctccacagggaatgcagggcaggtccctgcagtgggcggcataaagtttttctctgaccacatggcagataccaccactgaattggaacggataaagagcaagaacctgaaaaataacgtgctgcagctacctctgtgcgaaaagaccatctctgtgaacatccagcggaaccctaaggaggggctgctgtgcgcatccagcccagccagctgttgccatgtcatctgactgtggccccatctggccgctagcacgcttcctgctcagagcagtgaagaccggctcacttcactgttccatttggttttactattttaaagtgggcgttaggagcaattatttattacctttccatttgttcgcctgatgatgtgacaatgcatggtctttgtgcatgctgctagacacttttctttcccagccgaaaagcctattatgtaatttttacattcataattttaatgtggatgatcaggattaaatcaagatatatatctggaacctcttataaatggagcacttagaaatttgttgttctgcacttaacctagagagagaaaaaatgctttttctttgtgaaaaatctgaattcctgtcctgaccttctgtgatgtggaaaccctaggctctgagacacactctctggtgtctgagacagaaccaaagcaataacgttgtgatgcccacaggcctggagccagctagcgaccttgtgccgcccagctgtccatggcccgtgcagagcagaggacagtgagtgtctgcactgagaaccttaaaccacagttgaacatacccacacctgtttgtcttaagctatagtgtaaaaacaaagtttgggctctgaaaatttaactgaaaaagatttccttgtttttgtaataggtgagataaagtacttagatttataaggcagcttcccctgtagtgataaattacaagcagacaatcttattttgtaatgtgatgaagtgatgatgtcttaactctacttagagagtgtatgtctgtctaacagaacaaaaagatgctctgtgtaaattccttcctgtagggcacactgcaggatttccatgtagatagaagaactatagggcctagtacagaaggtgcacacaaatgttggcaaagtcaaaaccccatgaattaaaacctactggaatttggtttttaggagtttggtaattagattatctcttttgttattttcattcagttatatcctttggctcagctagctttgaaattggctgatgaaaaaatatacataaaagggtaaaattcacacatacagcaaacaaaaatgcacaaagcctgcttcgtaacttttttttctggaattgtttttcactttgcctttttctgccaaaacaataatcaaagaactcttgctttaacctattcctgtacaaagactgtttttgaccagataatcatctgttgtggcattctatcttgtaggacactgtatattgcaaattgctgattatggaaggggccagttgctgttttttcatgcagtgccctgggagtcttaaaagcagtgcttagcaacattggtgatagcatgtggctgggacccagggcccttccccactcttcagccccgagtcatgtgtctgaggtgacggactgagacgcatctggtcctgtaattcagagagtgggcacatcaccaaagaactgcattgctgtggtcactgtttcttcaagtacacactgactctgctactttaggataaatatattttactcagaactctgaatttcacagtatacttactaaactaagtaaaaatgatacttaaaatacttattttactttctagacctaggctagatgttttaagctacagctctagttcattgtgatatttataatttgaaagctatgagaatagatgtgtgggtgaagccatagaacatatttgcttgaaattcttgagcagggatcttataaagggccagaaataagatgtgtggttcacatagatagtgagcgtaacatctgtattaaacataggagagaagtttataaagggcattggcaataaactctttgttgcagctgttttccaagcagtgtaaatactttttcctgtgattatgtatagccttggaatggcaccttttaactaacccatatgtgtttggtttcaatggttttttatattcagatgtatatatggtgctcactttaggatcagcagtgttgaccatttatgctgcatagctgtattatagccttattagttgtgtggttgacccttggggtatacaaatgtcagtctgagtggtgtcttactcctttgtttataagtgaatgattgtgcatgttttgtatgtcatagtatgtcgtcacataaaagggagggagcgaaaaaccattacattaagataatattggaccaaactacttacttgctctaaacagttacttgtaccccttaacctgtcttcaaaagttgcatatagttacagtagtgtataaattaaatattgtggaaaaacagtcttgtatttttctgtatgtgtgtatatatatataattatgtacttctggcaattctatctgtatttaaagatgtgacaatcttgacaccaattttaagaatagctgtgagaccgaattaaagataatccctaccaagtgaaaattgatgtgtgttaagagggtacagaattatcaactgatttggtcagttgcttccaatgctggttgatttccctcattgtgtaaacattgacaggtatgtgacaaatgggaaaaaaaatccaaataataaagtgacatattggtgttcagcaataaaaaaaaaaaa

SEQ ID NO: 284895 - DNA, 2420 bp, Homo sapiens
aagtactgactgttcaaagctcaggcaaaccatgcagatccacgtgttgttggaggaggcgctcccttcaggagaccacagagggggagtgactgtggctgaccatgtgggcagaggggctggcgggctggcccctgcgagaggcggactcagggctgctggatgctccgtccttggccgctttgatctggagccacgtgtcacccagagctttggcaaagtggtcgtccacggagcccgtgatggacacggagttgggtgccggctcgggctccttgtaattcttgcccaggctcctgcggaaatgctcctccaccacggggtcacaggtggtggcagcgctcggtggcctccggtagctggcaggcccgggcgcggcctcgtgccgaattcggcacgagggggtttcggcggccgggagggagttgtcggcgccgcggccgctgcggacggacgctcgcctgccggctgaggaaaaagaagcaactaacaaaacactgtgataataaggattattcagtatgcagtttgcaggatatccatgacgacattgaaaatgaattttttgtattcaccagatattcttatatgagaagatctattttaaacagtctaaatattttttcttctgttggaccagcatggcaggatttaagcgagggtatgatggaaagattgctggattatatgatctggataaaaccttgggtcgaggccattttgccgtggttaaacttgccaggcatgtctttacgggtgaaaaggtggcagtaaaagttattgacaagacaaaactggacactctagctactggtcatcttttccaggaagtgagatgcatgaaactagtgcagcatcctaacatcgtccgcctttatgaagttattgacacccagaccaaactatatcttattctagaacttggggatggaggagatatgtttgattatataatgaaacatgaggagggtcttaatgaagacttggccaagaagtattttgctcagatagttcatgctatatcttattgccataaactccatgtggttcacagagacttaaaaccagagaatgtagtcttctttgaaaaacaaggtcttgtaaagttgacagactttgggttcagcaacaaatttcaaccagggaagaagctcactacaagctgtggatctcttgcatattccgctccagaaattctgcttggtgatgagtatgatgcacctgcagtagatatttggagtctgggagtgatccttttcatgttggtgtgtgggcagccgccctttcaagaagccaatgacagtgaaacactgacaatgatcatggattgcaaatatacagtaccatcccatgtgtctaaagagtgtaaagagtaagtaaaacaaagtatgtggaaaccttaaggactcagattaaaaccagaagttttaattccattaatatgtcaagaaaatttgagaggacttcaaacatccaagcatctgggttgattttaatttttgaatttaatatttctgctgttgtttcagagtgttcggtcggcgggggtgggggtggttagcccctgaatatgatctgaaatttaatattagagtacaaaatgtattcatctatttcttattcaagaaatctattacatgcctcttcaaccttcaggagtggtggttatttcacttgaactgaagaaataccatgggaactacctttctctgcatgagcaaaaagcaagatcacctggaattgttttaagttccagagaagagttagggcattttctttcctgaatagaccatcaacacactattttagggtttacatagtatgtctcataattttcttcacacaccttctgctaattgactaaagagctgtttaggtttatgtgactatgggaagccagcataaaaagtatactcaattatttggaatttaaagtagtacatagtactatgatatgtgtagtgagaaatacagtaatggaatagaactgttggaagttcagtattgacattttaagtgacattttttaatgagctcagctgagattatagccactacttacaggactttgctgtagaaacagagttttgagtttctcctatcagctggtaagaaggaaatctgattgcccaaggactttttttctctaaatgaagccccatctcaggtggatgtttaagaacttaggtattcaaggccgaggcaggcagatcacaaggtcaggagatcgagaccatcctgacttacatggtgaaaccccgtctctactaaaaatacagaaaattacctgggcgcctgtagttccagctactcaggaggctgaggcgggagaatggcgtgaaccctggaggtggagcttgcagtgagccgagatcgcgccactgcattccagcctgggcgacagagcgagactctgtctc

SEQ ID NO: 284896 - DNA, 3151 bp, Homo sapiens
aagtactgactgttcaaagctcaggcaaaccatgcagatccacgtgttgttggaggaggcgctcccttcaggagaccacagagggggagtgactgtggctgaccatgtgggcagaggggctggcgggctggcccctgcgagaggcggactcagggctgctggatgctccgtccttggccgctttgatctggagccacgtgtcacccagagctttggcaaagtggtcgtccacggagcccgtgatggacacggagttgggtgccggctcgggctccttgtaattcttgcccaggctcctgcggaaatgctcctccaccacggggtcacaggtggtggcagcgctcggtggcctccggtagctggcaggcccgggcgcggcctcgtgccgaattcggcacgagggggtttcggcggccgggagggagttgtcggcgccgcggccgctgcggacggacgctcgcctgccggctgaggaaaaagaagcaactaacaaaacactgtgataataaggattattcagtatgcagtttgcaggatatccatgacgacattgaaaatgaattttttgtattcaccagatattcttatatgagaagatctattttaaacagtctaaatattttttcttctgttggaccagcatggcaggatttaagcgagggtatgatggaaagattgctggattatatgatctggataaaaccttgggtcgaggccattttgccgtggttaaacttgccaggcatgtctttacgggtgaaaaggtggcagtaaaagttattgacaagacaaaactggacactctagctactggtcatcttttccaggaagtgagatgcatgaaactagtgcagcatcctaacatcgtccgcctttatgaagttattgacacccagaccaaactatatcttattctagaacttggggatggaggagatatgtttgattatataatgaaacatgaggagggtcttaatgaagacttggccaagaagtattttgctcagatagttcatgctatatcttattgccataaactccatgtggttcacagagacttaaaaccagagaatgtagtcttctttgaaaaacaaggtcttgtaaagttgacagactttgggttcagcaacaaatttcaaccagggaagaagctcactacaagctgtggatctcttgcatattccgctccagaaattctgcttggtgatgagtatgatgcacctgcagtagatatttggagtctgggagtgatccttttcatgttggtgtgtgggcagccgccctttcaagaagccaatgacagtgaaacactgacaatgatcatggattgcaaatatacagtaccatcccatgtgtctaaagagtgtaaagacctaatcacacggatgctacagagagatcccaagagaagggcttctttagaagagattgaaaatcatccttggcttcagggagtggacccttcaccagctacaaagtataacattccccttgtgtcatacaaaaatctctcggaagaggagcacaacagcatcattcagcgcatggtgcttggggacatagcggatcgagacgccattgtagaagccctggaaaccaacaggtataaccatatcacagccacatacttcctgctggctgaaaggatcctgagagaaaagcaagagaaagaaatacagaccagatctgcaagcccgagcaatatcaaggcccagtttaggcagtcatggccaaccaaaattgatgtaccccaggaccttgaggatgacctcacggccactcctttgtcccacgcgactgtccctcagtctcctgctcgggctgctgacagtgtcctcaatggccacaggagcaaaggcctgtgtgactcagctaagaaagatgacctccctgagttggctggaccagcactctctacggtgccacccgcaagcttaaaacccacagccagtgggcggaagtgtctgttcagggtggaagaagatgaagaggaagatgaggaggacaagaaacccatgtccctctcaacacaagtggttttgcgccggaagccatctgtaaccaaccgcctgacatccaggaagagtgcgcccgtcctcaaccagatctttgaggaaggggaatctgacgatgagtttgacatggatgagaatctgcctcccaagttgagcaggttaaagatgaatatagcttctccaggtacagttcacaaacgctaccaccggaggaaaagtcagggccggggctccagctgcagtagttcggagaccagtgatgatgattctgaaagccggcggcggctcgataaagatagcgggttcacctactcctggcaccgacgggatagcagcgaggggccccctggcagtgagggggatggcgggggccagagcaagccaagcaatgccagtggaggggtggacaaggccagccccagtgagaacaatgctggtgggggcagtccctccagcggctcgggtggcaaccccaccaatacatcgggtaccacacgccgctgtgccggccccagcaactccatgcagctggcctctcgcagtgctggggagctcgttgagagcctcaaactcatgagcctctgcctcggctcccagcttcatgggagcaccaagtacattattgatccacagaatggcttgtcattttccagtgtgaaagtccaagagaaatctacgtggaaaatgtgcattagctccacagggaatgcagggcaggtccctgcagtgggcggcataaagtttttctctgaccacatggcagataccaccactgaattggaacggataaagagcaagaacctgaaaaataacgtgctgcagctacctctgtgcgaaaagaccatctctgtgaacatccagcggaaccctaaggaggggctgctgtgcgcatccagcccagccagctgttgccatgtcatctgactgtggccccatctggccgctagcacgcttcctgctcagagcagtgaagaccggctcacttcactgttccatttggttttactattttaaagtgggcgttaggagcaattatttattacctttccatttgttcgcctgatgatgtgacaatgcatggtctttgtgcatgctgctaacgcccactttaaaaaagtaaaaaaagttggcggccg

SEQ ID NO: 284897 - DNA, 2064 bp, Homo sapiens
aagtactgactgttcaaagctcaggcaaaccatgcagatccacgtgttgttggaggaggcgctcccttcaggagaccacagagggggagtgactgtggctgaccatgtgggcagaggggctggcgggctggcccctgcgagaggcggactcagggctgctggatgctccgtccttggccgctttgatctggagccacgtgtcacccagagctttggcaaagtggtcgtccacggagcccgtgatggacacggagttgggtgccggctcgggctccttgtaattcttgcccaggctcctgcggaaatgctcctccaccacggggtcacaggtggtggcagcgctcggtggcctccggtagctggcaggcccgggcgcggcctcgtgccgaattcggcacgagggggtttcggcggccgggagggagttgtcggcgccgcggccgctgcggacggacgctcgcctgccggctgaggaaaaagaagcaactaacaaaacactgtgataataaggattattcagtatgcagtttgcaggatatccatgacgacattgaaaatgaattttttgtattcaccagatattcttatatgagaagatctattttaaacagtctaaatattttttcttctgttggaccagcatggcaggatttaagcgagggtatgatggaaagattgctggattatatgatctggataaaaccttgggtcgaggccattttgccgtggttaaacttgccaggcatgtctttacgggtgaaaaggtggcagtaaaagttattgacaagacaaaactggacactctagctactggtcatcttttccaggaagtgagatgcatgaaactagtgcagcatcctaacatcgtccgcctttatgaagttattgacacccagaccaaactatatcttattctagaacttggggatggaggagatatgtttgattatataatgaaacatgaggagggtcttaatgaagacttggccaagaagtattttgctcagatagttcatgctatatcttattgccataaactccatgtggttcacagagacttaaaaccagagaatgtagtcttctttgaaaaacaaggtcttgtaaagttgacagactttgggttcagcaacaaatttcaaccagggaagaagctcactacaagctgtggatctcttgcatattccgctccagaaattctgcttggtgatgagtatgatgcacctgcagtagatatttggagtctgggagtgatccttttcatgttggtgtgtgggcagccgccctttcaagaagccaatgacagtgaaacactgacaatgatcatggattgcaaatatacagtaccatcccatgtgtctaaagagtgtaaagacctaatcacacggatgctacagagagatcccaagagaagggcttctttagaagagattgaaaatcatccttggcttcagggagtggacccttcaccagctacaaagtataacattccccttgtgtcatacaaaaatctctcggaagaggagcacaacagcatcattcagcgcatggtgcttggggacatagcggatcgagacgccattgtagaagccctggaaaccaacaggtataaccatatcacagccacatacttcctgctggctgaaaggatcctgagagaaaagcaagagaaagaaatacagaccagatctgcaagcccgagcaatatcaaggcccagtttagagggtcagctggcctggatttattgaagctctgcctccacttcttgcagtgactgcatctatccaccccctgggccgtgggactctccggtgaaaacaggagtttttgcatttctgaggactgatggctccaccagattcaccaaccagtcctgtggccctcacccaggaactgactcagctgaagaagacagctttgactcactgtgatttcacctctgatccaattagtcggtactccccattccctggccccctacccaccaaactatccttgaaaaactctagtctgaatttttggggagactgatttgagtaataataaaactgctatcatgttcaaaa

SEQ ID NO: 284898 - DNA, 1489 bp, Homo sapiens
aagtactgactgttcaaagctcaggcaaaccatgcagatccacgtgttgttggaggaggcgctcccttcaggagaccacagagggggagtgactgtggctgaccatgtgggcagaggggctggcgggctggcccctgcgagaggcggactcagggctgctggatgctccgtccttggccgctttgatctggagccacgtgtcacccagagctttggcaaagtggtcgtccacggagcccgtgatggacacggagttgggtgccggctcgggctccttgtaattcttgcccaggctcctgcggaaatgctcctccaccacggggtcacaggtggtggcagcgctcggtggcctccggtagctggcaggcccgggcgcggcctcgtgccgaattcggcacgagggggtttcggcggccgggagggagttgtcggcgccgcggccgctgcggacggacgctcgcctgccggctgaggaaaaagaagcaactaacaaaacactgtgataataaggattattcagtatgcagtttgcaggatatccatgacgacattgaaaatgaattttttgtattcaccagatattcttatatgagaagatctattttaaacagtctaaatattttttcttctgttggaccagcatggcaggatttaagcgagggtatgatggaaagattgctggattatatgatctggataaaaccttgggtcgaggccattttgccgtggttaaacttgccaggcatgtctttacgggtgaaaaggtggcagtaaaagttattgacaagacaaaactggacactctagctactggtcatcttttccaggaagtgagatgcatgaaactagtgcagcatcctaacatcgtccgcctttatgaagttattgacacccagaccaaactatatcttattctagaacttggggatggaggagatatgtttgattatataatgaaacatgaggagggtcttaatgaagacttggccaagaagtattttgctcagatagttcatgctatatcttattgccataaactccatgtggttcacagagacttaaaaccagagaatgtagtcttctttgaaaaacaaggtcttgtaaagttgacagactttgggttcagcaacaaatttcaaccagggaagaagctcactacaagctgtggatctcttgcatattccgctccagaaattctgcttggtgatgagtatgatgcacctgcagtaggtaggtaacctcggtccagtatttggccatttgaattctgccagctagagttggtcagatcggttgtttatctaaaaatgatttctagagaattttaaatcgctccttaactaccaaattgggtttcataaatgcctatatgcctaaagctggacattaaatcatattatcaccctttatatggcaaatgtctaaagtatatttgtgagtacaaaggaaaatgagtaagttatcatttaaagtaatcttcttttctgtt

SEQ ID NO: 284899 - DNA, 3212 bp, Homo sapiens
gtccccgcgcttgccggcaaaaactttattcttggcaaacttctctttctcttcccctcctcctcggcccccatcttctgctcctcctccttctctagcagattaaatgagcctcgagaagaaaaaccgaagcgaaagggaagaaaataagaagatctaaaacggacatctccagcgtgggtggctcctttttctttttctttttttcccacccttcaggaagtggacgtttcgttatcttctgatccttgcaccttcttttggggcaaacggggcccttctgcccagatcccctctcttttctcggaaaacaaactactaagtcggcatccggggtaactacagtggagagggtttccgcggagacgcgccgccggaccctcctctgcactttggggaggcgtgctccctccagaaccggcgttctccgcgcgcaaatcccggcgacgcggggtcgcggggtggccgccggggcagcctcgtctagcgcgcgccgcgcagacgcccccggagtcgccagctaccgcagccctcgccgcccagtgcccttcggcctcgggggcgggcgcctgcgtcggtctccgcgaagcgggaaagcgcggcggccgccgggattcgggcgccgcggcagctgctccggctgccggccggcggccccgcgctcgcccgccccgcttccgcccgctgtcctgctgcacgaacccttccaactctcctttcctcccccacccttgagttacccctctgtctttcctgctgttgcgcgggtgctcccacagcggagcggagattacagagccgccgggatgccccaactctccggaggaggtggcggcggcgggggggacccggaactctgcgccacggacgagatgatccccttcaaggacgagggcgatcctcagaaggaaaagatcttcgccgagatcagtcatcccgaagaggaaggcgatttagctgacatcaagtcttccttggtgaacgagtctgaaatcatcccggccagcaacggacacgaggtggccagacaagcacaaacctctcaggagccctaccacgacaaggccagagaacaccccgatgacggaaagcatccagatggaggcctctacaacaagggaccctcctactcgagttattccgggtacataatgatgccaaatatgaataacgacccatacatgtcaaatggatctctttctccacccatcccgagaacatcaaataaagtgcccgtggtgcagccatcccatgcggtccatcctctcacccccctcatcacttacagtgacgagcacttttctccaggatcacacccgtcacacatcccatcagatgtcaactccaaacaaggcatgtccagacatcctccagctcctgatatccctactttttatcccttgtctccgggtggtgttggacagatcaccccacctcttggctggcaaggtcagcctgtatatcccatcacgggtggattcaggcaaccctacccatcctcactgtcagtcgacacttccatgtccaggttttcccatcatatgattcccggtcctcctggtccccacacaactggcatccctcatccagctattgtaacacctcaggtcaaacaggaacatccccacactgacagtgacctaatgcacgtgaagcctcagcatgaacagagaaaggagcaggagccaaaaagacctcacattaagaagcctctgaatgcttttatgttatacatgaaagaaatgagagcgaatgtcgttgctgagtgtactctaaaagaaagtgcagctatcaaccagattcttggcagaaggtggcatgccctctcccgtgaagagcaggctaaatattatgaattagcacggaaagaaagacagctacatatgcagctttatccaggctggtctgcaagagacaattatggtaagaaaaagaagaggaagagagagaaactacaggaatctgcatcaggtacaggtccaagaatgacagctgcctacatctgaaacatggtggaaaacgaagctcattcccaacgtgcaaagccaaggcagcgaccccaggacctcttctggagatggaagcttgttgaaaacccagactgtctccacggcctgcccagtcgaccccaaaggaacactgacatcaattttaccctgaggtcactgctagagacgctgatccataaagacaatcactgccaacccctctttcgtctactgcaagagccaagttccaaaataaagcataaaaaggttttttaaaaggaaatgtaaaagcacatgagaatgctagcaggctgtggggcagctgagcagcttttctccccccatatctgcgtgcacttcccagagcatcttgcatccaaacctgtaacctttcggcaaggacggtaacttggctgcatttgcctgtcatgcgcaactggagccagcaaccagcacatccatcagcaccccagtggaggagttcatggaagagttccctctttgtttctgcttcatttttctttcttttcttttctcctaaagcttttatttaacagtgcaaaaggatcgttttttttgcttttttaaacttgaatttttttaatttacactttttagttttaattttcttgtatatttggctagctatgagcttttaaataaaattgaaagttctggaaaagtttgaaataatgacataaaaagaagccttctttttctgagacagcttgtctggtaagtggcttctctgtgaattgcctgtaacacatagtggcttctccgcccttgtaaggtgttcagtagagctaaataaatgtaatagccaaacccactctgttggtagcaattggcagccctatttcagtttattttttcttctgttttcttcttttctttttttaaacagtaaaccttaacagatgcgttcagcagactggtttgcagtgaattttcatttctttccttatcacccccttgttgtaaaaagcccagcacttgaattgttattactttaaatgttctgtatttgtatctgtttttattagccaattagtgggattttatgccagttgttaaaatgagcattgatgtacccattttttaaaaaagcaaggcacagcctttgcccaaaactgtcatcctaacgtttgtcattccagtttgagttaatgtgctgagcatttttttaaaagaagctttgtaataaaacatttttaaaaattg

SEQ ID NO: 284900 - DNA, 975 bp, Homo sapiens
gtccccgcgcttgccggcaaaaactttattcttggcaaacttctctttctcttcccctcctcctcggcccccatcttctgctcctcctccttctctagcagattaaatgagcctcgagaagaaaaaccgaagcgaaagggaagaaaataagaagatctaaaacggacatctccagcgtgggtggctcctttttctttttctttttttcccacccttcaggaagtggacgtttcgttatcttctgatccttgcaccttcttttggggcaaacggggcccttctgcccagatcccctctcttttctcggaaaacaaactactaagtcggcatccggggtaactacagtggagagggtttccgcggagacgcgccgccggaccctcctctgcactttggggaggcgtgctccctccagaaccggcgttctccgcgcgcaaatcccggcgacgcggggtcgcggggtggccgccggggcagcctcgtctagcgcgcgccgcgcagacgcccccggagtcgccagctaccgcagccctcgccgcccagtgcccttcggcctcgggggcgggcgcctgcgtcggtctccgcgaagcgggaaagcgcggcggccgccgggattcgggcgccgcggcagctgctccggctgccggccggcggccccgcgctcgcccgccccgcttccgcccgctgtcctgctgcacgaacccttccaactctcctttcctcccccacccttgagttacccctctgtctttcctgctgttgcgcgggtgctcccacagcggagcggagattacagagccgccgggatgccccaactctccggaggaggtggcggccgtcctggggacctcatactctgtaacatgtgccctaccacctccttataggggtagggcgacccattaaaggctaagatgattaaatgcatggctcataagtaatagaattgcgatttttctgtcttaaagatttact

SEQ ID NO: 284901 - DNA, 3128 bp, Homo sapiens
gtccccgcgcttgccggcaaaaactttattcttggcaaacttctctttctcttcccctcctcctcggcccccatcttctgctcctcctccttctctagcagattaaatgagcctcgagaagaaaaaccgaagcgaaagggaagaaaataagaagatctaaaacggacatctccagcgtgggtggctcctttttctttttctttttttcccacccttcaggaagtggacgtttcgttatcttctgatccttgcaccttcttttggggcaaacggggcccttctgcccagatcccctctcttttctcggaaaacaaactactaagtcggcatccggggtaactacagtggagagggtttccgcggagacgcgccgccggaccctcctctgcactttggggaggcgtgctccctccagaaccggcgttctccgcgcgcaaatcccggcgacgcggggtcgcggggtggccgccggggcagcctcgtctagcgcgcgccgcgcagacgcccccggagtcgccagctaccgcagccctcgccgcccagtgcccttcggcctcgggggcgggcgcctgcgtcggtctccgcgaagcgggaaagcgcggcggccgccgggattcgggcgccgcggcagctgctccggctgccggccggcggccccgcgctcgcccgccccgcttccgcccgctgtcctgctgcacgaacccttccaactctcctttcctcccccacccttgagttacccctctgtctttcctgctgttgcgcgggtgctcccacagcggagcggagattacagagccgccgggatgccccaactctccggaggaggtggcggcggcgggggggacccggaactctgcgccacggacgagatgatccccttcaaggacgagggcgatcctcagaaggaaaagatcttcgccgagatcagtcatcccgaagaggaaggcgatttagctgacatcaagtcttccttggtgaacgagtctgaaatcatcccggccagcaacggacacgaggtggccagacaagcacaaacctctcaggagccctaccacgacaaggccagagaacaccccgatgacggaaagcatccagatggaggcctctacaacaagggaccctcctactcgagttattccgggtacataatgatgccaaatatgaataacgacccatacatgtcaaatggatctctttctccacccatcccgagaacatcaaataaagtgcccgtggtgcagccatcccatgcggtccatcctctcacccccctcatcacttacagtgacgagcacttttctccaggatcacacccgtcacacatcccatcagatgtcaactccaaacaaggcatgtccagacatcctccagctcctgatatccctactttttatcccttgtctccgggtggtgttggacagatcaccccacctcttggctggttttcccatcatatgattcccggtcctcctggtccccacacaactggcatccctcatccagctattgtaacacctcaggtcaaacaggaacatccccacactgacagtgacctaatgcacgtgaagcctcagcatgaacagagaaaggagcaggagccaaaaagacctcacattaagaagcctctgaatgcttttatgttatacatgaaagaaatgagagcgaatgtcgttgctgagtgtactctaaaagaaagtgcagctatcaaccagattcttggcagaaggtggcatgccctctcccgtgaagagcaggctaaatattatgaattagcacggaaagaaagacagctacatatgcagctttatccaggctggtctgcaagagacaattatggtaagaaaaagaagaggaagagagagaaactacaggaatctgcatcaggtacaggtccaagaatgacagctgcctacatctgaaacatggtggaaaacgaagctcattcccaacgtgcaaagccaaggcagcgaccccaggacctcttctggagatggaagcttgttgaaaacccagactgtctccacggcctgcccagtcgaccccaaaggaacactgacatcaattttaccctgaggtcactgctagagacgctgatccataaagacaatcactgccaacccctctttcgtctactgcaagagccaagttccaaaataaagcataaaaaggttttttaaaaggaaatgtaaaagcacatgagaatgctagcaggctgtggggcagctgagcagcttttctccccccatatctgcgtgcacttcccagagcatcttgcatccaaacctgtaacctttcggcaaggacggtaacttggctgcatttgcctgtcatgcgcaactggagccagcaaccagcacatccatcagcaccccagtggaggagttcatggaagagttccctctttgtttctgcttcatttttctttcttttcttttctcctaaagcttttatttaacagtgcaaaaggatcgttttttttgcttttttaaacttgaatttttttaatttacactttttagttttaattttcttgtatatttggctagctatgagcttttaaataaaattgaaagttctggaaaagtttgaaataatgacataaaaagaagccttctttttctgagacagcttgtctggtaagtggcttctctgtgaattgcctgtaacacatagtggcttctccgcccttgtaaggtgttcagtagagctaaataaatgtaatagccaaacccactctgttggtagcaattggcagccctatttcagtttattttttcttctgttttcttcttttctttttttaaacagtaaaccttaacagatgcgttcagcagactggtttgcagtgaattttcatttctttccttatcacccccttgttgtaaaaagcccagcacttgaattgttattactttaaatgttctgtatttgtatctgtttttattagccaattagtgggattttatgccagttgttaaaatgagcattgatgtacccattttttaaaaaagcaaggcacagcctttgcccaaaactgtcatcctaacgtttgtcattccagtttgagttaatgtgctgagcatttttttaaaagaagctttgtaataaaacatttttaaaaattg

SEQ ID NO: 284902 - DNA, 3292 bp, Homo sapiens
gtccccgcgcttgccggcaaaaactttattcttggcaaacttctctttctcttcccctcctcctcggcccccatcttctgctcctcctccttctctagcagattaaatgagcctcgagaagaaaaaccgaagcgaaagggaagaaaataagaagatctaaaacggacatctccagcgtgggtggctcctttttctttttctttttttcccacccttcaggaagtggacgtttcgttatcttctgatccttgcaccttcttttggggcaaacggggcccttctgcccagatcccctctcttttctcggaaaacaaactactaagtcggcatccggggtaactacagtggagagggtttccgcggagacgcgccgccggaccctcctctgcactttggggaggcgtgctccctccagaaccggcgttctccgcgcgcaaatcccggcgacgcggggtcgcggggtggccgccggggcagcctcgtctagcgcgcgccgcgcagacgcccccggagtcgccagctaccgcagccctcgccgcccagtgcccttcggcctcgggggcgggcgcctgcgtcggtctccgcgaagcgggaaagcgcggcggccgccgggattcgggcgccgcggcagctgctccggctgccggccggcggccccgcgctcgcccgccccgcttccgcccgctgtcctgctgcacgaacccttccaactctcctttcctcccccacccttgagttacccctctgtctttcctgctgttgcgcgggtgctcccacagcggagcggagattacagagccgccgggatgccccaactctccggaggaggtggcggcggcgggggggacccggaactctgcgccacggacgagatgatccccttcaaggacgagggcgatcctcagaaggaaaagatcttcgccgagatcagtcatcccgaagaggaaggcgatttagctgacatcaagtcttccttggtgaacgagtctgaaatcatcccggccagcaacggacacgaggtggccagacaagcacaaacctctcaggagccctaccacgacaaggccagagaacaccccgatgacggaaagcatccagatggaggcctctacaacaagggaccctcctactcgagttattccgggtacataatgatgccaaatatgaataacgacccatacatgtcaaatggatctctttctccacccatcccgagaacatcaaataaagtgcccgtggtgcagccatcccatgcggtccatcctctcacccccctcatcacttacagtgacgagcacttttctccaggatcacacccgtcacacatcccatcagatgtcaactccaaacaaggcatgtccagacatcctccagctcctgatatccctactttttatcccttgtctccgggtggtgttggacagatcaccccacctcttggctggcaaggtcagcctgtatatcccatcacgggtggattcaggcaaccctacccatcctcactgtcagtcgacacttccatgtccaggttttcccatcatatgattcccggtcctcctggtccccacacaactggcatccctcatccagctattgtaacacctcaggtcaaacaggaacatccccacactgacagtgacctaatgcacgtgtgctctgcttttctcctcccccatcccttcctcattccttcaaccccttcccctaaccaccaccaccaccaccttttaggaagcctcagcatgaacagagaaaggagcaggagccaaaaagacctcacattaagaagcctctgaatgcttttatgttatacatgaaagaaatgagagcgaatgtcgttgctgagtgtactctaaaagaaagtgcagctatcaaccagattcttggcagaaggtggcatgccctctcccgtgaagagcaggctaaatattatgaattagcacggaaagaaagacagctacatatgcagctttatccaggctggtctgcaagagacaattatggtaagaaaaagaagaggaagagagagaaactacaggaatctgcatcaggtacaggtccaagaatgacagctgcctacatctgaaacatggtggaaaacgaagctcattcccaacgtgcaaagccaaggcagcgaccccaggacctcttctggagatggaagcttgttgaaaacccagactgtctccacggcctgcccagtcgaccccaaaggaacactgacatcaattttaccctgaggtcactgctagagacgctgatccataaagacaatcactgccaacccctctttcgtctactgcaagagccaagttccaaaataaagcataaaaaggttttttaaaaggaaatgtaaaagcacatgagaatgctagcaggctgtggggcagctgagcagcttttctccccccatatctgcgtgcacttcccagagcatcttgcatccaaacctgtaacctttcggcaaggacggtaacttggctgcatttgcctgtcatgcgcaactggagccagcaaccagcacatccatcagcaccccagtggaggagttcatggaagagttccctctttgtttctgcttcatttttctttcttttcttttctcctaaagcttttatttaacagtgcaaaaggatcgttttttttgcttttttaaacttgaatttttttaatttacactttttagttttaattttcttgtatatttggctagctatgagcttttaaataaaattgaaagttctggaaaagtttgaaataatgacataaaaagaagccttctttttctgagacagcttgtctggtaagtggcttctctgtgaattgcctgtaacacatagtggcttctccgcccttgtaaggtgttcagtagagctaaataaatgtaatagccaaacccactctgttggtagcaattggcagccctatttcagtttattttttcttctgttttcttcttttctttttttaaacagtaaaccttaacagatgcgttcagcagactggtttgcagtgaattttcatttctttccttatcacccccttgttgtaaaaagcccagcacttgaattgttattactttaaatgttctgtatttgtatctgtttttattagccaattagtgggattttatgccagttgttaaaatgagcattgatgtacccattttttaaaaaagcaaggcacagcctttgcccaaaactgtcatcctaacgtttgtcattccagtttgagttaatgtgctgagcatttttttaaaagaagctttgtaataaaacatttttaaaaattg

SEQ ID NO: 284903 - DNA, 3499 bp, Homo sapiens
  misc_feature (3498)..(3498): n is a, c, g, or t
gtccccgcgcttgccggcaaaaactttattcttggcaaacttctctttctcttcccctcctcctcggcccccatcttctgctcctcctccttctctagcagattaaatgagcctcgagaagaaaaaccgaagcgaaagggaagaaaataagaagatctaaaacggacatctccagcgtgggtggctcctttttctttttctttttttcccacccttcaggaagtggacgtttcgttatcttctgatccttgcaccttcttttggggcaaacggggcccttctgcccagatcccctctcttttctcggaaaacaaactactaagtcggcatccggggtaactacagtggagagggtttccgcggagacgcgccgccggaccctcctctgcactttggggaggcgtgctccctccagaaccggcgttctccgcgcgcaaatcccggcgacgcggggtcgcggggtggccgccggggcagcctcgtctagcgcgcgccgcgcagacgcccccggagtcgccagctaccgcagccctcgccgcccagtgcccttcggcctcgggggcgggcgcctgcgtcggtctccgcgaagcgggaaagcgcggcggccgccgggattcgggcgccgcggcagctgctccggctgccggccggcggccccgcgctcgcccgccccgcttccgcccgctgtcctgctgcacgaacccttccaactctcctttcctcccccacccttgagttacccctctgtctttcctgctgttgcgcgggtgctcccacagcggagcggagattacagagccgccgggatgccccaactctccggaggaggtggcggcggcgggggggacccggaactctgcgccacggacgagatgatccccttcaaggacgagggcgatcctcagaaggaaaagatcttcgccgagatcagtcatcccgaagaggaaggcgatttagctgacatcaagtcttccttggtgaacgagtctgaaatcatcccggccagcaacggacacgaggtggccagacaagcacaaacctctcaggagccctaccacgacaaggccagagaacaccccgatgacggaaagcatccagatggaggcctctacaacaagggaccctcctactcgagttattccgggtacataatgatgccaaatatgaataacgacccatacatgtcaaatggatctctttctccacccatcccgagaacatcaaataaagtgcccgtggtgcagccatcccatgcggtccatcctctcacccccctcatcacttacagtgacgagcacttttctccaggatcacacccgtcacacatcccatcagatgtcaactccaaacaaggcatgtccagacatcctccagctcctgatatccctactttttatcccttgtctccgggtggtgttggacagatcaccccacctcttggctggcaaggtcagcctgtatatcccatcacgggtggattcaggcaaccctacccatcctcactgtcagtcgacacttccatgtccaggttttcccatcatatgattcccggtcctcctggtccccacacaactggcatccctcatccagctattgtaacacctcaggtcaaacaggaacatccccacactgacagtgacctaatgcacgtgaagcctcagcatgaacagagaaaggagcaggagccaaaaagacctcacattaagaagcctctgaatgcttttatgttatacatgaaagaaatgagagcgaatgtcgttgctgagtgtactctaaaagaaagtgcagctatcaaccagattcttggcagaaggtggcatgccctctcccgtgaagagcaggctaaatattatgaattagcacggaaagaaagacagctacatatgcagctttatccaggctggtctgcaagagacaattatggtaagaaaaagaagaggaagagagagaaactacaggaatctgcatcaggtacaggtccaagaatgacagctgcctacatctgaaacatggtggaaaacgaagctcattcccaacgtgcaaagccaaggcagcgaccccaggacctcttctggagatggaagcttgttgaaaacccagactgtctccacggcctgcccagtcgaccccaaaggaacactgacatcaattttaccctgaggtcactgctagagacgctgatccataaagacaatcactgccaacccctctttcgtctactgcaagagccaagttccaaaataaagcataaaaaggttttttaaaaggaaatgtaaaagcacatgagaatgctagcaggctgtggggcagctgagcagcttttctccccccatatctgcgtgcacttcccagagcatcttgcatccaaacctgtaacctttcggcaaggacggtaacttggctgcatttgcctgtcatgcgcaactggagccagcaaccagcacatccatcagcaccccagtggaggagttcatggaagagttccctctttgtttctgcttcatttttctttcttttcttttctcctaaagcttttatttaacagtgcaaaaggatcgttttttttgcttttttaaacttgaatttttttaatttacactttttagttttaattttcttgtatatttggctagctatgagcttttaaataaaattgaaagttctggaaaagtttgaaataatgacataaaaagaagccttctttttctgagacagcttgtctggtaagtggcttctctgtgaattgcctgtaacacatagtggcttctccgcccttgtaaggtgttcagtagagctaaataaatgtaatagccaaacccactctgttggtagcaattggcagccctatttcagtttattttttcttctgttttcttcttttctttttttaaacagtaaaccttaacagatgcgttcagcagactggtttgcagtgaattttcatttctttccttatcacccccttgttgtaaaaagcccagcacttgaattgttattactttaaatgttctgtatttgtatctgtttttattagccaattagtgggattttatgccagttgttaaaatgagcattgatgtacccattttttaaaaaagcaaggcacagcctttgcccaaaactgtcatcctaacgtttgtcattccagtttgagttaatgtgctgagcatttttttaaaagaagctttgtaataaaacatttttaaaaattgccaaaaaaaaaaaaaaaaaaaaaaaaactttttggggggcttgggcccttggaaaggtttttaagacaccttccgttgggcgcgcggggccccgttggcttaggtgacctgggccaaaggtgtcccaagggagaccggggcagggactagggctgggtttcctcccctttaaaaagggccggggggaaccggagggtctggacatctccagtgggagcccgggggcccatggggtctctttcacggggtgtcccaggagccggatttaataccctccgggtggggng

SEQ ID NO: 284904 - DNA, 3171 bp, Homo sapiens
gtccccgcgcttgccggcaaaaactttattcttggcaaacttctctttctcttcccctcctcctcggcccccatcttctgctcctcctccttctctagcagattaaatgagcctcgagaagaaaaaccgaagcgaaagggaagaaaataagaagatctaaaacggacatctccagcgtgggtggctcctttttctttttctttttttcccacccttcaggaagtggacgtttcgttatcttctgatccttgcaccttcttttggggcaaacggggcccttctgcccagatcccctctcttttctcggaaaacaaactactaagtcggcatccggggtaactacagtggagagggtttccgcggagacgcgccgccggaccctcctctgcactttggggaggcgtgctccctccagaaccggcgttctccgcgcgcaaatcccggcgacgcggggtcgcggggtggccgccggggcagcctcgtctagcgcgcgccgcgcagacgcccccggagtcgccagctaccgcagccctcgccgcccagtgcccttcggcctcgggggcgggcgcctgcgtcggtctccgcgaagcgggaaagcgcggcggccgccgggattcgggcgccgcggcagctgctccggctgccggccggcggccccgcgctcgcccgccccgcttccgcccgctgtcctgctgcacgaacccttccaactctcctttcctcccccacccttgagttacccctctgtctttcctgctgttgcgcgggtgctcccacagcggagcggagattacagagccgccgggatgccccaactctccggaggaggtggcggcggcgggggggacccggaactctgcgccacggacgagatgatccccttcaaggacgagggcgatcctcagaaggaaaagatcttcgccgagatcagtcatcccgaagaggaaggcgatttagctgacatcaagtcttccttggtgaacgagtctgaaatcatcccggccagcaacggacacgaggtggccagacaagcacaaacctctcaggagccctaccacgacaaggccagagaacaccccgatgacggaaagcatccagatggaggcctctacaacaagggaccctcctactcgagttattccgggtacataatgatgccaaatatgaataacgacccatacatgtcaaatggatctctttctccacccatcccgagaacatcaaataaagtgcccgtggtgcagccatcccatgcggtccatcctctcacccccctcatcacttacagtgacgagcacttttctccaggatcacacccgtcacacatcccatcagatgtcaactccaaacaaggcatgtccagacatcctccagctcctgatatccctactttttatcccttgtctccgggtggtgttggacagatcaccccacctcttggctggcaaggtcagcctgtatatcccatcacgggtggattcaggcaaccctacccatcctcactgtcagtcgacacttccatgtccaggttttcccatcatatgattcccggtcctcctggtccccacacaactggcatccctcatccagctattgtaacacctcaggtcaaacaggaacatccccacactgacagtgacctaatgcacgtgaagcctcagcatgaacagagaaaggagcaggagccaaaaagacctcacattaagaagcctctgaatgcttttatgttatacatgaaagaaatgagagcgaatgtcgttgctgagtgtactctaaaagaaagtgcagctatcaaccagattcttggcagaaggtggcatgccctctcccgtgaagagcaggctaaatattatgaattagcacggaaagaaagacagctacatatgcagctttatccaggctggtctgcaagagacaattatggtaagaaaaagaagaggaagagagagaaactacaggaatctgcatcaggtggaaaacgaagctcattcccaacgtgcaaagccaaggcagcgaccccaggacctcttctggagatggaagcttgttgaaaacccagactgtctccacggcctgcccagtcgaccccaaaggaacactgacatcaattttaccctgaggtcactgctagagacgctgatccataaagacaatcactgccaacccctctttcgtctactgcaagagccaagttccaaaataaagcataaaaaggttttttaaaaggaaatgtaaaagcacatgagaatgctagcaggctgtggggcagctgagcagcttttctccccccatatctgcgtgcacttcccagagcatcttgcatccaaacctgtaacctttcggcaaggacggtaacttggctgcatttgcctgtcatgcgcaactggagccagcaaccagcacatccatcagcaccccagtggaggagttcatggaagagttccctctttgtttctgcttcatttttctttcttttcttttctcctaaagcttttatttaacagtgcaaaaggatcgttttttttgcttttttaaacttgaatttttttaatttacactttttagttttaattttcttgtatatttggctagctatgagcttttaaataaaattgaaagttctggaaaagtttgaaataatgacataaaaagaagccttctttttctgagacagcttgtctggtaagtggcttctctgtgaattgcctgtaacacatagtggcttctccgcccttgtaaggtgttcagtagagctaaataaatgtaatagccaaacccactctgttggtagcaattggcagccctatttcagtttattttttcttctgttttcttcttttctttttttaaacagtaaaccttaacagatgcgttcagcagactggtttgcagtgaattttcatttctttccttatcacccccttgttgtaaaaagcccagcacttgaattgttattactttaaatgttctgtatttgtatctgtttttattagccaattagtgggattttatgccagttgttaaaatgagcattgatgtacccattttttaaaaaagcaaggcacagcctttgcccaaaactgtcatcctaacgtttgtcattccagtttgagttaatgtgctgagcatttttttaaaagaagctttgtaataaaacatttttaaaaattg

SEQ ID NO: 284905 - DNA, 2225 bp, Homo sapiens
tgagatctgccttctctatcccaatggcagaggtggccagacaagcacaaacctctcaggagccctaccacgacaaggccagagaacaccccgatgacggaaagcatccagatggaggcctctacaacaagggaccctcctactcgagttattccgggtacataatgatgccaaatatgaataacgacccatacatgtcaaatggatctctttctccacccatcccgagaacatcaaataaagtgcccgtggtgcagccatcccatgcggtccatcctctcacccccctcatcacttacagtgacgagcacttttctccaggatcacacccgtcacacatcccatcagatgtcaactccaaacaaggcatgtccagacatcctccagctcctgatatccctactttttatcccttgtctccgggtggtgttggacagatcaccccacctcttggctggcaaggtcagcctgtatatcccatcacgggtggattcaggcaaccctacccatcctcactgtcagtcgacacttccatgtccaggttttcccatcatatgattcccggtcctcctggtccccacacaactggcatccctcatccagctattgtaacacctcaggtcaaacaggaacatccccacactgacagtgacctaatgcacgtgaagcctcagcatgaacagagaaaggagcaggagccaaaaagacctcacattaagaagcctctgaatgcttttatgttatacatgaaagaaatgagagcgaatgtcgttgctgagtgtactctaaaagaaagtgcagctatcaaccagattcttggcagaaggtggcatgccctctcccgtgaagagcaggctaaatattatgaattagcacggaaagaaagacagctacatatgcagctttatccaggctggtctgcaagagacaattatggtaagaaaaagaagaggaagagagagaaactacaggaatctgcatcaggtacaggtccaagaatgacagctgcctacatctgaaacatggtggaaaacgaagctcattcccaacgtgcaaagccaaggcagcgaccccaggacctcttctggagatggaagcttgttgaaaacccagactgtctccacggcctgcccagtcgaccccaaaggaacactgacatcaattttaccctgaggtcactgctagagacgctgatccataaagacaatcactgccaacccctctttcgtctactgcaagagccaagttccaaaataaagcataaaaaggttttttaaaaggaaatgtaaaagcacatgagaatgctagcaggctgtggggcagctgagcagcttttctccccccatatctgcgtgcacttcccagagcatcttgcatccaaacctgtaacctttcggcaaggacggtaacttggctgcatttgcctgtcatgcgcaactggagccagcaaccagcacatccatcagcaccccagtggaggagttcatggaagagttccctctttgtttctgcttcatttttctttcttttcttttctcctaaagcttttatttaacagtgcaaaaggatcgttttttttgcttttttaaacttgaatttttttaatttacactttttagttttaattttcttgtatatttggctagctatgagcttttaaataaaattgaaagttctggaaaagtttgaaataatgacataaaaagaagccttctttttctgagacagcttgtctggtaagtggcttctctgtgaattgcctgtaacacatagtggcttctccgcccttgtaaggtgttcagtagagctaaataaatgtaatagccaaacccactctgttggtagcaattggcagccctatttcagtttattttttcttctgttttcttcttttctttttttaaacagtaaaccttaacagatgcgttcagcagactggtttgcagtgaattttcatttctttccttatcacccccttgttgtaaaaagcccagcacttgaattgttattactttaaatgttctgtatttgtatctgtttttattagccaattagtgggattttatgccagttgttaaaatgagcattgatgtacccattttttaaaaaagcaaggcacagcctttgcccaaaactgtcatcctaacgtttgtcattccagtttgagttaatgtgctgagcatttttttaaaagaagctttgtaataaaacatttttaaaaattg

SEQ ID NO: 284906 - DNA, 3139 bp, Homo sapiens
gtccccgcgcttgccggcaaaaactttattcttggcaaacttctctttctcttcccctcctcctcggcccccatcttctgctcctcctccttctctagcagattaaatgagcctcgagaagaaaaaccgaagcgaaagggaagaaaataagaagatctaaaacggacatctccagcgtgggtggctcctttttctttttctttttttcccacccttcaggaagtggacgtttcgttatcttctgatccttgcaccttcttttggggcaaacggggcccttctgcccagatcccctctcttttctcggaaaacaaactactaagtcggcatccggggtaactacagtggagagggtttccgcggagacgcgccgccggaccctcctctgcactttggggaggcgtgctccctccagaaccggcgttctccgcgcgcaaatcccggcgacgcggggtcgcggggtggccgccggggcagcctcgtctagcgcgcgccgcgcagacgcccccggagtcgccagctaccgcagccctcgccgcccagtgcccttcggcctcgggggcgggcgcctgcgtcggtctccgcgaagcgggaaagcgcggcggccgccgggattcgggcgccgcggcagctgctccggctgccggccggcggccccgcgctcgcccgccccgcttccgcccgctgtcctgctgcacgaacccttccaactctcctttcctcccccacccttgagttacccctctgtctttcctgctgttgcgcgggtgctcccacagcggagcggagattacagagccgccgggatgccccaactctccggaggaggtggcggcggcgggggggacccggaactctgcgccacggacgagatgatccccttcaaggacgagggcgatcctcagaaggaaaagatcttcgccgagatcagtcatcccgaagaggaaggcgatttagctgacatcaagtcttccttggtgaacgagtctgaaatcatcccggccagcaacggacacgaggtggccagacaagcacaaacctctcaggagccctaccacgacaaggccagagaacaccccgatgacggaaagcatccagatggaggcctctacaacaagggaccctcctactcgagttattccgggtacataatgatgccaaatatgaataacgacccatacatgtcaaatggatctctttctccacccatcccgagaacatcaaataaagtgcccgtggtgcagccatcccatgcggtccatcctctcacccccctcatcacttacagtgacgagcacttttctccaggatcacacccgtcacacatcccatcagatgtcaactccaaacaaggcatgtccagacatcctccagctcctgatatccctactttttatcccttgtctccgggtggtgttggacagatcaccccacctcttggctggcaaggtcagcctgtatatcccatcacgggtggattcaggcaaccctacccatcctcactgtcagtcgacacttccatgtccaggttttcccatcatatgattcccggtcctcctggtccccacacaactggcatccctcatccagctattgtaacacctcaggtcaaacaggaacatccccacactgacagtgacctaatgcacgtgaagcctcagcatgaacagagaaaggagcaggagccaaaaagacctcacattaagaagcctctgaatgcttttatgttatacatgaaagaaatgagagcgaatgtcgttgctgagtgtactctaaaagaaagtgcagctatcaaccagattcttggcagaaggtggcatgccctctcccgtgaagagcaggctaaatattatgaattagcacggaaagaaagacagctacatatgcagctttatccaggctggtctgcaagagacaattatggtaagaaaaagaagaggaagagagagaaactacaggaatctgcatcaggtacaggtccaagaatgacagctgcctacatctgaaacatggtggaaaacgaagctcattcccaacgtgcaaagccaaggcagcgaccccaggacctcttctggagatggaagcttgttgaaaacccagaacgctgatccataaagacaatcactgccaacccctctttcgtctactgcaagagccaagttccaaaataaagcataaaaaggttttttaaaaggaaatgtaaaagcacatgagaatgctagcaggctgtggggcagctgagcagcttttctccccccatatctgcgtgcacttcccagagcatcttgcatccaaacctgtaacctttcggcaaggacggtaacttggctgcatttgcctgtcatgcgcaactggagccagcaaccagcacatccatcagcaccccagtggaggagttcatggaagagttccctctttgtttctgcttcatttttctttcttttcttttctcctaaagcttttatttaacagtgcaaaaggatcgttttttttgcttttttaaacttgaatttttttaatttacactttttagttttaattttcttgtatatttggctagctatgagcttttaaataaaattgaaagttctggaaaagtttgaaataatgacataaaaagaagccttctttttctgagacagcttgtctggtaagtggcttctctgtgaattgcctgtaacacatagtggcttctccgcccttgtaaggtgttcagtagagctaaataaatgtaatagccaaacccactctgttggtagcaattggcagccctatttcagtttattttttcttctgttttcttcttttctttttttaaacagtaaaccttaacagatgcgttcagcagactggtttgcagtgaattttcatttctttccttatcacccccttgttgtaaaaagcccagcacttgaattgttattactttaaatgttctgtatttgtatctgtttttattagccaattagtgggattttatgccagttgttaaaatgagcattgatgtacccattttttaaaaaagcaaggcacagcctttgcccaaaactgtcatcctaacgtttgtcattccagtttgagttaatgtgctgagcatttttttaaaagaagctttgtaataaaacatttttaaaaattg

SEQ ID NO: 284907 - DNA, 3104 bp, Homo sapiens
gtccccgcgcttgccggcaaaaactttattcttggcaaacttctctttctcttcccctcctcctcggcccccatcttctgctcctcctccttctctagcagattaaatgagcctcgagaagaaaaaccgaagcgaaagggaagaaaataagaagatctaaaacggacatctccagcgtgggtggctcctttttctttttctttttttcccacccttcaggaagtggacgtttcgttatcttctgatccttgcaccttcttttggggcaaacggggcccttctgcccagatcccctctcttttctcggaaaacaaactactaagtcggcatccggggtaactacagtggagagggtttccgcggagacgcgccgccggaccctcctctgcactttggggaggcgtgctccctccagaaccggcgttctccgcgcgcaaatcccggcgacgcggggtcgcggggtggccgccggggcagcctcgtctagcgcgcgccgcgcagacgcccccggagtcgccagctaccgcagccctcgccgcccagtgcccttcggcctcgggggcgggcgcctgcgtcggtctccgcgaagcgggaaagcgcggcggccgccgggattcgggcgccgcggcagctgctccggctgccggccggcggccccgcgctcgcccgccccgcttccgcccgctgtcctgctgcacgaacccttccaactctcctttcctcccccacccttgagttacccctctgtctttcctgctgttgcgcgggtgctcccacagcggagcggagattacagagccgccgggatgccccaactctccggaggaggtggcggcggcgggggggacccggaactctgcgccacggacgagatgatccccttcaaggacgagggcgatcctcagaaggaaaagatcttcgccgagatcagtcatcccgaagaggaaggcgatttagctgacatcaagtcttccttggtgaacgagtctgaaatcatcccggccagcaacggacacgaggtggccagacaagcacaaacctctcaggagccctaccacgacaaggccagagaacaccccgatgacggaaagcatccagatggaggcctctacaacaagggaccctcctactcgagttattccgggtacataatgatgccaaatatgaataacgacccatacatgtcaaatggatctctttctccacccatcccgagaacatcaaataaagtgcccgtggtgcagccatcccatgcggtccatcctctcacccccctcatcacttacagtgacgagcacttttctccaggatcacacccgtcacacatcccatcagatgtcaactccaaacaaggcatgtccagacatcctccagctcctgatatccctactttttatcccttgtctccgggtggtgttggacagatcaccccacctcttggctggcaaggtcagcctgtatatcccatcacgggtggattcaggcaaccctacccatcctcactgtcagtcgacacttccatgtccaggttttcccatcatatgattcccggtcctcctggtccccacacaactggcatccctcatccagctattgtaacacctcaggtcaaacaggaacatccccacactgacagtgacctaatgcacgtgaagcctcagcatgaacagagaaaggagcaggagccaaaaagacctcacattaagaagcctctgaatgcttttatgttatacatgaaagaaatgagagcgaatgtcgttgctgagtgtactctaaaagaaagtgcagctatcaaccagattcttggcagaaggggtaagaaaaagaagaggaagagagagaaactacaggaatctgcatcaggtacaggtccaagaatgacagctgcctacatctgaaacatggtggaaaacgaagctcattcccaacgtgcaaagccaaggcagcgaccccaggacctcttctggagatggaagcttgttgaaaacccagactgtctccacggcctgcccagtcgaccccaaaggaacactgacatcaattttaccctgaggtcactgctagagacgctgatccataaagacaatcactgccaacccctctttcgtctactgcaagagccaagttccaaaataaagcataaaaaggttttttaaaaggaaatgtaaaagcacatgagaatgctagcaggctgtggggcagctgagcagcttttctccccccatatctgcgtgcacttcccagagcatcttgcatccaaacctgtaacctttcggcaaggacggtaacttggctgcatttgcctgtcatgcgcaactggagccagcaaccagcacatccatcagcaccccagtggaggagttcatggaagagttccctctttgtttctgcttcatttttctttcttttcttttctcctaaagcttttatttaacagtgcaaaaggatcgttttttttgcttttttaaacttgaatttttttaatttacactttttagttttaattttcttgtatatttggctagctatgagcttttaaataaaattgaaagttctggaaaagtttgaaataatgacataaaaagaagccttctttttctgagacagcttgtctggtaagtggcttctctgtgaattgcctgtaacacatagtggcttctccgcccttgtaaggtgttcagtagagctaaataaatgtaatagccaaacccactctgttggtagcaattggcagccctatttcagtttattttttcttctgttttcttcttttctttttttaaacagtaaaccttaacagatgcgttcagcagactggtttgcagtgaattttcatttctttccttatcacccccttgttgtaaaaagcccagcacttgaattgttattactttaaatgttctgtatttgtatctgtttttattagccaattagtgggattttatgccagttgttaaaatgagcattgatgtacccattttttaaaaaagcaaggcacagcctttgcccaaaactgtcatcctaacgtttgtcattccagtttgagttaatgtgctgagcatttttttaaaagaagctttgtaataaaacatttttaaaaattg

SEQ ID NO: 284908 - DNA, 3055 bp, Homo sapiens
gtccccgcgcttgccggcaaaaactttattcttggcaaacttctctttctcttcccctcctcctcggcccccatcttctgctcctcctccttctctagcagattaaatgagcctcgagaagaaaaaccgaagcgaaagggaagaaaataagaagatctaaaacggacatctccagcgtgggtggctcctttttctttttctttttttcccacccttcaggaagtggacgtttcgttatcttctgatccttgcaccttcttttggggcaaacggggcccttctgcccagatcccctctcttttctcggaaaacaaactactaagtcggcatccggggtaactacagtggagagggtttccgcggagacgcgccgccggaccctcctctgcactttggggaggcgtgctccctccagaaccggcgttctccgcgcgcaaatcccggcgacgcggggtcgcggggtggccgccggggcagcctcgtctagcgcgcgccgcgcagacgcccccggagtcgccagctaccgcagccctcgccgcccagtgcccttcggcctcgggggcgggcgcctgcgtcggtctccgcgaagcgggaaagcgcggcggccgccgggattcgggcgccgcggcagctgctccggctgccggccggcggccccgcgctcgcccgccccgcttccgcccgctgtcctgctgcacgaacccttccaactctcctttcctcccccacccttgagttacccctctgtctttcctgctgttgcgcgggtgctcccacagcggagcggagattacagagccgccgggatgccccaactctccggaggaggtggcggcggcgggggggacccggaactctgcgccacggacgagatgatccccttcaaggacgagggcgatcctcagaaggaaaagatcttcgccgagatcagtcatcccgaagaggaaggcgatttagctgacatcaagtcttccttggtgaacgagtctgaaatcatcccggccagcaacggacacgaggtggccagacaagcacaaacctctcaggagccctaccacgacaaggccagagaacaccccgatgacggaaagcatccagatggaggcctctacaacaagggaccctcctactcgagttattccgggtacataatgatgccaaatatgaataacgacccatacatgtcaaatggatctctttctccacccatcccgagaacatcaaataaagtgcccgtggtgcagccatcccatgcggtccatcctctcacccccctcatcacttacagtgacgagcacttttctccaggatcacacccgtcacacatcccatcagatgtcaactccaaacaaggcatgtccagacatcctccagctcctgatatccctactttttatcccttgtctccgggtggtgttggacagatcaccccacctcttggctggttttcccatcatatgattcccggtcctcctggtccccacacaactggcatccctcatccagctattgtaacacctcaggtcaaacaggaacatccccacactgacagtgacctaatgcacgtgaagcctcagcatgaacagagaaaggagcaggagccaaaaagacctcacattaagaagcctctgaatgcttttatgttatacatgaaagaaatgagagcgaatgtcgttgctgagtgtactctaaaagaaagtgcagctatcaaccagattcttggcagaaggtggcatgccctctcccgtgaagagcaggctaaatattatgaattagcacggaaagaaagacagctacatatgcagctttatccaggctggtctgcaagagacaattatggtaagaaaaagaagaggaagagagagaaactacaggaatctgcatcaggtacaggtccaagaatgacagctgcctacatctgaaacatggtggaaaacgaagctcattcccaacgtgcaaagccaaggcagcgaccccaggacctcttctggagatggaagcttgttgaaaacccagaacgctgatccataaagacaatcactgccaacccctctttcgtctactgcaagagccaagttccaaaataaagcataaaaaggttttttaaaaggaaatgtaaaagcacatgagaatgctagcaggctgtggggcagctgagcagcttttctccccccatatctgcgtgcacttcccagagcatcttgcatccaaacctgtaacctttcggcaaggacggtaacttggctgcatttgcctgtcatgcgcaactggagccagcaaccagcacatccatcagcaccccagtggaggagttcatggaagagttccctctttgtttctgcttcatttttctttcttttcttttctcctaaagcttttatttaacagtgcaaaaggatcgttttttttgcttttttaaacttgaatttttttaatttacactttttagttttaattttcttgtatatttggctagctatgagcttttaaataaaattgaaagttctggaaaagtttgaaataatgacataaaaagaagccttctttttctgagacagcttgtctggtaagtggcttctctgtgaattgcctgtaacacatagtggcttctccgcccttgtaaggtgttcagtagagctaaataaatgtaatagccaaacccactctgttggtagcaattggcagccctatttcagtttattttttcttctgttttcttcttttctttttttaaacagtaaaccttaacagatgcgttcagcagactggtttgcagtgaattttcatttctttccttatcacccccttgttgtaaaaagcccagcacttgaattgttattactttaaatgttctgtatttgtatctgtttttattagccaattagtgggattttatgccagttgttaaaatgagcattgatgtacccattttttaaaaaagcaaggcacagcctttgcccaaaactgtcatcctaacgtttgtcattccagtttgagttaatgtgctgagcatttttttaaaagaagctttgtaataaaacatttttaaaaattg

SEQ ID NO: 284909 - DNA, 1675 bp, Homo sapiens
gatgatgtttccttttgtatccagtttggtttttctccctatgaaggtctgtaatactagggcagccatgaatgggaaagaatctcatagcctgcaatgggaaggaagcaaaatgggaagctccacacctgagagttgggggagagcaggagcagggaggctcccagctgacagattgtgtgtgcacacagatggttctccctggaaagttctgctggcagatcctggcattggggaagttgggaaaatacatgaacactgtctgctggggactgggtggcatgccctctcccgtgaagagcaggctaaatattatgaattagcacggaaagaaagacagctacatatgcagctttatccaggctggtctgcaagagacaattatggtaagaaaaagaagaggaagagagagaaactacaggaatctgcatcaggtacaggtccaagaatgacagctgcctacatctgaaacatggtggaaaacgaagctcattcccaacgtgcaaagccaaggcagcgaccccaggacctcttctggagatggaagcttgttgaaaacccagactgtctccacggcctgcccagtcgaccccaaaggaacactgacatcaattttaccctgaggtcactgctagagacgctgatccataaagacaatcactgccaacccctctttcgtctactgcaagagccaagttccaaaataaagcataaaaaggttttttaaaaggaaatgtaaaagcacatgagaatgctagcaggctgtggggcagctgagcagcttttctccccccatatctgcgtgcacttcccagagcatcttgcatccaaacctgtaacctttcggcaaggacggtaacttggctgcatttgcctgtcatgcgcaactggagccagcaaccagcacatccatcagcaccccagtggaggagttcatggaagagttccctctttgtttctgcttcatttttctttcttttcttttctcctaaagcttttatttaacagtgcaaaaggatcgttttttttgcttttttaaacttgaatttttttaatttacactttttagttttaattttcttgtatatttggctagctatgagcttttaaataaaattgaaagttctggaaaagtttgaaataatgacataaaaagaagccttctttttctgagacagcttgtctggtaagtggcttctctgtgaattgcctgtaacacatagtggcttctccgcccttgtaaggtgttcagtagagctaaataaatgtaatagccaaacccactctgttggtagcaattggcagccctatttcagtttattttttcttctgttttcttcttttctttttttaaacagtaaaccttaacagatgcgttcagcagactggtttgcagtgaattttcatttctttccttatcacccccttgttgtaaaaagcccagcacttgaattgttattactttaaatgttctgtatttgtatctgtttttattagccaattagtgggattttatgccagttgttaaaatgagcattgatgtacccattttttaaaaaagcaaggcacagcctttgcccaaaactgtcatcctaacgtttgtcattccagtttgagttaatgtgctgagcatttttttaaaagaagctttgtaataaaacatttttaaaaattg

SEQ ID NO: 284910 - DNA, 1655 bp, Homo sapiens
gaagtttttctctctcatcaacctctctcactctctcactctatccttcctccaacccacccatacccttcttatttaaaaatcattttaaaaaacatgaacagggagatcaaaattaatatgcagggcagccatgaatgggaaagaatctcatagcctgcaatgggaaggaagcaaaatgggaagctccacacctgagagttgggggagagcaggagcagggaggctcccagctgacagattgtgtgtgcacacagtggcatgccctctcccgtgaagagcaggctaaatattatgaattagcacggaaagaaagacagctacatatgcagctttatccaggctggtctgcaagagacaattatggtaagaaaaagaagaggaagagagagaaactacaggaatctgcatcaggtacaggtccaagaatgacagctgcctacatctgaaacatggtggaaaacgaagctcattcccaacgtgcaaagccaaggcagcgaccccaggacctcttctggagatggaagcttgttgaaaacccagactgtctccacggcctgcccagtcgaccccaaaggaacactgacatcaattttaccctgaggtcactgctagagacgctgatccataaagacaatcactgccaacccctctttcgtctactgcaagagccaagttccaaaataaagcataaaaaggttttttaaaaggaaatgtaaaagcacatgagaatgctagcaggctgtggggcagctgagcagcttttctccccccatatctgcgtgcacttcccagagcatcttgcatccaaacctgtaacctttcggcaaggacggtaacttggctgcatttgcctgtcatgcgcaactggagccagcaaccagcacatccatcagcaccccagtggaggagttcatggaagagttccctctttgtttctgcttcatttttctttcttttcttttctcctaaagcttttatttaacagtgcaaaaggatcgttttttttgcttttttaaacttgaatttttttaatttacactttttagttttaattttcttgtatatttggctagctatgagcttttaaataaaattgaaagttctggaaaagtttgaaataatgacataaaaagaagccttctttttctgagacagcttgtctggtaagtggcttctctgtgaattgcctgtaacacatagtggcttctccgcccttgtaaggtgttcagtagagctaaataaatgtaatagccaaacccactctgttggtagcaattggcagccctatttcagtttattttttcttctgttttcttcttttctttttttaaacagtaaaccttaacagatgcgttcagcagactggtttgcagtgaattttcatttctttccttatcacccccttgttgtaaaaagcccagcacttgaattgttattactttaaatgttctgtatttgtatctgtttttattagccaattagtgggattttatgccagttgttaaaatgagcattgatgtacccattttttaaaaaagcaaggcacagcctttgcccaaaactgtcatcctaacgtttgtcattccagtttgagttaatgtgctgagcatttttttaaaagaagctttgtaataaaacatttttaaaaattg

SEQ ID NO: 284911 - DNA, 1513 bp, Homo sapiens
gtccccgcgcttgccggcaaaaactttattcttggcaaacttctctttctcttcccctcctcctcggcccccatcttctgctcctcctccttctctagcagattaaatgagcctcgagaagaaaaaccgaagcgaaagggaagaaaataagaagatctaaaacggacatctccagcgtgggtggctcctttttctttttctttttttcccacccttcaggaagtggacgtttcgttatcttctgatccttgcaccttcttttggggcaaacggggcccttctgcccagatcccctctcttttctcggaaaacaaactactaagtcggcatccggggtaactacagtggagagggtttccgcggagacgcgccgccggaccctcctctgcactttggggaggcgtgctccctccagaaccggcgttctccgcgcgcaaatcccggcgacgcggggtcgcggggtggccgccggggcagcctcgtctagcgcgcgccgcgcagacgcccccggagtcgccagctaccgcagccctcgccgcccagtgcccttcggcctcgggggcgggcgcctgcgtcggtctccgcgaagcgggaaagcgcggcggccgccgggattcgggcgccgcggcagctgctccggctgccggccggcggccccgcgctcgcccgccccgcttccgcccgctgtcctgctgcacgaacccttccaactctcctttcctcccccacccttgagttacccctctgtctttcctgctgttgcgcgggtgctcccacagcggagcggagattacagagccgccgggatgccccaactctccggaggaggtggcggcggcgggggggacccggaactctgcgccacggacgagatgatccccttcaaggacgagggcgatcctcagaaggaaaagatcttcgccgagatcagtcatcccgaagaggaaggcgatttagctgacatcaagtcttccttggtgaacgagtctgaaatcatcccggccagcaacggacacgaggtggccagacaagcacaaacctctcaggagccctaccacgacaaggccagagaacaccccgatgacggaaagcatccagatggaggcctctacaacaagggaccctcctactcgagttattccgggtacataatgatgccaaatatgaataacgacccatacatgtcaaatggatctctttctccacccatcccgagaacatttcccatttttagagtcaattcactcaaaagatcaggatgccagtatgcaggcagcctcacctccacctccccagtaagcctccctaagagggctcactttacctctttggaaaattcccagccttccaaatctacacccgcttctctctcctttagaggacaagactaaggaggagaaaaagaaactgggagaggagaggggacgagaaactgaagaattccacgacagcctcaccgtttatgggtttcactggtgtcttggtaactgcgggacatctggctgcttgcgaa

SEQ ID NO: 284912 - DNA, 480 bp, Homo sapiens
agagagacaaagtgtctacccacggtgtcaatattgatgatgttaaatatgaagctatagagacaaaggtcaccaggtcactattttctcccgttctcttgctttctgactttgtttctagatagagatggtgaagagggagagagaatgagtcatctttacctctttgttgaccacctgcctgtacttccacatcacattcatctgtgtgttcatggtacaatctgtgacatgacagtatacctctcttcttccagggtaagaaaaagaagaggaagagagagaaactacaggaatctgcatcaggtaggcaccatgagactttccagtcaatcctcaggcttctgacaaacaccttttaaggcagtttgcatctctctacacactgctttcttctgtgactgtaactcatgatgctttaactctgctttttcttcctgaaattcttttaaaaatttaaaagacccttcttttaaatgt

SEQ ID NO: 284913 - DNA, 440 bp, Homo sapiens
aaggtctaaagatttattagcttctcaaagtgctccttaaccccctgcaaaagttaagaacctctattctgaaagaggaatgatcacctgtgctgtgtgttcagcttcttctgaggggaccagagaagtcctcagcctcagagcccatctggagcatcttcacaatgccaagtccatttctacttggtgttcatagttctataatgacaggtccactttctcaaaccaaagggttttattctcagtcactgagtagataggaagccctattggatgggttgtttgcctctcagtgttttgtcaaatgagtcaataactgctcttccaagttggtggtggtctggggtgagagggttgtcgccatcctgagtgtagccatgtgagcaggtgctctgcttttctcctcccccatcccttcctcattccttcaaccccttccc

SEQ ID NO: 284914 - DNA, 2156 bp, Homo sapiens
gtccccgcgcttgccggcaaaaactttattcttggcaaacttctctttctcttcccctcctcctcggcccccatcttctgctcctcctccttctctagcagattaaatgagcctcgagaagaaaaaccgaagcgaaagggaagaaaataagaagatctaaaacggacatctccagcgtgggtggctcctttttctttttctttttttcccacccttcaggaagtggacgtttcgttatcttctgatccttgcaccttcttttggggcaaacggggcccttctgcccagatcccctctcttttctcggaaaacaaactactaagtcggcatccggggtaactacagtggagagggtttccgcggagacgcgccgccggaccctcctctgcactttggggaggcgtgctccctccagaaccggcgttctccgcgcgcaaatcccggcgacgcggggtcgcggggtggccgccggggcagcctcgtctagcgcgcgccgcgcagacgcccccggagtcgccagctaccgcagccctcgccgcccagtgcccttcggcctcgggggcgggcgcctgcgtcggtctccgcgaagcgggaaagcgcggcggccgccgggattcgggcgccgcggcagctgctccggctgccggccggcggccccgcgctcgcccgccccgcttccgcccgctgtcctgctgcacgaacccttccaactctcctttcctcccccacccttgagttacccctctgtctttcctgctgttgcgcgggtgctcccacagcggagcggagattacagagccgccgggatgccccaactctccggaggaggtggcggcggcgggggggacccggaactctgcgccacggacgagatgatccccttcaaggacgagggcgatcctcagaaggaaaagatcttcgccgagatcagtcatcccgaagaggaaggcgatttagctgacatcaagtcttccttggtgaacgagtctgaaatcatcccggccagcaacggacacgaggtggccagacaagcacaaacctctcaggagccctaccacgacaaggccagagaacaccccgatgacggaaagcatccagatggaggcctctacaacaagggaccctcctactcgagttattccgggtacataatgatgccaaatatgaataacgacccatacatgtcaaatggatctctttctccacccatcccgagaacatcaaataaagtgcccgtggtgcagccatcccatgcggtccatcctctcacccccctcatcacttacagtgacgagcacttttctccaggatcacacccgtcacacatcccatcagatgtcaactccaaacaaggcatgtccagacatcctccagctcctgatatccctactttttatcccttgtctccgggtggtgttggacagatcaccccacctcttggctggcaaggtcagcctgtatatcccatcacgggtggattcaggcaaccctacccatcctcactgtcagtcgacacttccatgtccaggttttcccatcatatgattcccggtcctcctggtccccacacaactggcatccctcatccagctattgtaacacctcaggtcaaacaggaacatccccacactgacagtgacctaatgcacgtgaagcctcagcatgaacagagaaaggagcaggagccaaaaagacctcacattaagaagcctctgaatgcttttatgttatacatgaaagaaatgagagcgaatgtcgttgctgagtgtactctaaaagaaagtgcagctatcaaccagattcttggcagaaggtggcatgccctctcccgtgaagagcaggctaaatattatgaattagcacggaaagaaagacagctacatatgcagctttatccaggctggtctgcaagagacaattatgtaagcccctcctccataccagtggctctccactctcactcattcgctcttttgcgttcaagaaggaaatgtgttttaggtgtatataatgctggtactacttattttttggaagttaatgaactttgtaataaggatttcatggatatattgcattatgaaagcttcgagctatctttttttttttgctatgggtgctaatgaatgcttttaaataaaatttttgaaataaac

SEQ ID NO: 284915 - DNA, 1408 bp, Homo sapiens
gtccccgcgcttgccggcaaaaactttattcttggcaaacttctctttctcttcccctcctcctcggcccccatcttctgctcctcctccttctctagcagattaaatgagcctcgagaagaaaaaccgaagcgaaagggaagaaaataagaagatctaaaacggacatctccagcgtgggtggctcctttttctttttctttttttcccacccttcaggaagtggacgtttcgttatcttctgatccttgcaccttcttttggggcaaacggggcccttctgcccagatcccctctcttttctcggaaaacaaactactaagtcggcatccggggtaactacagtggagagggtttccgcggagacgcgccgccggaccctcctctgcactttggggaggcgtgctccctccagaaccggcgttctccgcgcgcaaatcccggcgacgcggggtcgcggggtggccgccggggcagcctcgtctagcgcgcgccgcgcagacgcccccggagtcgccagctaccgcagccctcgccgcccagtgcccttcggcctcgggggcgggcgcctgcgtcggtctccgcgaagcgggaaagcgcggcggccgccgggattcgggcgccgcggcagctgctccggctgccggccggcggccccgcgctcgcccgccccgcttccgcccgctgtcctgctgcacgaacccttccaactctcctttcctcccccacccttgagttacccctctgtctttcctgctgttgcgcgggtgctcccacagcggagcggagattacagagccgccgggatgccccaactctccggaggaggtggcggcggcgggggggacccggaactctgcgccacggacgagatgatccccttcaaggacgagggcgatcctcagaaggaaaagatcttcgccgagatcagtcatcccgaagaggaaggcgatttagctgacatcaagtcttccttggtgaacgagtctgaaatcatcccggccagcaacggacacgaggtggccagacaagcacaaacctctcaggagccctaccacgacaaggccagagaacaccccgatgacggaaagcatccagatggaggcctctacaacaagggaccctcctactcgagttattccgggtacataatgatgccaaatatgaataacgacccatacatgtcaaatggatctctttctccacccatcccgagaacagaatttttctgcctcttttggtggcattaggttttgattcacttgtcaagacgtgatcctgtcatactgatttgtgtctctgtatctggagccagaattgaaaaccacctttgactttcctgttcttcctcttctgttaatggaatcatgcatttacaacttcccaaataaacctgtgattcttacaa

SEQ ID NO: 284916 - DNA, 876 bp, Homo sapiens
gaggacggcgctcgctagttctcccaggtcgcggtacacggtgacgaacgggcggggaggatcgtcggctgctgatacgggctgatcgcatggtgctttgagattcgcagtcgatatcccgtctccacgcaactctgtgtcgagcatgttcacgcatgggtgccaggattcaacctcatcttccctaattcaatgacactcacctgcccacacgaggacgcaccaggccatgggacttgatgaagacacagtcgccaaccttcagccacatgtcattgtaatggagctgctcaaagtagtggcaacctggttcaccattggacatttccacagggacatcttctttttcctgttgtaaagaaaactggctgaagaaaggtagttgataatcaaggaatagagaaggttgtgaaatcaagattatcttggctttgcaaaacaaactggaaatttcttgttctccctgctctgaaacagcttcaacagtataataatcataggtcccttaaagaaaaagtcacctatggaactgtctgacctcagtactctttggggtcagttctatgatactttaaaaaatttcttcatgttgttgtacattctgtattatatctcttcttgattccattttggtaatttgtaatatcctagacaattagccattttatttaggttttcaaatttattagcagaaatatacagtctttacatttcttccacatttatttatttatttattttttgagacagagtttcgctcttgttgcccaggctggactgcaatagcacgatctcggctcactgcaacctctgcctcctgggttcaagcgattctcctgcctcagcctcccgttgggattacaggcacccaccacc

SEQ ID NO: 284917 - DNA, 510 bp, Homo sapiens
aataagactgagttgcagttttttgtttttatttttcaggttgtgaaatcaagattatcttggctttgcaaaacaaactggaaatttcttgttctccctgctctgaaacagcttcaacagtataataatcataggtcccttaaagaaaaagtcacctatggaactgtctgacctcagtactctttggggtcagttctatgatactttaaaaaatttcttcatgttgttgtacattctgtattatatctcttcttgattccattttggtaatttgtaatatcctagacaattagccattttatttaggttttcaaatttattagcagaaatatacagtctttacatttcttccacatttatttatttatttattttttgagacagagtttcgctcttgttgcccaggctggactgcaatagcacgatctcggctcactgcaacctctgcctcctgggttcaagcgattctcctgcctcagcctcccgttgggattacaggcacccaccacc

SEQ ID NO: 284918 - DNA, 446 bp, Homo sapiens
catggcctaagaggagaagggctacttaaaggagggctagacaggcaaaggcccaaaacagattcggagtaagatcaacgtctataaacgcttttacccagcagagtggcaagacttcctcgattctttgcagaagaggaagatggaggtggagtgactggtttacatcacagctgccccaggctgaggcgtcccccggaccagtgaagctggagccagggtgtaaggcaaggaggtgctgtgtggctccagaggagctggccaggtcccatggaatcagaaggttacacacacacgtgcacactccccgctctggggaaggaactgttctcagaggctccaatttatattcatctgggggttcacggaaaagccagaacctgctgttttcagggtgggtgatgtaaatatagtgtgtacataataaagcaaatatattttacttc

SEQ ID NO: 284919 - DNA, 633 bp, Homo sapiens
  misc_feature (340)..(340): n is a, c, g, or t
  misc_feature (399)..(399): n is a, c, g, or t
  misc_feature (578)..(578): n is a, c, g, or t
ccttacggctaggtacgaggctgggtgttgacgaggtctgagagacagaggcagcgtgtttgagctgctggtgcggtggtcagcgcgatgcccaaggccaagggcaaaacccggaggcagaagtttggttacagtgtcaaccgaaagcgtctgaaccggaatgctcgacggaaggcagcgccgcgggatcgaatgctcccacatccgacatgcctgggaccacgctaaatcggtacggcagaacctggccgagatggggttggctgtggaccccaacagggcggtgcccctccgtaagagaaagcggtcaaggcagcaacaggggtcgcaagggcccaantggcagggtttgggaaccattaaggcacggcacgacaggccccttaaactatgcagccntttgggtaaacgggggaaaagggcccccctaaatggttgggccttgagagaagatgagaaccccctttggggccaaggggccccaaggccacaaggccccccaaggcccccttttttccccaagggaaaacacacaccaggcgaacaaccaaggcggacaacaacccaaattataaccnttcccccttgggttttccccttcccggcgggcggaaaaacccccccttttcccga

SEQ ID NO: 284920 - DNA, 1378 bp, Homo sapiens
  misc_feature (1284)..(1284): n is a, c, g, or t
  misc_feature (1287)..(1287): n is a, c, g, or t
gcggccgccgtggccaggcaacctatgggtaccaccgggttctcgcgggtcttgcgaacgaacttttccttgaaactctctggattcctgtaaacagtggggctcagcccctcaatgactggaggcttcgatggttcaaaggggacctccggaatcacagggccgggagtcgccatgtccgggccacagcagcaggagaaaatcgggactccgacctcagcctcccggtgaaggtcatgaaaggggcggggaaacgaataaattgagccttgtacgcaggcgcaaatgctcgttgcatcctgggagtcgtagtgctcagcacggtagtgctacaaaaggactacatttccccaaatgcccgcaaagccttgtgcacgccttccggaaggagtttgttacacgaggtctgagagacagaggcagcgtgtttgagctgctggtgcggtggtcagcgcgatgcccaaggccaagggcaaaacccggaggcagaagtttggttacagtgtcaaccgaaagcgtctgaaccggaatgctcgacggaaggcagcgccgcgggatcgaatgctcccacatccgacatgcctgggaccacgctaaatcggtacggcagaacctggccgagatggggttggctgtggaccccaacagggcggtgcccctccgtaagagaaaggtgaaggccatggaggtggacatagaggagaggcctaaagagcttgtacggaagccctatgtgctgaatgacctggaggcagaagccagccttccagaaaagaaaggaaatactctgtctcgggacctcattgactatgtacgctacatggtagagaaccacggggaggactataaggccatggcccgtgatgagaagaattactatcaagataccccaaaacagattcggagtaagatcaacgtctataaacgcttttacccagcagagtggcaagacttcctcgattctttgcagaagaggaagatggaggtggagtgactggtttacatcacagctgccccaggctgaggcgtcccccggaccagtgaagctggagccagggtgtaaggcaaggaggtgctgtgtggctccagaggagctggccaggtcccatggaatcagaaggttacacacacacgtgcacactccccgctctggggaaggaactgttctcagaggctccaatttatattcatctgggggttcacggaaaagccagaacctgctgttttcagggtgggtgatgtaaatatagtgtgtacataataaagcaaatatattttacttcnaanaaaaaaaaaccgggcttatgcgggcggaaaaggtataaggccggcctagtccgccccttgtcagggaacggccagggtatcaacgagaggc

SEQ ID NO: 284921 - DNA, 624 bp, Homo sapiens
ggaagacggttgtgggcggtgccatgttcttcatcggtttcaccgcgctcgttatcatgtggcagaagccctatgtgctgaatgacctggaggcagaagccagccttccagaaaagaaaggaaatactctgtctcgggacctcattgactatgtacgctacatggtagagaaccacggggaggactataaggccatggcccgtgatgagaagaattactatcaagataccccaaaacagattcggagtaagatcaacgtctataaacgcttttacccagcagagtggcaagacttcctcgattctttgcagaagaggaagatggaggtggagtgactggtttacatcacagctgccccaggctgaggcgtcccccggaccagtgaagctggagccagggtgtaaggcaaggaggtgctgtgtggctccagaggagctggccaggtcccatggaatcagaaggttacacacacacgtgcacactccccgctctggggaaggaactgttctcagaggctccaatttatattcatctgggggttcacggaaaagccagaacctgctgttttcagggtgggtgatgtaaatatagtgtgtacataataaagcaaatatattttacttc

SEQ ID NO: 284922 - DNA, 2126 bp, Homo sapiens
gcggccgccgtggccaggcaacctatgggtaccaccgggttctcgcgggtcttgcgaacgaacttttccttgaaactctctggattcctgtaaacagtggggctcagcccctcaatgactggaggcttcgatggttcaaaggggacctccggaatcacagggccgggagtcgccatgtccgggccacagcagcaggagaaaatcgggactccgacctcagcctcccggtgaaggtcatgaaaggggcggggaaacgaataaattgagccttgtacgcaggcgcaaatgctcgttgcatcctgggagtcgtagtgctcagcacggtagtgctacaaaaggactacatttccccaaatgcccgcaaagccttgtgcacgccttccggaaggagtttgttacacgaggtctgagagacagaggcagcgtgtttgagctgctggtgcggtggtcagcgcgatgcccaaggccaagggcaaaacccggaggcagaagtttggttacagtgtcaaccgaaagcgtctgaaccggaatgctcgacggaaggcagcgccgcgggatcgaatgctcccacatccgacatgcctgggaccacgctaaatcggtacggcagaacctggccgagatggggttggctgtggaccccaacagggcggtgcccctccgtaagagaaaggtgaaggccatggaggtggacatagaggagaggcctaaagagcttgtacggaagccctatgtgctgaatgacctggaggcagaagccagccttccagaaaagaaaggaaatactctgtctcgggacctcattgactatgtacgctacatggtagagaaccacggggaggactataaggtgagcggctcaggccccgtgggctggctgggaaggcgccctggaccattcgcggcttgatctgcttgcgcagcacctgtttcctgaaaccgagtgcaaagaaagggaggcaaaagagactctaggaaatggatcccattgacagggatctaacttgaatgaatgcttatggcaaggatagactgagtgaccttggttccagtctcactcacagataatgtcttgctcgcatggtgttttttggtttgttttgttttcaagacagagtctgctcagtcacccaggatggaagtctatttttggcttcctttaacagttgaaagatccggctacactggacccctgggcccaagtaggattagctggctatgatgggtcatgagctcctcagctggccccagctcctccctggcccgctggactctcaggccttcctggtcttttttttgagacagaatctcgctctgtcacccagggtggagttcagtggtgtgatcatggctcaccgcagcctcatcctcccgggctgaaacagtcctcctgcctcggcctcccaagtagctgggaccacaggatggttaatttattgtttttggagagacagggtctcactgggttgcccagggtggcctggaactcctgggctcaagagatcctcccacctcggcctcccagagtgttgggattacaggcatgagccactgtgcccggtgcaccacagcctttgaggtcaggattctggacctcagggatagatagcaagtggcttgcctaattcaggatgagttcagatttgagcctttgcctgtctagccctccttaaagtagcccttctcctcttaggccatggcccgtgatgagaagaattactatcaagataccccaaaacagattcggagtaagatcaacgtctataaacgcttttacccagcagagtggcaagacttcctcgattctttgcagaagaggaagatggaggtggagtgactggtttacatcacagctgccccaggctgaggcgtcccccggaccagtgaagctggagccagggtgtaaggcaaggaggtgctgtgtggctccagaggagctggccaggtcccatggaatcagaaggttacacacacacgtgcacactccccgctctggggaaggaactgttctcagaggctccaatttatattcatctgggggttcacggaaaagccagaacctgctgttttcagggtgggtgatgtaaatatagtgtgtacataataaagcaaatatattttacttc

SEQ ID NO: 284923 - DNA, 1196 bp, Homo sapiens
gcggccgccgtggccaggcaacctatgggtaccaccgggttctcgcgggtcttgcgaacgaacttttccttgaaactctctggattcctgtaaacagtggggctcagcccctcaatgactggaggcttcgatggttcaaaggggacctccggaatcacagggccgggagtcgccatgtccgggccacagcagcaggagaaaatcgggactccgacctcagcctcccggtgaaggtcatgaaaggggcggggaaacgaataaattgagccttgtacgcaggcgcaaatgctcgttgcatcctgggagtcgtagtgctcagcacggtagtgctacaaaaggactacatttccccaaatgcccgcaaagccttgtgcacgccttccggaaggagtttgttacacgaggtctgagagacagaggcagcgtgtttgagctgctggtgcggtggtcagcgcgatgcccaaggccaagggcaaaacccggaggcagaagtttggttacagtgtcaaccgaaagcgtctgaaccggaatgctcgacggaaggcagcgccgcgggatcgaatgctcccacatccgacatgcctgggaccacgctaaatcggtacggcagaacctggccgagatggggttggctgtggaccccaacagggcggtgcccctccgtaagagaaaggtgaaggccatggaggtggacatagaggagaggcctaaagagcttgtacggaagccctatgtgctgaatgacctggaggcagaagccagccttccagaaaagaaaggaaatactctgtctcgggacctcattgactatgtacgctacatggtagagaaccacggggaggactataaggccatggcccgtgatgagaagaattactatcaagataccccaaaacagattcggagtaagatcaacgtctataaacgcttttacccagcagagtggcaagacttcctcgattctttgcagaagaggaagatggaggtgctgtgtggctccagaggagctggccaggtcccatggaatcagaaggttacacacacacgtgcacactccccgctctggggaaggaactgttctcagaggctccaatttatattcatctgggggttcacggaaaagccagaacctgctgttttcagggtgggtgatgtaaatatagtgtgtacataataaagcaaatatattttacttc

SEQ ID NO: 284924 - DNA, 1318 bp, Homo sapiens
gcggccgccgtggccaggcaacctatgggtaccaccgggttctcgcgggtcttgcgaacgaacttttccttgaaactctctggattcctgtaaacagtggggctcagcccctcaatgactggaggcttcgatggttcaaaggggacctccggaatcacagggccgggagtcgccatgtccgggccacagcagcaggagaaaatcgggactccgacctcagcctcccggtgaaggtcatgaaaggggcggggaaacgaataaattgagccttgtacgcaggcgcaaatgctcgttgcatcctgggagtcgtagtgctcagcacggtagtgctacaaaaggactacatttccccaaatgcccgcaaagccttgtgcacgccttccggaaggagtttgttacacgaggtctgagagacagaggcagcgtgtttgagctgctggtgcggtggtcagcgcgatgcccaaggccaagggcaaaacccggaggcagaagtttggttacagtgtcaaccgaaagcgtctgaaccggaatgctcgacggaaggcagcgccgcgggatcgaatgctcccacatccgacatgcctgggaccacgctaaatcggtacggcagaacctggccgagatggggttggctgtggaccccaacagggcggtgcccctccgtaagagaaaggtgaaggccatggaggtggacatagaggagaggcctaaagagcttgtacggaagccctatgtgctgaatgacctggaggcagaagccagccttccagaaaagaaaggaaatactctgtctcgggacctcattgactatgtacgctacatggtagagaaccacggggaggactataaggagtggcaagacttcctcgattctttgcagaagaggaagatggaggtggagtgactggtttacatcacagctgccccaggctgaggcgtcccccggaccagtgaagctggagccagggtgtaaggcaaggaggtgctgtgtggctccagaggagctggccaggtcccatggaatcagaaggttacacacacacgtgcacactccccgctctggggaaggaactgttctcagaggctccaatttatattcatctgggggttcacggaaaagccagaacctgctgttttcagggtgggtgatgtaaatatagtgtgtacataataaagcaaatatattttacttcaaaacaaaaaaacccgggccttatttccggtcggaaaaagaggttttaaatggccatgcctaagcttttcttgccagtttttccaagggaactgcgggccaatgggcgaaatcgacgtagcccac

SEQ ID NO: 284925 - DNA, 634 bp, Homo sapiens
ttagtagttgtgttgggataagcaggagtctataactttccctcatcaaagatccttctggtctcaagggctctgttctctggtgaaggccatggaggtggacatagaggagaggcctaaagagcttgtacggaagccctatgtgctgaatggtgggtgtggtccatatattcctttaggtcactgtcctgcactgtgggaagctgggaagggccctaagatgtcctcattttgcagatggagaaaccaagtttcagaggggagaagtgagctggttcaaagttcacagagttaggactgtgtcctggctggctcatttttcattgtactgactaaaccctgaccttactgtgtgaactaaggtcagagatgtttagggaggatgtacccaggtgcctgggagaatagaagagaaaccagtaaatctctggcatgggtatggcttctcatgaatttaaggatgaactgatttttagggattccaccatctcaataaatgttccaatgacaaaatcgattttatgtatattaaggctatagagagtgaacgctaaaacggaggagagtaaaccctacaggaaagtgggaatactctagaattcttcattcatccttccccttacctgtcagggag

SEQ ID NO: 284926 - DNA, 1283 bp, Homo sapiens
gcggccgccgtggccaggcaacctatgggtaccaccgggttctcgcgggtcttgcgaacgaacttttccttgaaactctctggattcctgtaaacagtggggctcagcccctcaatgactggaggcttcgatggttcaaaggggacctccggaatcacagggccgggagtcgccatgtccgggccacagcagcaggagaaaatcgggactccgacctcagcctcccggtgaaggtcatgaaaggggcggggaaacgaataaattgagccttgtacgcaggcgcaaatgctcgttgcatcctgggagtcgtagtgctcagcacggtagtgctacaaaaggactacatttccccaaatgcccgcaaagccttgtgcacgccttccggaaggagtttgttacacgaggtctgagagacagaggcagcgtgtttgagctgctggtgcggtggtcagcgcgatgcccaaggccaagggcaaaacccggaggcagaagtttggttacagtgtcaaccgaaagcgtctgaaccggaatgctcgacggaaggcagcgccgcgggatcgaatgctcccacatccgacatgcctgggaccacgctaaatcggtacggcagaacctggccgagatggggttggctgtggaccccaacagggcggtgcccctccgtaagagaaaggtgaaggccatggaggtggacatagaggagaggcctaaagagcttgtacggaagccctatgtgctgaatgacctggaggcagaagccagccttccagaaaagaaaggaaatactctgtctcgggacctcattgactatgtacgctacatggtagagaaccacggggaggactataaggccatggcccgtgatgagaagaattactatcaagataccccaaaacagattcggagtaagatcaacgtctataaacgcttttacccagcagagtggcaagacttcctcgattctttgcagaagaggaagatggaggtggagtgactggtttacatcacagctgccccaggctgaggcgtcccccggaccagtgaagctggagccagggtgtaaggcaaggaggtgctgtgtggctccagaggagctggccaggtcccatggaatcagaaggttacacacacacgtgcacactccccgctctggggaaggaactgttctcagaggctccaatttatattcatctgggggttcacggaaaagccagaacctgctgttttcagggtgggtgatgtaaatatagtgtgtacataataaagcaaatatattttacttc

SEQ ID NO: 284927 - DNA, 1372 bp, Homo sapiens
gcggccgccgtggccaggcaacctatgggtaccaccgggttctcgcgggtcttgcgaacgaacttttccttgaaactctctggattcctgtaaacagtggggctcagcccctcaatgactggaggcttcgatggttcaaaggggacctccggaatcacagggccgggagtcgccatgtccgggccacagcagcaggagaaaatcgggactccgacctcagcctcccggtgaaggtcatgaaaggggcggggaaacgaataaattgagccttgtacgcaggcgcaaatgctcgttgcatcctgggagtcgtagtgctcagcacggtagtgctacaaaaggactacatttccccaaatgcccgcaaagccttgtgcacgccttccggaaggagtttgttacacgaggtctgagagacagaggcagcgtgtttgagctgctggtgcggtggtcagcgcgatgcccaaggccaagggcaaaacccggaggcagaagtttggttacagtgtcaaccgaaagcgtctgaaccggaatgctcgacggaaggcagcgccgcgggatcgaatggtgagggggctggggttccgggtggccgtgggcctcggccgggacggtccgcgagatgacggatccgcgatgtctctctttgccggtagctcccacatccgacatgcctgggaccacgctaaatcggtacggcagaacctggccgagatggggttggctgtggaccccaacagggcggtgcccctccgtaagagaaaggtgaaggccatggaggtggacatagaggagaggcctaaagagcttgtacggaagccctatgtgctgaatgacctggaggcagaagccagccttccagaaaagaaaggaaatactctgtctcgggacctcattgactatgtacgctacatggtagagaaccacggggaggactataaggccatggcccgtgatgagaagaattactatcaagataccccaaaacagattcggagtaagatcaacgtctataaacgcttttacccagcagagtggcaagacttcctcgattctttgcagaagaggaagatggaggtggagtgactggtttacatcacagctgccccaggctgaggcgtcccccggaccagtgaagctggagccagggtgtaaggcaaggaggtgctgtgtggctccagaggagctggccaggtcccatggaatcagaaggttacacacacacgtgcacactccccgctctggggaaggaactgttctcagaggctccaatttatattcatctgggggttcacggaaaagccagaacctgctgttttcagggtgggtgatgtaaatatagtgtgtacataataaagcaaatatattttacttc

SEQ ID NO: 284928 - DNA, 1193 bp, Homo sapiens
gcggccgccgtggccaggcaacctatgggtaccaccgggttctcgcgggtcttgcgaacgaacttttccttgaaactctctggattcctgtaaacagtggggctcagcccctcaatgactggaggcttcgatggttcaaaggggacctccggaatcacagggccgggagtcgccatgtccgggccacagcagcaggagaaaatcgggactccgacctcagcctcccggtgaaggtcatgaaaggggcggggaaacgaataaattgagccttgtacgcaggcgcaaatgctcgttgcatcctgggagtcgtagtgctcagcacggtagtgctacaaaaggactacatttccccaaatgcccgcaaagccttgtgcacgccttccggaaggagtttgttacacgaggtctgagagacagaggcagcgtgtttgagctgctggtgcggtggtcagcgcgatgcccaaggccaagggcaaaacccggaggcagaagtttggttacagtgtcaaccgaaagcgtctgaaccggaatgctcgacggaaggcagcgccgcgggatcgaatgctcccacatccgacatgcctgggaccacgctaaatcggtacggcagaacctggccgagatggggttggctgtggaccccaacagggcggtgcccctccgtaagagaaaggtgaaggccatggaggtggacatagaggagaggcctaaagagcttgtacggaagccctatgtgctgaatgacctggaggcagaagccagccttccagaaaagaaaggaaatactctgtctcgggacctcattgactatgtacgctacatggtagagaaccacggggaggactataaggagtggcaagacttcctcgattctttgcagaagaggaagatggaggtggagtgactggtttacatcacagctgccccaggctgaggcgtcccccggaccagtgaagctggagccagggtgtaaggcaaggaggtgctgtgtggctccagaggagctggccaggtcccatggaatcagaaggttacacacacacgtgcacactccccgctctggggaaggaactgttctcagaggctccaatttatattcatctgggggttcacggaaaagccagaacctgctgttttcagggtgggtgatgtaaatatagtgtgtacataataaagcaaatatattttacttc

SEQ ID NO: 284929 - DNA, 1559 bp, Homo sapiens
gcggccgccgtggccaggcaacctatgggtaccaccgggttctcgcgggtcttgcgaacgaacttttccttgaaactctctggattcctgtaaacagtggggctcagcccctcaatgactggaggcttcgatggttcaaaggggacctccggaatcacagggccgggagtcgccatgtccgggccacagcagcaggagaaaatcgggactccgacctcagcctcccggtgaaggtcatgaaaggggcggggaaacgaataaattgagccttgtacgcaggcgcaaatgctcgttgcatcctgggagtcgtagtgctcagcacggtagtgctacaaaaggactacatttccccaaatgcccgcaaagccttgtgcacgccttccggaaggagtttgttacacgaggtctgagagacagaggcagcgtgtttgagctgctggtgcggtggtcagcgcgatgcccaaggccaagggcaaaacccggaggcagaagtttggttacagtgtcaaccgaaagcgtctgaaccggaatgctcgacggaaggcagcgccgcgggatcgaatgctcccacatccgacatgcctgggaccacgctaaatcggtacggcagaacctggccgagatggggttggctgtggaccccaacagggcggtgcccctccgtaagagaaaggtgaaggccatggaggtggacatagaggagaggcctaaagagcttgtacggaagccctatgtgctgaatgacctggaggcagaagccagccttccagaaaagaaaggaaatactctgtctcgggacctcattgactatgtacgctacatggtagagaaccacggggaggactataaggccatggcccgtgatgagaagaattactatcaagataccccaaaacagattcggagtaagatcaacgtctataaacgcttttacccagcagagtggcaagacttcctcgattctttgcagaagaggaagatggaggtggagtgactggtttacatcacagctgccccaggctgaggcgtcccccggaccagtgaagctggagccagggtgtaaggcaaggaggtgctgtgtggctccagaggagctggccaggtcccggtgggaagtcgacttcccaccgggacagtaggtctgggcggcaccactgggaactctggacttgagtgtgtttgcctcttccttgggtatgaatgtgtgagttcacccagaggcctgctctcctcacacattgtgtggtttggggttaatgatggagggagacacctcctcatagacggcaggtgcccacctttcagggagtctcccagcatgggcggatgccgggcatgagctgctgtaaactatttgtggctgtgctgcttgagtgacgtctctgtcgtgtgggtgccaagtgcttgtgtagaaactgtgttctgagcccccttttctggacaccaactgtgtcctgtgaatgtatcgctactgtgagccgttcccgcctagccagggccatgtcttaggtgcagctgtctcacggtcagctgagccacagtcccagaccaagctccgg

SEQ ID NO: 284930 - DNA, 679 bp, Homo sapiens
gcggccgccgtggccaggcaacctatgggtaccaccgggttctcgcgggtcttgcgaacgaacttttccttgaaactctctggattcctgtaaacagtggggctcagcccctcaatgactggaggcttcgatggttcaaaggggacctccggaatcacagggccgggagtcgccatgtccgggccacagcagcaggagaaaatcgggactccgacctcagcctcccggtgaaggtcatgaaaggggcggggaaacgaataaattgagccttgtacgcaggcgcaaatgctcgttgcatcctgggagtcgtagtgctcagcacggtagtgctacaaaaggactacatttccccaaatgcccgcaaagccttgtgcacgccttccggaaggagtttgttacacgaggtctgagagacagaggcagcgtgtttgagctgctggtgcggtggtcagcgcgatgcccaaggccaagggcaaaacccggaggcagaagtttggttacagtgtcaaccgaaagcgtctgaaccggaatgctcgacggaaggcagcgccgcgggatcgaatgctcccacatccgacatgcctgggaccacgctaaatcggtacggcagaacctgctgttttcagggtgggtgatgtaaatatagtgtgtacataataaagcaaatatattttacttc

SEQ ID NO: 284931 - DNA, 818 bp, Homo sapiens
cataaagtcctgcccttcaagagctgaatgacctccagttttgtgtaatattaaaatgtatcttgaaacttcaggggtgacattttagatggcaagtacagttctctgcatagccccaaaacccatgtatcgaggcaaacaattcatatacattaggattatctttatgtagaaatgtacaattctggaacatagttgtactttattgatttataaatgaggaaaccgaagtaccctctgccctaggagtattttttgggtgtgtacgtattttgtgtgtgtataggcaaggaacaggagaaagtgaggtgaagtcagaatttaacttttctggaagctttcatttcctctaaacctattttttgcttgttgttagacaagtcatgctgctaatatatagcacttagttggctagtatctgagtgtcgctctgggcaaccagattgcacaatgcctcaaattccaataagggaagtccttgttccttagccaacagcttatgggtgtctgtgtgtgtgtatgtgtatgtgtatgtacgtgtatgtgtgtaatttgtgatgactcagtgtctaggaaggtacaaacattgtagctaatctatttctgtttcttacattacctttcaggaatgggcctggaagacctggctaaaacctttgaatcatttcctgccaacatttggccgtgacccattttggaaggtagaaaatggtccttaaagatgatgtcataggatcttggtaaatctgaatattacttcagttttccaagtgccacctcaaagcaatacttaccccagtccagaccatcacacacat

SEQ ID NO: 284932 - DNA, 711 bp, Homo sapiens
agacaatgtctggtgtctggtggtctcctgactgccaggcaggccagagaaaattaggggtatgttttcatttaacatcattccctgctgactcttgtctctctggaaaattgacagttaggagacaaaaacgttgccatctccagcaaagagcgcttgaacagctgggcatttctagaaaggaatgggcctggaagacctggctaaaacctttgaatcatttcctgccaacatttggccgtgacccattttggaaggtcactcagctattggtctgaagaagccttttttttttctatttggccttctttggaagccaatttatcgtctgagttcttctcctgtaatctgaactacaggttgcaggttctgaactacctgaagccatgcaagtcataacacatcattactgacttctagctctttccttcaagtctctggcattgcagatgttatttctgtcctaagaagagcaagaggagctgcaatatgaaaccagaaaacagacacacttcatttctctctgctgttggtgttttctggggagaccagtggagtcactctgggcaggactgagggggacctgggtatatgaccaagccctggacagttcatgtgaaggagcaggacccagcttccaggtcaggagggaaacatgcctgacctttgtgctgctctgccaggtgaggtgtcctttcctctcctcaccca

SEQ ID NO: 284933 - DNA, 808 bp, Homo sapiens
tcactcaggacatttacgtatggggaagaccaccagactcggcaatgactgtaattacgtagaggtgtcatcttgtgaagaggtcagcatggctcctgcctctggtcgtcccatgactaccaaacaccacggcacatctgtatctatattcaagtttccatcgagtgtgagtttctttggctgcatccctctgtgccttctgcaggagtgctgggcacctgctgcagtcgtggacggccctcagatctggctggtgcaagctcccctcctgcaagggttcaagcgccccctccagtctgtctgcttttgacggctctccagtgcttctcacagctgggtttctatattctgtgcagagttcaatttttaactgtggaacggttagtctgataagttcttcctctattactgaaaccaaaattcctctgaagcttgcactttttattctgtggtagttctaattaagaaagcatgctacattttatcattaattttaggatagttccatcacaggcttacataaaggcattgtaaaaactttctaagtgtaagatagtgctactactaagctaactttactaggtttttcttcacaaatttacccaaagtggaatttattccattttcaaatgtctaataaaatgttgaacattgttcaatgagtgttcttgcaatgactagaggctttcctctagactgacatgaagacatgatgggcataagtcagcaactaggactcctgaaatatcaaggaaaaactgtcaaatgacttgcaaaacctaaattcaccatgtatgccatttctcta

SEQ ID NO: 284934 - DNA, 549 bp, Homo sapiens
gaagagctaccctgaccatgcctgctgtggctcattcacattacacaattcaaagttggcaaacgtggtgactaagcaagcaaaaagcttggctaaaaactcacatattcaaatcgatccttgcagagctgaaccatcaggtgcagaaagacaagtccggcaaaccagaggcaccacatgaccacctcttccactgtctggacattcagcacaccaaagatgaaaatgaacttgtagaaaataaaattccaaaatttgtctttgagatgctaaaaaagaaaaatgtttatgaagagatggggcctccctctgttgctaaggctggtcgcaaactcctgggctcaagtgatcccaccttggtctcccaaaagaatgcttttatatgtaatttggaaccatgtaaatgtttcacaaattcaaaaaataaacacaaaaaagcaaaatatactacaaattaacaacgtgactccttaaagattttgagaacttaaacacactgtactctgaccagatatcttttgtagagaacaaaataaagtggaaaaaaat

SEQ ID NO: 284935 - DNA, 1021 bp, Homo sapiens
  misc_feature (2)..(2): n is a, c, g, or t
  misc_feature (32)..(32): n is a, c, g, or t
gnacccccggagggataatgaaggagccattncggaaaatgtttctctcaaagttcgcggaaaaaatgcacattgaggcagaagaagaggtgagtgaggcccttcacgatgttgattttcagcagttgaagatagagaacgctcaatttcttgagacaattgaagcaaggaatcaagaactgacccagctaaagctgtcatctggaaacactctgcaggttctcaatgcctacaaaagcaagcttcacaaggcaatggaaatatacctcaatctggacaaggagatcttgctgagaaaagagctacttgaaaaaattgaaaaagaaacactacaagtagaggaggaccgggccaaagccgaggcagtgaataagaggctccggaagcagctggccgagttccgggcaccacaggtgatgacttacgtccgggagaagatcttaaatgcggacctggagaagagcatcaggatgtgggaaaggaaagtggagatagcagagatgtccttaaaaggccatcgtaaggcttggaatcgaatgaaaataaccaatgagcagttgcaggcagattaccttgctgggaagtagccagaggcaggccacggcttacagaccactacatgacctataaaagtaatcagctcctttctagtcacgggctcctctcactgttccctgtctgcctggtgttcccaaccccccacccaggctgagtatcatctcctgggccacatctgcccatggggagtgttttcacagcctggcccctggaactgttaccactgaaagaaccacagggcactctaatggtttgacacttgttagccagcatttagttcacaagcatagtgaaagtgaccttcccacacctgggagagggatagaggagggagagccagcccagtgtatgccatgggcttatccgtggcagccccagtgtgcaactatcaaaaacagacatcaaaacagcatggtgaatgcctggcactcagcattctcagtttactcttcagtttggtggg

SEQ ID NO: 284936 - DNA, 679 bp, Homo sapiens
ctgcctctagagtatccccggtggtgaataagaggctccggaagcagctggccgagttccgggcaccacaggtgatgacttacgtccgggagaagatcttaaatgcggacctggagaagagcatcaggatgtgggaaaggaaagtggagatagcagagatgtccttaaaaggccatcgtaaggcttggaatcgaatgaaaataaccaatgagcagttgcaggcagattaccttgctgggaagtagccagaggcaggccacggcttacagaccactacatgacctataaaagtaatcagctcctttctagtcacgggctcctctcactgttccctgtctgcctggtgttcccaaccccccacccaggctgagtatcatctcctgggccacatctgcccatggggagtgttttcacagcctggcccctggaactgttaccactgaaagaaccacagggcactctaatggtttgacacttgttagccagcatttagttcacaagcatagtgaaagtgaccttcccacacctgggagagggatagaggagggagagccagcccagtgtatgccatgggcttatccgtggcagccccagtgtgcaactatcaaaaacagacatcaaaacagcatggtgaatgcctggcactcagcattctcagtttactcttcagtttggtggg

SEQ ID NO: 284937 - DNA, 532 bp, Homo sapiens
aaataagcccagtgccttcactgtggtcatggggctgggctgcatttagtgtccatgtccttagattcagatggcaacatggtccagtaacagaagactttttatggaacctttcccaggagacccgattccgtaaggggagcaggtggccctggtcgctggaaggaaaggtgaccacagacccagcgcctcaggaacatcccccgcactcacggctaagcctgtccccagggaaatcctgagaaatggaatttctcctggatcatggtggcagaggggtggctggagctcgtgtcctgtgttcaggacctgctcctgaggctaaacaggttgggagaactttcacctggcagagcctcaagcgcacctggcacccaacatggagcaaacacaaagcatttagaatctcagtgaacacaggcctctgatgcaggaaaccaccaggttccccagttccaccaaggaagacgcatcggttccctgtgaaaacatctgtgactttatgtacgaataaaacttatgtaactttaca

SEQ ID NO: 284938 - DNA, 475 bp, Homo sapiens
cgtacctgcacaggtggtcgctgatgtgctgcaggaccacagggagcagaaggatttggaaggagacccgattccgtaaggggagcaggtggccctggtcgctggaaggaaaggtgaccacagacccagcgcctcaggaacatcccccgcactcacggctaagcctgtccccagggaaatcctgagaaatggaatttctcctggatcatggtggcagaggggtggctggagctcgtgtcctgtgttcaggacctgctcctgaggctaaacaggttgggagaactttcacctggcagagcctcaagcgcacctggcacccaacatggagcaaacacaaagcatttagaatctcagtgaacacaggcctctgatgcaggaaaccaccaggttccccagttccaccaaggaagacgcatcggttccctgtgaaaacatctgtgactttatgtacgaataaaacttatgtaactttaca

SEQ ID NO: 284939 - DNA, 1596 bp, Homo sapiens
  misc_feature (257)..(257): n is a, c, g, or t
agttttattgggctataattcacataccatataattcacccattttgtacaattcaatgattttggcatattattttttaactatggtaaagtacatgttaaataaaatggctcggcattgttttcggaccgagctcctgcgctagggcccaacagagcagcccaaagcggaaccgagtcacgcgcgccggacgccacccgacagaggggaaacggggcagctctcaaaaccctggaggcgcagaccgtccacacgngacagggacgcccgctcggctccgctccgcgctgatcctcaaggtctcgcggtttccccgccgcccacccggacgccgacgaaagccagcgagctcctcagcctcaggcatctgcatctgggaccgacctcctgggctggctgatcaaagaggaagcagcagcaatgtctgctgtgggggctgcaactccatacctgcatcatcctggtgatagtcacagtggccgagtgagtttcttgggggcccagcttcctccagaggtggcagcaatggcccggctactaggggacctagacaggagcacgttcagaaagttgctgaagtttgtggtcagcagcctgcagggggaggactgccgagaggctgtgcagcgtcttggggtcagcgccaacctgccggaggagcagctgggtgccctgctggcaggcatgcacacactgctccagcaggccctccgtctgccccccaccagcctgaagcctgacaccttcagggaccagctccaggagctctgcatcccccaagacctggtcggggacttggccagcgtggtatttgggagccagcggcccctccttgattctgtggcccagcagcagggggcctggctgccgcatgttgctgactttcggtggcgggtggatgtagcaatctccaccagtgccctggctcgctccctgcagccgagcgtcctgatgcagctgaagctttcagatgggtcagcataccgctttgaggtccccacagccaagttccaggagctgcggtacagcgtggccctggtcctaaaggagatggcagatctggagaagaggtgtgagcgcagactgcaggactgacccctcacttgaccagtcccattcagatccggcttggacaggcacctgagatggtgccaaagtgcagctgactcttcccacgacagccctgcccttcccatgaggcaggctcttcagtgagtgtttgaacgtaattatgtagttttctgtttaattgaaaaagagagctatgcctttttttctttttggaagtaaagcagctaaaaacatgtttctataggtgagtgttggacctcacaccctccccttccctgtacatttgtctttggtgctggacgtggccatgtgaggccaggttgaggccctttgtagacaacatacagttgctcagcctggccccatgtagccaggtgcttttgtagatcttgtgttttaggttgggcattttcactcttctgccttaaatccctgaccccatggagctgacattctagtgcggctgaggggaggggaaacattgtaaaataaatcataaaaattaactggaataactcatcaga

SEQ ID NO: 284940 - DNA, 1017 bp, Homo sapiens
cccggaagtggctctcagggcgcttccggggaccaggcccgcttttggctgcatcagccggggattgccggcgccaggcatctgcatctgggaccgacctcctgggctggctgatcaaagaggaagcagcagcaatgtctgctgtgggggctgcaactccatacctgcatcatcctggtgatagtcacagtggccgagtgagtttcttgggggcccagcttcctccagaggtggcagcaatggcccggctactaggggacctagacaggagcacgttcagaaagttgctgaagtttgtggtcagcagcctgcagggggaggactgccgagaggctgtgcagcgtcttggggtcagcgccaacctgccggaggagcagctgggtgccctgctggcaggcatgcacacactgctccagcaggccctccgtctgccccccaccagcctgaagcctgacaccttcagggaccagctccaggagctctgcatcccccaagacctggtcggggacttggccagcgtggtatttgggagccagcggcccctccttgattctgtggcccagcagcagggggcctggctgccgcatgttgctgactttcggtggcgggtggatgtagcaatctccaccagtgccctggctcgctccctgcagccgagcgtcctgatgcagctgaagctttcagatgggtcagcataccgctttgaggtccccacagccaagttccaggagctgcggtacagcgtggccctggtcctaaaggagatggcagatctggagaagaggtgtgagcgcagactgcaggactgacccctcacttgaccagtcccattcagatccggcttggacaggcacctgagatggtgccaaagtgcagctgactcttcccacgacagccctgcccttcccatgaggcaggctcttcagtgagtgtttgaacgtaattatgtagttttctgtttaattgaaaaagagagctatgcctttttttctttttggaagtaaagcagctaaaaac

SEQ ID NO: 284941 - DNA, 3380 bp, Homo sapiens
cccggaagtggctctcagggcgcttccggggaccaggcccgcttttggctgcatcagccggggattgccggcgccaggtgctgggggcgactcggacagcgggagcgtggggtggagtaggatggagtctccctcccgagctgggggtgtgggcctaggaaaggctgcttcgccgctgtgttcggagagctctggatactgcggggcttttccgcggaggagcgcccgccggcatctgcatctgggaccgacctcctgggctggctgatcaaagaggaagcagcagcaatgtctgctgtgggggctgcaactccatacctgcatcatcctggtgatagtcacagtggccgagtgagtttcttgggggcccagcttcctccagaggtggcagcaatggcccggctactaggggacctagacaggagcacgttcagaaagttgctgaagtttgtggtcagcagcctgcagggggaggactgccgagaggctgtgcagcgtcttggggtcagcgccaacctgccggaggagcagctgggtgccctgctggcaggcatgcacacactgctccagcaggccctccgtctgccccccaccagcctgaagcctgacaccttcagggaccagctccaggagctctgcatcccccaagacctggtcggggacttggccagcgtggtatttgggagccagcggcccctccttgattctgtggcccagcagcagggggcctggctgccgcatgttgctgactttcggtggcgggtggatgtagcaatctccaccagtgccctggctcgctccctgcagccgagcgtcctgatgcagctgaagctttcagatgggtcagcataccgctttgaggtccccacagccaagttccaggagctgcggtacagcgtggccctggtcctaaaggagatggcagatctggagaagaggtgtgagcgcagactgcaggactgacccctcacttgaccagtcccattcagatccggcttggacaggcacctgagatggtgccaaagtgcagctgactcttcccacgacagccctgcccttcccatgaggcaggctcttcaagcgatatctgaagtggctctgatgcctttgccacactcctcgcatctctgggacatcccttccgcactctctccctgactttcaagaggctgacaatccaggccgctgcttcccagctccttacatccctggggtgcgtccttggtgaaggtcttgggaaccacagtctcctcattcaaacagttattttggaaggtaaagcctgtcactttcagcccgggactgcccagatgactgtctaaccagacctcagaatcagaaacgtctccaaagccaggattctgaggaaagtcctgtggggagattctgaccactgtcccataggattctgattttaggatgtccatgtcctcacaggcctgctcattttcagtcctaatcgtagaatctgaaataaacaggaacaaagacgttccttaggccctgtgctcagagaaatgataagactacaaatgcgggggccagggctcaaggctcccaggatagttgcactgagcactgtgaggccccaggtggaaacgtgcaagagaaggcagagcctttgacagttctcaaaagtggtttcatactttttaccttgttcactcattcgatagcaatgaatgttcattgctggggcagggctgggttctgtgagcagagaggtccatcctacaggcactggtgtggggcacagtccatgcagaggcaaaggagacaaagcaagaccagaagggtgggaagctaccacggattgggctgcggggtcaggggctccagcatccgagctggcgaggaaacagtacagggtctgagttctgaatggagagcatggattgtgatgaggaaacaaggctggaagagctgccaagggacttactacgtgagctcagaagagcactgggcacctaggccgttcatggctactccctggggtgggcttctctgagcaggacccagccccctcagctgcctcctggctgctgctgccaacttgcacctggccacctcccctgcttctccctgggctgtgcgtggccacctctaagaccacactgacttcttccctggggctgcaagtttctggaggcccccaggaggccttccagacatctgcgttccttctggactctccaagtaagcacaggcttctgtcctactctgtaaccctagagggcacctctgctgaggtcagacatctccttgatgtctgtgatcaaaccatgacaggatgcaaccacaacacacggctatgatcatgacaaccacggtccccaccacgacacaatcacgttcacaaccacaaccacgcagccacaggtttcaccgtgttggccaggatggtctcgatctcctgacctcgtgatccgcccacctcggcctcccaaatcgctagaatggccggcgtgagccaccatgcccggctccacggcccctacttttcacaactttggactgtccaacttgcttcccgaggcccctacaagccggtggcctctgtaggacctggtcctgccctgctgcaggagtgacggtgatgacccagcagcaactgaaagggaggtgaggggcttcctttctgcagctgagatgcacgcagacccatctcccttgtcatgctgggcagcacaccggctaagcaggggagcagagcaccaggccgggcgcctgcccagcaggagctgatgccggaggcagtgggtgccctggttagggctgaggaccccaagataggctgaagtcctaacttgaagcacctcagaatgtgaccttgtttggaaacacagtcgttgcagattaattagtcaccatgaggtcactggggtggcccctaacccaccatgactggtgtccttctaaggagatggccacatgaacacagacacgcagggagaaggcagccgtgtgaaggagtcggagatcagagtgagggacgcatccacaagccaaggaacccaaggactgccagaaaaccaccagctgcccggagaggcaggacaggatccttccctaaagccttcacaggggggcacggccctgcttgctgaccccccggtttcagatttccggcctccacagctgtgagacaataaatttctgttgttttaagcttcctagtctgtggttcattgttatggcagccacaggaaagtaatgcactcctggagcctgagagggtctgaagggagctgcctcagggaatatgcttacccgaggagaggttactgaatgccaaacctaacccttcacttggatccataggtttgtatctttgcttaacgaaagtatgagtaaaattaaaaatagaacaaaatgtgaca

SEQ ID NO: 284942 - DNA, 1096 bp, Homo sapiens
cacaccattctcctgcctcggcctcccgagtagctgggactacaggcgcctgccaccacgcctggttaattttttgtatttttagtagacacagggtttcaccgtgttggccaggatggtctcgatctcctgacctcgtgatccgcccacctcggcctcccaaatcgctagaatggccggcgtgagccaccatgcccggctccacggcccctacttttcacaactttggactgtccaacttgcttcccgaggcccctacaagccggtggcctctgtaggacctggtcctgccctgctgcaggagtgacggtgatgacccagcagcaactgaaagggaggtgaggggcttcctttctgcagctgagatgcacgcagacccatctcccttgtcatgctgggcagcacaccggctaagcaggggagcagagcaccaggccgggcgcctgcccagcaggagctgatgccggaggcagtgggtgccctggttagggctgaggaccccaagataggctgaagtcctaacttgaagcacctcagaatgtgaccttgtttggaaacacagtcgttgcagattaattagtcaccatgaggtcactggggtggcccctaacccaccatgactggtgtccttctaaggagatggccacatgaacacagacacgcagggagaaggcagccgtgtgaaggagtcggagatcagagtgagggacgcatccacaagccaaggaacccaaggactgccagaaaaccaccagctgcccggagaggcaggacaggatccttccctaaagccttcacaggggggcacggccctgcttgctgaccccccggtttcagatttccggcctccacagctgtgagacaataaatttctgttgttttaagcttcctagtctgtggttcattgttatggcagccacaggaaagtaatgcactcctggagcctgagagggtctgaagggagctgcctcagggaatatgcttacccgaggagaggttactgaatgccaaacctaacccttcacttggatccataggtttgtatctttgcttaacgaaagtatgagtaaaattaaaaatagaacaaaatgtgaca

SEQ ID NO: 284943 - DNA, 1469 bp, Homo sapiens
  misc_feature (130)..(130): n is a, c, g, or t
gggcaggcagttgaggtggattaaaccaaacccagctacgcaaaatcttagcatactcctcaattacccacataggatgaataatagcagttctaccgtacaaccctggaggcgcagaccgtccacacgngacagggacgcccgctcggctccgctccgcgctgatcctcaaggtctcgcggtttccccgccgcccacccggacgccgacgaaagccagcgagctcctcagcctcaggcatctgcatctgggaccgacctcctgggctggctgatcaaagaggaagcagcagcaatgtctgctgtgggggctgcaactccatacctgcatcatcctggtgatagtcacagtggccgagtgagtttcttgggggcccagcttcctccagaggtggcagcaatggcccggctactaggggacctagacaggagcacgttcagaaagttgctgaagtttgtggtcagcagcctgcagggggaggactgccgagaggctgtgcagcgtcttggggtcagcgccaacctgccggaggagcagctgggtgccctgctggcaggcatgcacacactgctccagcaggccctccgtctgccccccaccagcctgaagcctgacaccttcagggaccagctccaggagctctgcatcccccaagacctggtcggggacttggccagcgtggtatttgggagccagcggcccctccttgattctgtggcccagcagcagggggcctggctgccgcatgttgctgactttcggtggcgggtggatgtagcaatctccaccagtgccctggctcgctccctgcagccgagcgtcctgatgcagctgaagctttcagatgggtcagcataccgctttgaggtccccacagccaagttccaggagctgcggtacagcgtggccctggtcctaaaggagatggcagatctggagaagaggtgtgagcgcagactgcaggactgacccctcacttgaccagtcccattcagatccggcttggacaggcacctgagatggtgccaaagtgcagctgactcttcccacgacagccctgcccttcccatgaggcaggctcttcagtgagtgtttgaacgtaattatgtagttttctgtttaattgaaaaagagagctatgcctttttttctttttggaagtaaagcagctaaaaacatgtttctataggtgagtgttggacctcacaccctccccttccctgtacatttgtctttggtgctggacgtggccatgtgaggccaggttgaggccctttgtagacaacatacagttgctcagcctggccccatgtagccaggtgcttttgtagatcttgtgttttaggttgggcattttcactcttctgccttaaatccctgaccccatggagctgacattctagtgcggctgaggggaggggaaacattgtaaaataaatcataaaaattaactggaataactcatcaga

SEQ ID NO: 284944 - DNA, 1463 bp, Homo sapiens
cccggaagtggctctcagggcgcttccggggaccaggcccgcttttggctgcatcagccggggattgccggcgccaggtgctgggggcgactcggacagcgggagcgtggggtggagtaggatggagtctccctcccgagctgggggtgtgggcctaggaaaggctgcttcgccgctgtgttcggagagctctggatactgcggggcttttccgcggaggagcgcccgccggcatctgcatctgggaccgacctcctgggctggctgatcaaagaggaagcagcagcaatgtctgctgtgggggctgcaactccatacctgcatcatcctggtgatagtcacagtggccgagtgagtttcttgggggcccagcttcctccagaggtggcagcaatggcccggctactaggggacctagacaggagcacgttcagaaagttgctgaagtttgtggtcagcagcctgcagggggaggactgccgagaggctgtgcagcgtcttggggtcagcgccaacctgccggaggagcagctgggtgccctgctggcaggcatgcacacactgctccagcaggccctccgtctgccccccaccagcctgaagcctgacaccttcagggaccagctccaggagctctgcatcccccaagacctggtcggggacttggccagcgtggtatttgggagccagcggcccctccttgattctgtggcccagcagcagggggcctggctgccgcatgttgctgactttcggtggcgggtggatgtagcaatctccaccagtgccctggctcgctccctgcagccgagcgtcctgatgcagctgaagctttcagatgggtcagcataccgctttgaggtccccacagccaagttccaggagctgcggtacagcgtggccctggtcctaaaggagatggcagatctggagaagaggtgtgagcgcagactgcaggactgacccctcacttgaccagtcccattcagatccggcttggacaggcacctgagatggtgccaaagtgcagctgactcttcccacgacagccctgcccttcccatgaggcaggctcttcagtgagtgtttgaacgtaattatgtagttttctgtttaattgaaaaagagagctatgcctttttttctttttggaagtaaagcagctaaaaacatgtttctataggtgagtgttggacctcacaccctccccttccctgtacatttgtctttggtgctggacgtggccatgtgaggccaggttgaggccctttgtagacaacatacagttgctcagcctggccccatgtagccaggtgcttttgtagatcttgtgttttaggttgggcattttcactcttctgccttaaatccctgaccccatggagctgacattctagtgcggctgaggggaggggaaacattgtaaaataaatcataaaaattaactggaataactcatcaga

SEQ ID NO: 284945 - DNA, 1171 bp, Homo sapiens
cccggaagtggctctcagggcgcttccggggaccaggcccgcttttggctgcatcagccggggattgccggcgccaggtgctgggggcgactcggacagcgggagcgtggggtggagtaggatggagtctccctcccgagctgggggtgtgggcctaggaaaggctgcttcgccgctgtgttcggagagctctggatactgcggggcttttccgcggaggagcgcccgccggcatctgcatctgggaccgacctcctgggctggctgatcaaagaggaagcagcagcaatgtctgctgtgggggctgcaactccatacctgcatcatcctggtgatagtcacagtggccgagtgagtttcttgggggcccagcttcctccagaggtggcagcaatggcccggctactaggggacctagacaggagcacgttcagaaagttgctgaagtttgtggtcagcagcctgcagggggaggactgccgagaggctgtgcagcgtcttggggtcagcgccaacctgccggaggagcagctgggtgccctgctggcaggcatgcacacactgctccagcaggccctccgtctgccccccaccagcctgaagcctgacaccttcagggaccagctccaggagctctgcatcccccaagacctggtcggggacttggccagcgtggtatttgggagccagcggcccctccttgattctgtggcccagcagcagggggcctggctgccgcatgttgctgactttcggtggcgggtggatgtagcaatctccaccagtgccctggctcgctccctgcagccgagcgtcctgatgcagctgaagctttcagatgggtcagcataccgctttgaggtccccacagccaagttccaggagctgcggtacagcgtggccctggtcctaaaggagatggcagatctggagaagaggtgtgagcgcagactgcaggactgacccctcacttgaccagtcccattcagatccggcttggacaggcacctgagatggtgccaaagtgcagctgactcttcccacgacagccctgcccttcccatgaggcaggctcttcagtgagtgtttgaacgtaattatgtagttttctgtttaattgaaaaagagagctatgcctttttttctttttggaagtaaagcagctaaaaac

SEQ ID NO: 284946 - DNA, 2333 bp, Homo sapiens
cccggaagtggctctcagggcgcttccggggaccaggcccgcttttggctgcatcagccggggattgccggcgccaggcatctgcatctgggaccgacctcctgggctggctgatcaaagaggaagcagcagcaatgtctgctgtgggggctgcaactccatacctgcatcatcctggtgatagtcacagtggccgagtgagtttcttgggggcccagcttcctccagaggtggcagcaatggcccggctactaggggacctagacaggagcacgttcagaaagttgctgaagtttgtggtcagcagcctgcagggggaggactgccgagaggctgtgcagcgtcttggggtcagcgccaacctgccggaggagcagctgggtgccctgctggcaggcatgcacacactgctccagcaggccctccgtctgccccccaccagcctgaagcctgacaccttcagggaccagctccaggagctctgcatcccccaagacctggtcggggacttggccagcgtggtatttgggagccagcggcccctccttgattctgtggcccagcagcagggggcctggctgccgcatgttgctgactttcggtggcgggtggatgtagcaatctccaccagtgccctggctcgctccctgcagccgagcgtcctgatgcagctgaagctttcagatgggtcagcataccgctttgaggtccccacagccaagttccaggagctgcggtacagcgtggccctggtcctaaaggagatggcagatctggagaagaggtgtgagcgcagactgcaggactgacccctcacttgaccagtcccattcagatccggcttggacaggcacctgagatggtgccaaagtgcagctgactcttcccacgacagccctgcccttcccatgaggcaggctcttcaagcgatatctgaagtggctctgatgcctttgccacactcctcgcatctctgggacatcccttccgcactctctccctgactttcaagaggctgacaatccaggccgctgcttcccagctccttacatccctggggtgcgtccttggtgaaggtcttgggaaccacagtctcctcattcaaacagttattttggaaggtaaagcctgtcactttcagcccgggactgcccagatgactgtctaaccagacctcagaatcagaaacgtctccaaagccaggattctgaggaaagtcctgtggggagattctgaccactgtcccataggattctgattttaggatgtccatgtcctcacaggcctgctcattttcagtcctaatcgtagaatctgaaataaacaggaacaaagacgttccttaggccctgtgctcagagaaatgataagactacaaatgcgggggccagggctcaaggctcccaggatagttgcactgagcactgtgaggccccaggtggaaacgtgcaagagaaggcagagcctttgacagttctcaaaagtggtttcatactttttaccttgttcactcattcgatagcaatgaatgttcattgctggggcagggctgggttctgtgagcagagaggtccatcctacaggcactggtgtggggcacagtccatgcagaggcaaaggagacaaagcaagaccagaagggtgggaagctaccacggattgggctgcggggtcaggggctccagcatccgagctggcgaggaaacagtacagggtctgagttctgaatggagagcatggattgtgatgaggaaacaaggctggaagagctgccaagggacttactacgtgagctcagaagagcactgggcacctaggccgttcatggctactccctggggtgggcttctctgagcaggacccagccccctcagctgcctcctggctgctgctgccaacttgcacctggccacctcccctgcttctccctgggctgtgcgtggccacctctaagaccacactgacttcttccctggggctgcaagtttctggaggcccccaggaggccttccagacatctgcgttccttctggactctccaagtaagcacaggcttctgtcctactctgtaaccctagagggcacctctgctgaggtcagacatctccttgatgtctgtgatcaaaccatgacaggatgcaaccacaacacacggctatgatcatgacaaccacggtccccaccacgacacaatcacgttcacaaccacaaccacgcagccacagctataaccagcccgagtctaccccacatgaatgcacagcccagttacagggcttcaagcttcggttcctgcccactcctaaccattggtggtgagtctccggcttcca

SEQ ID NO: 284947 - DNA, 1581 bp, Homo sapiens
cccggaagtggctctcagggcgcttccggggaccaggcccgcttttggctgcatcagccggggattgccggcgccaggcatctgcatctgggaccgacctcctgggctggctgatcaaagaggaagcagcagcaatgtctgctgtgggggctgcaactccatacctgcatcatcctggtgatagtcacagtggccgagtgagtttcttgggggcccagcttcctccagaggtggcagcaatggcccggctactaggggacctagacaggagcacgttcagaaagttgctgaagtttgtggtcagcagcctgcagggggaggactgccgagaggctgtgcagcgtcttggggtcagcgccaacctgccggaggagcagctgggtgccctgctggcaggcatgcacacactgctccagcaggccctccgtctgccccccaccagcctgaagcctgacaccttcagggaccagctccaggagctctgcatcccccaagacctggtcggggacttggccagcgtggtatttgggagccagcggcccctccttgattctgtggcccagcagcagggggcctggctgccgcatgttgctgactttcggtggcgggtggatgtagcaatctccaccagtgccctggctcgctccctgcagccgagcgtcctgatgcagctgaagctttcagatgggtcagcataccgctttgaggtccccacagccaagttccaggagctgcggtacagcgtggccctggtcctaaaggagatggcagatctggagaagaggtgtgagcgcagactgcaggactgacccctcacttgaccagtcccattcagatccggcttggacaggcacctgagatggtgccaaagtgcagctgactcttcccacgacagccctgcccttcccatgaggcaggctcttcaagcgatatctgaagtggctctgatgcctttgccacactcctcgcatctctgggacatcccttccgcactctctccctgactttcaagaggctgacaatccaggccgctgcttcccagctccttacatccctggggtgcgtccttggtgaaggtcttgggaaccacagtctcctcattcaaacagttattttggaaggagatggccacatgaacacagacacgcagggagaaggcagccgtgtgaaggagtcggagatcagagtgagggacgcatccacaagccaaggaacccaaggactgccagaaaaccaccagctgcccggagaggcaggacaggatccttccctaaagccttcacaggggggcacggccctgcttgctgaccccccggtttcagatttccggcctccacagctgtgagacaataaatttctgttgttttaagcttcctagtctgtggttcattgttatggcagccacaggaaagtaatgcactcctggagcctgagagggtctgaagggagctgcctcagggaatatgcttacccgaggagaggttactgaatgccaaacctaacccttcacttggatccataggtttgtatctttgcttaacgaaagtatgagtaaaattaaaaatagaacaaaatgtgaca

SEQ ID NO: 284948 - DNA, 1028 bp, Homo sapiens
cccggaagtggctctcagggcgcttccggggaccaggcccgcttttggctgcatcagccggggattgccggcgccaggcatctgcatctgggaccgacctcctgggctggctgatcaaagaggaagcagcagcaatgtctgctgtgggggctgcaactccatacctgcatcatcctggtgatagtcacagtggccgagtgagtttcttgggggcccagcttcctccagaggtggcagcaatggcccggctactaggggacctagacaggagcacgttcagaaagttgctgaagtttgtggtcagcagcctgcagggggaggactgccgagaggctgtgcagcgtcttggggtcagcgccaacctgccggaggagcagctgggtgccctgctggcaggcatgcacacactgctccagcaggccctccgtctgccccccaccagcctgaagcctgacaccttcagggaccagctccaggagctctgcatcccccaagacctggtcggggacttggccagcgtggtatttgggagccagcggcccctccttgattctgtggcccagcagcagggggcctggctgccgcatgttgctgactttcggtggcgggtggatgtagcaatctccaccagtgccctggctcgctccctgcagccgagcgtcctgatgcagctgaagctttcagatgggtcagcataccgctttgaggtccccacagccaagttccaggagctgcggtacagcgtggccctggtcctaaaggagatggcagatctggagaagaggtgtgagcgcagactgcaggactgacccctcacttgaccagtcccattcagatccggcttggacaggcacctgagatggtgccaaagtgcagctgactcttcccacgacagccctgcccttcccatgaggcaggctcttcagtgagtgtttgaacgtaattatgtagttttctgtttaattgaaaaagagagctatgcctttttttttttcttttttttttttttttttttttttttttttttt

SEQ ID NO: 284949 - DNA, 1394 bp, Homo sapiens
cccggaagtggctctcagggcgcttccggggaccaggcccgcttttggctgcatcagccggggattgccggcgccaggtgctgggggcgactcggacagcgggagcgtggggtggagtaggatggagtctccctcccgagctgggggtgtgggcctaggaaaggctgcttcgccgctgtgttcggagagctctggatactgcggggcttttccgcggaggagcgcccgccggcatctgcatctgggaccgacctcctgggctggctgatcaaagaggaagcagcagcaatgtctgctgtgggggctgcaactccatacctgcatcatcctggtgatagtcacagtggccgagtgagtttcttgggggcccagcttcctccagaggtggcagcaatggcccggctactaggggacctagacaggagcacgttcagaaagttgctgaagtttgtggtcagcagcctgcagggggaggactgccgagaggctgtgcagcgtcttggggtcagcgccaacctgccggaggagcagctgggtgccctgctggcaggcatgcacacactgctccagcaggccctccgtctgccccccaccagcctgaagcctgacaccttcagggaccagctccaggagctctgcatcccccaagacctggtcggggacttggccagcgtggtatttgggagccagcggcccctccttgattctgtggcccagcagcagggggcctggctgccgcatgttgctgactttcggtggcgggtggatgtagcaatctccaccagtgccctggctcgctccctgcagccgagcgtcctgatgcagctgaagctttcagatgggtcagcatacgcagatctggagaagaggtgtgagcgcagactgcaggactgacccctcacttgaccagtcccattcagatccggcttggacaggcacctgagatggtgccaaagtgcagctgactcttcccacgacagccctgcccttcccatgaggcaggctcttcagtgagtgtttgaacgtaattatgtagttttctgtttaattgaaaaagagagctatgcctttttttctttttggaagtaaagcagctaaaaacatgtttctataggtgagtgttggacctcacaccctccccttccctgtacatttgtctttggtgctggacgtggccatgtgaggccaggttgaggccctttgtagacaacatacagttgctcagcctggccccatgtagccaggtgcttttgtagatcttgtgttttaggttgggcattttcactcttctgccttaaatccctgaccccatggagctgacattctagtgcggctgaggggaggggaaacattgtaaaataaatcataaaaattaactggaataactcatcaga

SEQ ID NO: 284950 - DNA, 1545 bp, Homo sapiens
  misc_feature (257)..(257): n is a, c, g, or t
agttttattgggctataattcacataccatataattcacccattttgtacaattcaatgattttggcatattattttttaactatggtaaagtacatgttaaataaaatggctcggcattgttttcggaccgagctcctgcgctagggcccaacagagcagcccaaagcggaaccgagtcacgcgcgccggacgccacccgacagaggggaaacggggcagctctcaaaaccctggaggcgcagaccgtccacacgngacagggacgcccgctcggctccgctccgcgctgatcctcaaggtctcgcggtttccccgccgcccacccggacgccgacgaaagccagcgagctcctcagcctcaggcatctgcatctgggaccgacctcctgggctggctgatcaaagaggaagcagcagcaatgtctgctgtgggggctgcaactccatacctgcatcatcctggtgatagtcacagtggccgagtgagtttcttgggggcccagcttcctccagaggtggcagcaatggcccggctactaggggacctagacaggagcacgttcagaaagttgctgaagtttgtggtcagcagcctgcagggggaggactgccgagaggctgtgcagcgtcttggggtcagcgccaacctgccggaggagcagctgggtgccctgctggcaggcatgcacacactgctccagcaggccctccgtctgccccccaccagcctgaagcctgacaccttcagggaccagctccaggagctctgcatcccccaagacctggtcggggacttggccagcgtggtatttgggagccagcggcccctccttgattctgtggcccagcagcagggggcctggctgccgcatgttgctgactttcggtggcgggtggatgtagcaatctccaccagtgccctggctcgctcccgctttgaggtccccacagccaagttccaggagctgcggtacagcgtggccctggtcctaaaggagatggcagatctggagaagaggtgtgagcgcagactgcaggactgacccctcacttgaccagtcccattcagatccggcttggacaggcacctgagatggtgccaaagtgcagctgactcttcccacgacagccctgcccttcccatgaggcaggctcttcagtgagtgtttgaacgtaattatgtagttttctgtttaattgaaaaagagagctatgcctttttttctttttggaagtaaagcagctaaaaacatgtttctataggtgagtgttggacctcacaccctccccttccctgtacatttgtctttggtgctggacgtggccatgtgaggccaggttgaggccctttgtagacaacatacagttgctcagcctggccccatgtagccaggtgcttttgtagatcttgtgttttaggttgggcattttcactcttctgccttaaatccctgaccccatggagctgacattctagtgcggctgaggggaggggaaacattgtaaaataaatcataaaaattaactggaataactcatcaga

SEQ ID NO: 284951 - DNA, 1148 bp, Homo sapiens
  misc_feature (257)..(257): n is a, c, g, or t
agttttattgggctataattcacataccatataattcacccattttgtacaattcaatgattttggcatattattttttaactatggtaaagtacatgttaaataaaatggctcggcattgttttcggaccgagctcctgcgctagggcccaacagagcagcccaaagcggaaccgagtcacgcgcgccggacgccacccgacagaggggaaacggggcagctctcaaaaccctggaggcgcagaccgtccacacgngacagggacgcccgctcggctccgctccgcgctgatcctcaaggtctcgcggtttccccgccgcccacccggacgccgacgaaagccagcgagctcctcagcctcaggcatctgcatctgggaccgacctcctgggctggctgatcaaagaggaagcagcagcaatgtctgctgtgggggctgcaactccatacctgcatcatcctggtgatagtcacagtggccgagtgagtttcttgggggcccagcttcctccagaggtggcagcaatggcccggctactaggggacctagacaggagcacttccaggagctgcggtacagcgtggccctggtcctaaaggagatggcagatctggagaagaggtgtgagcgcagactgcaggactgacccctcacttgaccagtcccattcagatccggcttggacaggcacctgagatggtgccaaagtgcagctgactcttcccacgacagccctgcccttcccatgaggcaggctcttcagtgagtgtttgaacgtaattatgtagttttctgtttaattgaaaaagagagctatgcctttttttctttttggaagtaaagcagctaaaaacatgtttctataggtgagtgttggacctcacaccctccccttccctgtacatttgtctttggtgctggacgtggccatgtgaggccaggttgaggccctttgtagacaacatacagttgctcagcctggccccatgtagccaggtgcttttgtagatcttgtgttttaggttgggcattttcactcttctgccttaaatccctgaccccatggagctgacattctagtgcggctgaggggaggggaaacattgtaaaataaatcataaaaattaactggaataactcatcaga

SEQ ID NO: 284952 - DNA, 1286 bp, Homo sapiens
  misc_feature (257)..(257): n is a, c, g, or t
agttttattgggctataattcacataccatataattcacccattttgtacaattcaatgattttggcatattattttttaactatggtaaagtacatgttaaataaaatggctcggcattgttttcggaccgagctcctgcgctagggcccaacagagcagcccaaagcggaaccgagtcacgcgcgccggacgccacccgacagaggggaaacggggcagctctcaaaaccctggaggcgcagaccgtccacacgngacagggacgcccgctcggctccgctccgcgctgatcctcaaggtctcgcggtttccccgccgcccacccggacgccgacgaaagccagcgagctcctcagcctcaggcatctgcatctgggaccgacctcctgggctggctgatcaaagaggaagcagcagcaatgtctgctgtgggggctgcaactccatacctgcatcatcctggtgatagtcacagtggccgagtgagtttcttgggggcccagcttcctccagaggtggcagcaatggcccggctactaggggacctagacaggagcacgttcagaaagttgctgaagtttgtggtcagcagcctgcagggggaggactgccgagaggctgtgcagcgtcttggggtcagcgccaacctgccggaggagcagctgggtgccctgctggcaggcatgcacacactgctccagcaggccctccgtctgccccccaccagcctgaagcctgacaccttcagggaccagctccaggagctctgcatcccccaagacctggtcggggacttggccagcgtggtatttgggagccagcggcccctccttgattctgtggcccagcagcagggggcctggctgccgcatgttgctgactttcggtggcgggtggatgtagcaatctccaccagtgccctggctcgctccctgcagccgagcgtcctgatgcagctgaagctttcagatgggtcagcataccgctttgaggtccccacagccaagttccaggagctgcggtacagcgtggccctggtcctaaaggagatgacaggcataagccaccacactcggcctgaagttggatattcttgagagcaattctgaacctttaccaacattctacatgtttgtcagtataaacgattccatataaaataagtaagttaaggctataggtttattcacatatatacacatttatatgtaagtggtctatcccatgtgaattttttgatgctgggtaagccttgagctacgattaaaagctttgccacagtca

SEQ ID NO: 284953 - DNA, 446 bp, Homo sapiens
gagctgcatgctgggtgcgggaagaggtgggcgagaagcaaaagaaggaagattgggagcgcatggtttagggtggggtggagtggaagggcaaatggggaccatactagactgcagaactaactaaaagggcacggactcagcgactccgcgacggagcctgcctgggtgagggagtctctgggacgcagggggctcctgtagctggcaggttgctgggcaggagggggtcacaaacacggcagggaagtctcgtcgctgcgaaggggacgcggcatccatctctcctcgggaactttgaaaatgctcagttcttctggcctagtctccgctggggccgccgcccgcgcctccccgggccaccccagctccgccaggccccccagggcccgggcccttccggccgcgctctccgctctttatcttcttccgcgccatgtggcccc

SEQ ID NO: 284954 - DNA, 472 bp, Homo sapiens
tttcagtaccaggattctttgggcggtgagtgccagagggccccagtcacccagaacccccaccccgagtcaaagcgctgaaatgagccccgcggcagctttgaaaatgctcagttcttcttcggtccagggcggggcagaagggaggatgcagagggagaaacaggatgaactcaaacacaggagataggagatgatttggatgaagtgataaagaaaaggcttcactccaagaaaaaaaagaaaaagaaaagaaaatgaaaagacctgcaggagcaagaagccctttccagggtgtgcttatgaggaagaagggaattatggtgatagctaccacttaagcacttaccttgttccaggtgcaataacggtgttttacaggcattattttatttagtcccccaaaataaagctattacgtacctttttatcattacccctaataaaactaatgattagactgtttaaaaac

SEQ ID NO: 284955 - DNA, 353 bp, Homo sapiens
gcccagagattgttttcccattgactcttcattttccactgcccaaggatgaactcaaacacaggagataggagatgatttggatgaagtgataaagaaaaggcttcactccaagaaaaaaaagaaaaagaaaagaaaatgaaaagacctgcaggagcaagaagccctttccagggtgtgcttatgaggaagaagggaattatggtgatagctaccacttaagcacttaccttgttccaggtgcaataacggtgttttacaggcattattttatttagtcccccaaaataaagctattacgtacctttttatcattacccctaataaaactaatgattagactgtttaaaaac

SEQ ID NO: 284956 - DNA, 491 bp, Homo sapiens
ccggctgggaggggtgagggtgggcagagggaagggctggggattcgatccttttctcccactcacgggtcccaccccgccgcctaggggccgtgctttgaaaatgctcagttcttcttcggtccagggcggggcagaagggaggatgcagagggagaaacaggtgagctcctggaatccgcgcaaccttcagcctcttcccacccacctcccatctcggatttctatcccccaacccttagctccctccacgccccctgcacctccaacccgcccttattctccccctgctcctggggagggctggggaagggcagctgtcagccagccgcgcgccgcccgcctcacctggcctagtctccgctggggccgccgcccgcgcctccccgggccaccccagctccgccaggccccccagggcccgggcccttccggccgcgctctccgctctttatcttcttccgcgccatgtggccccgaaaactcgcctg

SEQ ID NO: 284957 - DNA, 1145 bp, Homo sapiens
agctggggcatttcaatcctgtatgtgagagctagagactcatacagtgacctagagcaggcatgggtgggtcacaggctttggagagcactctctgtcctgatcttttcagttgagagacttcagctgttcattgctcatttggacttagttcaaggtcatgtcaaagaagaaggtgcacttacgctagttgttagctctgtcttttgtaaccatcaagttccatgcgattgatcagatttaggagggggcgttgggggataatcaattttgggtgtcaccaggtaaacagagccctcagcatctgaatagaaactgaacaggaacagaagagattacactacatctgagatggagacctttcctctgctgctgctcagcctgggcctggttcttgcagaagcatcagaaagcacaatgaagataattaaagaagaatttacagacgaagagatgcaatatgacatggcaaaaagtggccaagaaaaacagaccattgagatattaatgaacccgatcctgttagttaaaaataccagcctcagcatgtccaaggatgatatgtcttccacattactgacattcagaagtttacattataatgaccccaagggaaacagttcgggtaatgacaaagagtgttgcaatgacatgacagtctggagaaaagtttcagaagcaaacggatcgtgcaagtggagcaataacttcatccgcagctccacagaagtgatgcgcagggtccacagggcccccagctgcaagtttgtacagaatcctggcataagctgctgtgagagcctagaactggaaaatacagtgtgccagttcactacaggcaaacaattccccaggtgccaataccatagtgttacctcattagagaagatattgacagtgctgacaggtcattctctgatgagctggttagtttgtggctctaagttgtaaatcccacagagctttaggactagggtcttactaaagaaggacctcttcttgttcattcttgtttaaacctttccttaatatctactctttagcactatagtgaactcctgattatttattctaactggaggagtgaaaaatccaaaattgtggataattcaattaaaagttatgactgataaaaatggcgtgca

SEQ ID NO: 284958 - DNA, 945 bp, Homo sapiens
agctggggcatttcaatcctgtatgtgagagctagagactcatacagtgacctagagcaggcatggaattttgggtgtcaccaggtaaacagagccctcagcatctgaatagaaactgaacaggaacagaagagattacactacatctgagatggagacctttcctctgctgctgctcagcctgggcctggttcttgcagaagcatcagaaagcacaatgaagataattaaagaagaatttacagacgaagagatgcaatatgacatggcaaaaagtggccaagaaaaacagaccattgagatattaatgaacccgatcctgttagttaaaaataccagcctcagcatgtccaaggatgatatgtcttccacattactgacattcagaagtttacattataatgaccccaagggaaacagttcgggtaatgacaaagagtgttgcaatgacatgacagtctggagaaaagtttcagaagcaaacggatcgtgcaagtggagcaataacttcatccgcagctccacagaagtgatgcgcagggtccacagggcccccagctgcaagtttgtacagaatcctggcataagctgctgtgagagcctagaactggaaaatacagtgtgccagttcactacaggcaaacaattccccaggtgccaataccatagtgttacctcattagagaagatattgacagtgctgacaggtcattctctgatgagctggttagtttgtggctctaagttgtaaatcccacagagctttaggactagggtcttactaaagaaggacctcttcttgttcattcttgtttaaacctttccttaatatctactctttagcactatagtgaactcctgattatttattctaactggaggagtgaaaaatccaaaattgtggataattcaattaaaagttatgactgataaaaatggcgtgca

SEQ ID NO: 284959 - DNA, 1171 bp, Homo sapiens
agctggggcatttcaatcctgtatgtgagagctagagactcatacagtgacctagagcaggcatgggtgggtcacaggctttggagagcactctctgtcctgatcttttcagttgagagacttcagctgttcattgctcatttggacttagttcaaggtcatgtcaaagaagaaggtgcacttacgctagttgttagctctgtcttttgtaaccatcaagttccatgcgattgatcagatttaggagggggcgttgggggataatcgtaagtgaaggacagtttgcaaccttaattttgggtgtcaccaggtaaacagagccctcagcatctgaatagaaactgaacaggaacagaagagattacactacatctgagatggagacctttcctctgctgctgctcagcctgggcctggttcttgcagaagcatcagaaagcacaatgaagataattaaagaagaatttacagacgaagagatgcaatatgacatggcaaaaagtggccaagaaaaacagaccattgagatattaatgaacccgatcctgttagttaaaaataccagcctcagcatgtccaaggatgatatgtcttccacattactgacattcagaagtttacattataatgaccccaagggaaacagttcgggtaatgacaaagagtgttgcaatgacatgacagtctggagaaaagtttcagaagcaaacggatcgtgcaagtggagcaataacttcatccgcagctccacagaagtgatgcgcagggtccacagggcccccagctgcaagtttgtacagaatcctggcataagctgctgtgagagcctagaactggaaaatacagtgtgccagttcactacaggcaaacaattccccaggtgccaataccatagtgttacctcattagagaagatattgacagtgctgacaggtcattctctgatgagctggttagtttgtggctctaagttgtaaatcccacagagctttaggactagggtcttactaaagaaggacctcttcttgttcattcttgtttaaacctttccttaatatctactctttagcactatagtgaactcctgattatttattctaactggaggagtgaaaaatccaaaattgtggataattcaattaaaagttatgactgataaaaatggcgtgca

SEQ ID NO: 284960 - DNA, 1049 bp, Homo sapiens
agctggggcatttcaatcctgtatgtgagagctagagactcatacagtgacctagagcaggcatggaattttgggtgtcaccaggtaaacagagccctcagcatctgaatagaaactgaacaggaacagttagacacaacagcagaaactcccaggaaacaaacacgatttcacttttagctctgcaacaaagtggaatcttcctctacaggatcaacttgccgaaggaactgaagagattacactacatctgagatggagacctttcctctgctgctgctcagcctgggcctggttcttgcagaagcatcagaaagcacaatgaagataattaaagaagaatttacagacgaagagatgcaatatgacatggcaaaaagtggccaagaaaaacagaccattgagatattaatgaacccgatcctgttagttaaaaataccagcctcagcatgtccaaggatgatatgtcttccacattactgacattcagaagtttacattataatgaccccaagggaaacagttcgggtaatgacaaagagtgttgcaatgacatgacagtctggagaaaagtttcagaagcaaacggatcgtgcaagtggagcaataacttcatccgcagctccacagaagtgatgcgcagggtccacagggcccccagctgcaagtttgtacagaatcctggcataagctgctgtgagagcctagaactggaaaatacagtgtgccagttcactacaggcaaacaattccccaggtgccaataccatagtgttacctcattagagaagatattgacagtgctgacaggtcattctctgatgagctggttagtttgtggctctaagttgtaaatcccacagagctttaggactagggtcttactaaagaaggacctcttcttgttcattcttgtttaaacctttccttaatatctactctttagcactatagtgaactcctgattatttattctaactggaggagtgaaaaatccaaaattgtggataattcaattaaaagttatgactgataaaaatggcgtgca

SEQ ID NO: 284961 - DNA, 1157 bp, Homo sapiens
agccccgtgccaggcaaggcgggtcaccgggcagcgtcggggccctcttctgcctcggggtctcttcacggagggcgccctgcggcgacagctttcgccggccgcgcgcacggcggtcggtacctgttaaggacgagatgccttccgaccaccggataactcgggacggtccctgatttgcctgctccctgtccaacagcatcttcggctcactcggaagtgaaaacatgcaatttcatgttataacatgcaatttcatgtcataaattattcccactgacgcctgaacatttttcctaaaagggatctgcagtcacaaggcgccgccttccggaatttagaagagattacactacatctgagatggagacctttcctctgctgctgctcagcctgggcctggttcttgcagaagcatcagaaagcacaatgaagataattaaagaagaatttacagacgaagagatgcaatatgacatggcaaaaagtggccaagaaaaacagaccattgagatattaatgaacccgatcctgttagttaaaaataccagcctcagcatgtccaaggatgatatgtcttccacattactgacattcagaagtttacattataatgaccccaagggaaacagttcgggtaatgacaaagagtgttgcaatgacatgacagtctggagaaaagtttcagaagcaaacggatcgtgcaagtggagcaataacttcatccgcagctccacagaagtgatgcgcagggtccacagggcccccagctgcaagtttgtacagaatcctggcataagctgctgtgagagcctagaactggaaaatacagtgtgccagttcactacaggcaaacaattccccaggtgccaataccatagtgttacctcattagagaagatattgacagtgctgacaggtcattctctgatgagctggttagtttgtggctctaagttgtaaatcccacagagctttaggactagggtcttactaaagaaggacctcttcttgttcattcttgtttaaacctttccttaatatctactctttagcactatagtgaactcctgattatttattctaactggaggagtgaaaaatccaaaattgtggataattcaattaaaagttatgactgataaaaatggcgtgca

SEQ ID NO: 284962 - DNA, 1036 bp, Homo sapiens
agctggggcatttcaatcctgtatgtgagagctagagactcatacagtgacctagagcaggcatgggtgggtcacaggctttggagagcactctctgtcctgatcttttcagttgagagacttcagctgttcattgctcatttggacttagttcaagaattttgggtgtcaccaggtaaacagagccctcagcatctgaatagaaactgaacaggaacagaagagattacactacatctgagatggagacctttcctctgctgctgctcagcctgggcctggttcttgcagaagcatcagaaagcacaatgaagataattaaagaagaatttacagacgaagagatgcaatatgacatggcaaaaagtggccaagaaaaacagaccattgagatattaatgaacccgatcctgttagttaaaaataccagcctcagcatgtccaaggatgatatgtcttccacattactgacattcagaagtttacattataatgaccccaagggaaacagttcgggtaatgacaaagagtgttgcaatgacatgacagtctggagaaaagtttcagaagcaaacggatcgtgcaagtggagcaataacttcatccgcagctccacagaagtgatgcgcagggtccacagggcccccagctgcaagtttgtacagaatcctggcataagctgctgtgagagcctagaactggaaaatacagtgtgccagttcactacaggcaaacaattccccaggtgccaataccatagtgttacctcattagagaagatattgacagtgctgacaggtcattctctgatgagctggttagtttgtggctctaagttgtaaatcccacagagctttaggactagggtcttactaaagaaggacctcttcttgttcattcttgtttaaacctttccttaatatctactctttagcactatagtgaactcctgattatttattctaactggaggagtgaaaaatccaaaattgtggataattcaattaaaagttatgactgataaaaatggcgtgca

SEQ ID NO: 284963 - DNA, 1873 bp, Homo sapiens
ccaaatggcttcttctcccacagacaattgctgccactgtctctggattagaaaccacttgacagaggggacagcccggctaagggccctgcatggtcaggtgaagagatctttaggagtcagtgttgaaggcagaaaacgcccccagaggttcccctcatcccccgttgcagcctgtgtgtctaagcgcttggccagagccagagagtcgccggcaagggaaactccgcggcgagcacgcagcagcagaagggttaacgcgccgggctccgcctcccaaccgcctcttccgggcagagaggcgggcttacgtcacttcctggagactggttgaatccggaagtgaccctagagaaacgagttgtggctgaggaccccggcggcagacgcaggttcgggaccatgagctggattccttttaagattgggcagcccaagaaacagattgtgcccaaaacagtggagagagactttgaaagggagtatggaaaacttcagcagctggaagagcagacccggaggctgcagaaagacatgaagaagagcaccgacgcagacctggccatgtcaaaatctgccgtgaagatatccttggacttactctccaatcccctctgtgagcaagaccaggaccttctgaacatggtgacggccctggacacggccatgaagcggatggatgccttcaatcaggaaaaggtgaaccagatccagaagactgtgatcgagcccttaaaaaagttcggcagtgtcttcccgagcctcaacatggctgtgaagaggcgggaacaggccttgcaggactacaggaggctgcaggccaaggtggagaagtatgaggaaaaggagaagacggggccagtgctggccaagctccaccaggcacgagaggagctgcggcctgtgcgggaggactttgaagccaagaacaggcagctgctggaggagatgccgcgcttctacggcagccgcctcgactacttccagcccagctttgagtccctcatccgagctcaggttgtgtactactcggaaatgcacaagatctttggagacctgtcccatcagcttgaccagccaggccactccgatgagcagcgggagcgggagaacgaggccaaactcagtgagctccgggccctctccattgtggccgatgactgaatccccgtcactcttggaggactcctgtgacgtggtcagcctcattcatccttgcccttctcagggctagctgctcctctcacaggctggggacagaggtggccctggttcacttgccggccctttgcaatgaatgactcttcctgagcctggcaccaggagccctaggcaggccgccgtctccccactcacagccccagcaggtaagcagtgtagacaaacccttggggcttttttatttggagaaccgtccagcatgcatcctggcccacggcctgagcaagctgcagcccttctgaggccatgggcttcgttggctaagttgggggtcttagccttgcatgcgttgtgggcatcaaatctacctccaaaagacccatcctggggagccctctggcccctcgttgccttttcacttcaaaacctcttttttctgggagaggccctgaaccctgtgcgggagagctggtcctccagccctggcaggccctcagccagcttcccagcaagacaaagggcacccttgtggctttgggacctaagtggttggggttcccgaggtcactgaggactggtacctcgggaacgcaagctgtcagtggaactgtcccacaagaattcacaggtctcaaagcaggaacagtgggtttgtgtctcacctgagtatctggaattttattttttcaagtaaaattttcaatgaaacgtc

SEQ ID NO: 284964 - DNA, 2150 bp, Homo sapiens
ccaaatggcttcttctcccacagacaattgctgccactgtctctggattagaaaccacttgacagaggggacagcccggctaagggccctgcatggtcaggtgaagagatctttaggagtcagtgttgaaggcagaaaacgcccccagaggttcccctcatcccccgttgcagcctgtgtgtctaagcgcttggccagagccagagagtcgccggcaagggaaactccgcggcgagcacgcagcagcagaagggttaacgcgccgggctccgcctcccaaccgcctcttccgggcagagaggcgggcttacgtcacttcctggagactggttgaatccggaagtgaccctagagaaacgagttgtggctgaggaccccggcggcagacgcaggttcgggaccatgagctggattccttttaagattgggcagcccaagaaacagattgtgcccaaaacagtggagagagactttgaaagggagtatggaaaacttcagcagctggaagagcagacccggaggctgcagaaagacatgaagaagagcaccgacgcagacctggccatgtcaaaatctgccgtgaagatatccttggacttactctccaatcccctctgtgagcaagaccaggaccttctgaacatggtgacggccctggacacggccatgaagcggatggatgccttcaatcaggaaaaggtgaaccagatccagaagactgtgatcgagcccttaaaaaagttcggcagtgtcttcccgagcctcaacatggctgtgaagaggcgggaacaggccttgcaggactacaggaggctgcaggccaaggtggagaagtatgaggaaaaggagaagacggggccagtgctggccaagctccaccaggcacgagaggagctgcggcctgtgcgggaggactttgaagccaagaacaggcagctgctggaggagatgccgcgcttctacggcagccgcctcgactacttccagcccagctttgagtccctcatccgagctcaggttgtgtactactcggaaatgcacaagatctttggagacctgtcccatcagcttgaccagccaggccactccgatgagcagcgggagcgggagaacgaggccaaactcagtgagctccgggccctctccattgtggccgatgactgaatccccgtcactcttggaggactcctgtgacgtggtcagcctcattcatccttgcccttctcagggctagctgctcctctcacaggctggggacagaggtggccctggttcacttgccggccctttgcaatgaatgactcttcctgagcctggcaccaggagccctaggcaggccgccgtctccccactcacagccccagcaggtaagcagtgtagacaaacccttggggcttttttatttggagaaccgtccagcatgcatcctggcccacggcctgagcaagctgcagcccttctgaggccatgggcttcgttggctaagttgggggtcttagccttgcatgcgttgtgggcatcaaatctacctccaaaagacccatcctggggagccctctggcccctcgttgccttttcacttcaaaacctcttttttctgggagaggccctgaaccctgtgcgggagagctggtcctccagccctggcaggccctcagccagcttcccagcaagacaaagggcacccttgtggctttgggacctaagtggttggggttcccgaggtcactgaggactggtacctcgggaacgcaagctgtcagtggaactgtcccacaagaattcacaggtctcaaagcaggaacagtgggtttgtgtctcacctgagtatctggaattttattttttcaagtaaaattttcaatgaaacgtccacatagtattgtgctgtaacttaggcgagcagaggaaaccccttcctgggcctgctgccctccacggagcagcagcaccctccagcaggcagcccagcatgccaggggtgtgtgcgcacctccccggccctggcccaccttctggagcgaactgcaccgtggtccagcagaggcgctgggtgggagggcacgcgggcaagcctaggagagtaggaagagctgtggaggacacactctcagtttgtttttgactttggtttatttaaaaaacaagcc

SEQ ID NO: 284965 - DNA, 2047 bp, Homo sapiens
ccaaatggcttcttctcccacagacaattgctgccactgtctctggattagaaaccacttgacagaggggacagcccggctaagggccctgcatggtcaggtgaagagatctttaggagtcagtgttgaaggcagaaaacgcccccagaggttcccctcatcccccgttgcagcctgtgtgtctaagcgcttggccagagccagagagtcgccggcaagggaaactccgcggcgagcacgcagcagcagaagggttaacgcgccgggctccgcctcccaaccgcctcttccgggcagagaggcgggcttacgtcacttcctggagactggttgaatccggaagtgaccctagagaaacgagttgtggctgaggaccccggcggcagacgcaggttcgggaccatgagctggattccttttaagattgggcagcccaagaaacagattgtgcccaaaacaccatgtcaaaatctgccgtgaagatatccttggacttactctccaatcccctctgtgagcaagaccaggaccttctgaacatggtgacggccctggacacggccatgaagcggatggatgccttcaatcaggaaaaggtgaaccagatccagaagactgtgatcgagcccttaaaaaagttcggcagtgtcttcccgagcctcaacatggctgtgaagaggcgggaacaggccttgcaggactacaggaggctgcaggccaaggtggagaagtatgaggaaaaggagaagacggggccagtgctggccaagctccaccaggcacgagaggagctgcggcctgtgcgggaggactttgaagccaagaacaggcagctgctggaggagatgccgcgcttctacggcagccgcctcgactacttccagcccagctttgagtccctcatccgagctcaggttgtgtactactcggaaatgcacaagatctttggagacctgtcccatcagcttgaccagccaggccactccgatgagcagcgggagcgggagaacgaggccaaactcagtgagctccgggccctctccattgtggccgatgactgaatccccgtcactcttggaggactcctgtgacgtggtcagcctcattcatccttgcccttctcagggctagctgctcctctcacaggctggggacagaggtggccctggttcacttgccggccctttgcaatgaatgactcttcctgagcctggcaccaggagccctaggcaggccgccgtctccccactcacagccccagcaggtaagcagtgtagacaaacccttggggcttttttatttggagaaccgtccagcatgcatcctggcccacggcctgagcaagctgcagcccttctgaggccatgggcttcgttggctaagttgggggtcttagccttgcatgcgttgtgggcatcaaatctacctccaaaagacccatcctggggagccctctggcccctcgttgccttttcacttcaaaacctcttttttctgggagaggccctgaaccctgtgcgggagagctggtcctccagccctggcaggccctcagccagcttcccagcaagacaaagggcacccttgtggctttgggacctaagtggttggggttcccgaggtcactgaggactggtacctcgggaacgcaagctgtcagtggaactgtcccacaagaattcacaggtctcaaagcaggaacagtgggtttgtgtctcacctgagtatctggaattttattttttcaagtaaaattttcaatgaaacgtccacatagtattgtgctgtaacttaggcgagcagaggaaaccccttcctgggcctgctgccctccacggagcagcagcaccctccagcaggcagcccagcatgccaggggtgtgtgcgcacctccccggccctggcccaccttctggagcgaactgcaccgtggtccagcagaggcgctgggtgggagggcacgcgggcaagcctaggagagtaggaagagctgtggaggacacactctcagtttgtttttgactttggtttatttaaaaaacaagcc

SEQ ID NO: 284966 - DNA, 1181 bp, Homo sapiens
ccaaatggcttcttctcccacagacaattgctgccactgtctctggattagaaaccacttgacagaggggacagcccggctaagggccctgcatggtcaggtgaagagatctttaggagtcagtgttgaaggcagaaaacgcccccagaggttcccctcatcccccgttgcagcctgtgtgtctaagcgcttggccagagccagagagtcgccggcaagggaaactccgcggcgagcacgcagcagcagaagggttaacgcgccgggctccgcctcccaaccgcctcttccgggcagagaggcgggcttacgtcacttcctggagactggttgaatccggaagtgaccctagagaaacgagttgtggctgaggaccccggcggcagacgcaggttcgggaccatgagctggattccttttaagattgggcagcccaagaaacagattgtgcccaaaacagtggagagagactttgaaagggagtatggaaaacttcagcagctggaagagcagacccggaggctgcagaaagacatgaagaagagcaccgacgcagacctggccatgtcaaaatctgccgtgaagatatccttggacttactctccaatcccctctgtgagcaagaccaggaccttctgaacatggtgacggccctggacacggccatgaagcggatggatgccttcaatcaggaaaaggtgaaccagatccagaagactgtgatcgagcccttaaaaaagttcggcagtgtcttcccgagcctcaacatggctgtgaagaggcgggaacaggccttgcaggactacaggaggctgcaggccaaggtggagaagtatgaggaaaaggagaagacggggccagtgctggccaagctccaccaggcacgagaggagctgcggcctgtgcgggaggactttgaagccaagaacaggcagctgctggaggagatgccgcgcttctacggcagccgcctcgactacttccagcccagctttgagtccctcatccgagctcaggaggaagccacagggtgccaggctcccgcgtgtccaggttggagcagatgggaggccagggatgccctttaaccaggcagcattgctgggggctgttgactgcctcttgggccccagcctccccctcgcccgcccggctgccattagtcatggagaagtgagta

SEQ ID NO: 284967 - DNA, 1376 bp, Homo sapiens
ccaaatggcttcttctcccacagacaattgctgccactgtctctggattagaaaccacttgacagaggggacagcccggctaagggccctgcatggtcaggtgaagagatctttaggagtcagtgttgaaggcagaaaacgcccccagaggttcccctcatcccccgttgcagcctgtgtgtctaagcgcttggccagagccagagagtcgccggcaagggaaactccgcggcgagcacgcagcagcagaagggttaacgcgccgggctccgcctcccaaccgcctcttccgggcagagaggcgggcttacgtcacttcctggagactggttgaatccggaagtgaccctagagaaacgagttgtggctgaggaccccggcggcagacgcaggttcgggaccatgagctggattccttttaagattgggcagcccaagaaacagattgtgcccaaaacagtggagagagactttgaaagggagtatggaaaacttcagcagctggaagagcagacccggaggctgcagaaagacatgaagaagagcaccgacgcagacctggccatgtcaaaatctgccgtgaagatatccttggacttactctccaatcccctctgtgagcaagaccaggaccttctgaacatggtgacggccctggacacggccatgaagcggatggatgccttcaatcaggaaaaggtgaaccagatccagaagactgtgatcgagcccttaaaaaagaggaaccaactcttctggtcctgggtcacctccgaatggccacagagtcatgagctccctgggctgcgcagcctgatcctggacactgcagggctctggcttgcctggtagacgccccctgccattgcaccgagggccagccctccagcagcagcagcgagagcctcaggagagcactgctcctggtcactagaggacacatgatccacaaagacgaggccggtgtggacctgcagcgttgcatcgtccactgctgctctctctgagggccactcctctgagtctcccacgcggtcccttctagtcacagtggaggtcctcagggcattttcctgaagcagctggttggaactttggcggttccaatggcagagccagaggatttctgctgctttcatgttgccaaggagcccttgaaggagaaggtgccctggggcaggggtgagtttagatttcagttctgccacctgccagtggcactgtgagggctggaaagggtgccagacagagaatgtggacacctgtgttctcttctagaccttctctgcctcatcgtgactttggatgagtcataggtcatctctctctgtcctcagtttccctcctttttaaaagtgaggtgttggccagatgac

SEQ ID NO: 284968 - DNA, 852 bp, Homo sapiens
ccaaatggcttcttctcccacagacaattgctgccactgtctctggattagaaaccacttgacagaggggacagcccggctaagggccctgcatggtcaggtgaagagatctttaggagtcagtgttgaaggcagaaaacgcccccagaggttcccctcatcccccgttgcagcctgtgtgtctaagcgcttggccagagccagagagtcgccggcaagggaaactccgcggcgagcacgcagcagcagaagggttaacgcgccgggctccgcctcccaaccgcctcttccgggcagagaggcgggcttacgtcacttcctggagactggttgaatccggaagtgaccctagagaaacgagttgtggctgaggaccccggcggcagacgcaggttcgggaccatgagctggtgagtgaggcccaggcggcgggagctgctggacccgcggacccgcgaggcccctggccctgtgtcagtgccgcgtcccggctccctccggtcccgcgcgacccctccgccccagagcaaggcccgacagcccctgccctagggtcgttccctcggtgctttccggagtcgcagtctctcagcaggactcccggggagagtggcggatgatcctcttagcctgggactccgcgtctgacccgttttgccggactcgcgtcctcctagctccttgaagtgagggacttccttgttccctccttttttaaacacccattgaggtggagtcagtgtcgtctttctctcctgtgggcatctctgccccgcgccagtccctccagagctgtggccctcgctgtggcagcctggacccagttcactaatcaaaacccactcccttctg

SEQ ID NO: 284969 - DNA, 411 bp, Homo sapiens
cggcctcgtctttgtggatcatgtgtcctctagtgaccaggagcagtgctcctctgagtctcccacgcggtcccttctagtcacagtggaggtcctcagggcattttcctgaagcagctggttggaactttggcggttccaatggcagagccagaggatttctgctgctttcatgttgccaaggagcccttgaaggagaaggtgccctggggcaggggtgagtttagatttcagttctgccacctgccagtggcactgtgagggctggaaagggtgccagacagagaatgtggacacctgtgttctcttctagaccttctctgcctcatcgtgactttggatgagtcataggtcatctctctctgtcctcagtttccctcctttttaaaagtgaggtgttggccagatgac

SEQ ID NO: 284970 - DNA, 1811 bp, Homo sapiens
ccaaatggcttcttctcccacagacaattgctgccactgtctctggattagaaaccacttgacagaggggacagcccggctaagggccctgcatggtcaggtgaagagatctttaggagtcagtgttgaaggcagaaaacgcccccagaggttcccctcatcccccgttgcagcctgtgtgtctaagcgcttggccagagccagagagtcgccggcaagggaaactccgcggcgagcacgcagcagcagaagggttaacgcgccgggctccgcctcccaaccgcctcttccgggcagagaggcgggcttacgtcacttcctggagactggttgaatccggaagtgaccctagagaaacgagttgtggctgaggaccccggcggcagacgcaggttcgggaccatgagctggattccttttaagattgggcagcccaagaaacagattgtgcccaaaacagtggagagagactttgaaagggagtatggaaaacttcagcaccatgtcaaaatctgccgtgaagatatccttggacttactctccaatcccctctgtgagcaagaccaggaccttctgaacatggtgacggccctggacacggccatgaagcggatggatgccttcaatcaggaaaaggtgaaccagatccagaagactgtgatcgagcccttaaaaaagttcggcagtgtcttcccgagcctcaacatggctgtgaagaggcgggaacaggccttgcaggactacaggaggctgcaggccaaggtggagaagtatgaggaaaaggagaagacggggccagtgctggccaagctccaccaggcacgagaggagctgcggcctgtgcgggaggactttgaagccaagaacaggcagctgctggaggagatgccgcgcttctacggcagccgcctcgactacttccagcccagctttgagtccctcatccgagctcaggttgtgtactactcggaaatgcacaagatctttggagacctgtcccatcagcttgaccagccaggccactccgatgagcagcgggagcgggagaacgaggccaaactcagtgagctccgggccctctccattgtggccgatgactgaatccccgtcactcttggaggactcctgtgacgtggtcagcctcattcatccttgcccttctcagggctagctgctcctctcacaggctggggacagaggtggccctggttcacttgccggccctttgcaatgaatgactcttcctgagcctggcaccaggagccctaggcaggccgccgtctccccactcacagccccagcaggtaagcagtgtagacaaacccttggggcttttttatttggagaaccgtccagcatgcatcctggcccacggcctgagcaagctgcagcccttctgaggccatgggcttcgttggctaagttgggggtcttagccttgcatgcgttgtgggcatcaaatctacctccaaaagacccatcctggggagccctctggcccctcgttgccttttcacttcaaaacctcttttttctgggagaggccctgaaccctgtgcgggagagctggtcctccagccctggcaggccctcagccagcttcccagcaagacaaagggcacccttgtggctttgggacctaagtggttggggttcccgaggtcactgaggactggtacctcgggaacgcaagctgtcagtggaactgtcccacaagaattcacaggtctcaaagcaggaacagtgggtttgtgtctcacctgagtatctggaattttattttttcaagtaaaattttcaatgaaacgtc

SEQ ID NO: 284971 - DNA, 1824 bp, Homo sapiens
ccaaatggcttcttctcccacagacaattgctgccactgtctctggattagaaaccacttgacagaggggacagcccggctaagggccctgcatggtcaggtgaagagatctttaggagtcagtgttgaaggcagaaaacgcccccagaggttcccctcatcccccgttgcagcctgtgtgtctaagcgcttggccagagccagagagtcgccggcaagggaaactccgcggcgagcacgcagcagcagaagggttaacgcgccgggctccgcctcccaaccgcctcttccgggcagagaggcgggcttacgtcacttcctggagactggttgaatccggaagtgaccctagagaaacgagttgtggctgaggaccccggcggcagacgcaggttcgggaccatgagctggtggagagagactttgaaagggagtatggaaaacttcagcagctggaagagcagacccggaggctgcagaaagacatgaagaagagcaccgacgcagacctggccatgtcaaaatctgccgtgaagatatccttggacttactctccaatcccctctgtgagcaagaccaggaccttctgaacatggtgacggccctggacacggccatgaagcggatggatgccttcaatcaggaaaaggtgaaccagatccagaagactgtgatcgagcccttaaaaaagttcggcagtgtcttcccgagcctcaacatggctgtgaagaggcgggaacaggccttgcaggactacaggaggctgcaggccaaggtggagaagtatgaggaaaaggagaagacggggccagtgctggccaagctccaccaggcacgagaggagctgcggcctgtgcgggaggactttgaagccaagaacaggcagctgctggaggagatgccgcgcttctacggcagccgcctcgactacttccagcccagctttgagtccctcatccgagctcaggttgtgtactactcggaaatgcacaagatctttggagacctgtcccatcagcttgaccagccaggccactccgatgagcagcgggagcgggagaacgaggccaaactcagtgagctccgggccctctccattgtggccgatgactgaatccccgtcactcttggaggactcctgtgacgtggtcagcctcattcatccttgcccttctcagggctagctgctcctctcacaggctggggacagaggtggccctggttcacttgccggccctttgcaatgaatgactcttcctgagcctggcaccaggagccctaggcaggccgccgtctccccactcacagccccagcaggtaagcagtgtagacaaacccttggggcttttttatttggagaaccgtccagcatgcatcctggcccacggcctgagcaagctgcagcccttctgaggccatgggcttcgttggctaagttgggggtcttagccttgcatgcgttgtgggcatcaaatctacctccaaaagacccatcctggggagccctctggcccctcgttgccttttcacttcaaaacctcttttttctgggagaggccctgaaccctgtgcgggagagctggtcctccagccctggcaggccctcagccagcttcccagcaagacaaagggcacccttgtggctttgggacctaagtggttggggttcccgaggtcactgaggactggtacctcgggaacgcaagctgtcagtggaactgtcccacaagaattcacaggtctcaaagcaggaacagtgggtttgtgtctcacctgagtatctggaattttattttttcaagtaaaattttcaatgaaacgtc

SEQ ID NO: 284972 - DNA, 1721 bp, Homo sapiens
ccaaatggcttcttctcccacagacaattgctgccactgtctctggattagaaaccacttgacagaggggacagcccggctaagggccctgcatggtcaggtgaagagatctttaggagtcagtgttgaaggcagaaaacgcccccagaggttcccctcatcccccgttgcagcctgtgtgtctaagcgcttggccagagccagagagtcgccggcaagggaaactccgcggcgagcacgcagcagcagaagggttaacgcgccgggctccgcctcccaaccgcctcttccgggcagagaggcgggcttacgtcacttcctggagactggttgaatccggaagtgaccctagagaaacgagttgtggctgaggaccccggcggcagacgcaggttcgggaccatgagctgccatgtcaaaatctgccgtgaagatatccttggacttactctccaatcccctctgtgagcaagaccaggaccttctgaacatggtgacggccctggacacggccatgaagcggatggatgccttcaatcaggaaaaggtgaaccagatccagaagactgtgatcgagcccttaaaaaagttcggcagtgtcttcccgagcctcaacatggctgtgaagaggcgggaacaggccttgcaggactacaggaggctgcaggccaaggtggagaagtatgaggaaaaggagaagacggggccagtgctggccaagctccaccaggcacgagaggagctgcggcctgtgcgggaggactttgaagccaagaacaggcagctgctggaggagatgccgcgcttctacggcagccgcctcgactacttccagcccagctttgagtccctcatccgagctcaggttgtgtactactcggaaatgcacaagatctttggagacctgtcccatcagcttgaccagccaggccactccgatgagcagcgggagcgggagaacgaggccaaactcagtgagctccgggccctctccattgtggccgatgactgaatccccgtcactcttggaggactcctgtgacgtggtcagcctcattcatccttgcccttctcagggctagctgctcctctcacaggctggggacagaggtggccctggttcacttgccggccctttgcaatgaatgactcttcctgagcctggcaccaggagccctaggcaggccgccgtctccccactcacagccccagcaggtaagcagtgtagacaaacccttggggcttttttatttggagaaccgtccagcatgcatcctggcccacggcctgagcaagctgcagcccttctgaggccatgggcttcgttggctaagttgggggtcttagccttgcatgcgttgtgggcatcaaatctacctccaaaagacccatcctggggagccctctggcccctcgttgccttttcacttcaaaacctcttttttctgggagaggccctgaaccctgtgcgggagagctggtcctccagccctggcaggccctcagccagcttcccagcaagacaaagggcacccttgtggctttgggacctaagtggttggggttcccgaggtcactgaggactggtacctcgggaacgcaagctgtcagtggaactgtcccacaagaattcacaggtctcaaagcaggaacagtgggtttgtgtctcacctgagtatctggaattttattttttcaagtaaaattttcaatgaaacgtc

SEQ ID NO: 284973 - DNA, 998 bp, Homo sapiens
ctgcttcacataactttgcttggccacactttccacatgtagggcttctgagatccttgcttatttgatttttcaggtgaaaagaggaagttatagggggccaggtgactaatccccaggcattaggctttcaggatgttgaaagattaatcttcattttctcttgggattcaggaagtccaacccagagatccaggactttatgaggaagaaaggcttcggtgaggacttcaagcagctggagtccttctacatccagacgctgctggacatcgtctcttcttatggcaagggctatgtggtgtggcaggaggtgtttgataataaagtaaagattcagccagacacaatcatacaggtgtggcgagaggatattccagtgaactatatgaaggagctggaactggtcaccaaggccggcttccgggcccttctctctgccccctggtacctgaaccgtatatcctatggccctgactggaaggatttctacgtagtggaacccctggcatttgaaggtacccctgagcagaaggctctggtgattggtggagaggcttgtatgtggggagaatatgtggacaacacaaacctggtccccaggctctggcccagagcaggggctgttgccgaaaggctgtggagcaacaagttgacatctgacctgacatttgcctatgaacgtttgtcacacttccgctgtgagttgctgaggcgaggtgtccaggcccaacccctcaatgtaggcttctgtgagcaggagtttgaacagacctgagccccaggcaccgaggagggtgctggctgtaggtgaatggtagtggagccaggcttccactgcatcctggccaggggacggagccccttgccttcgtgccccttgcctgcgtgcccctgtgcttggagagaaaggggccggtgctggcgctcgcattcaataaagagtaatgtggcatttttctataataaacatggattacctgtgtttaaaaaaaaaa

SEQ ID NO: 284974 - DNA, 1008 bp, Homo sapiens
agaagcaggatttgaaccaggctgacttacaggatgtcatgacacctttgcctctgtcagggatgtgcctgtgtaagatagtcatttccctgattccttcgttggctaggtcttgagtacttgggggacatagcctagtgcagagcagagtcctgggctgagagtcaagcatgatggtgtctaagcctcaattatgtcattcactgggtaacttccagctggttctctaagcatgttgcttacttggatgataagggaagcatgcctagaggtcccctaaggagattggtcaggttatagactgagacccaaggacaggatttcgcatccatgttcatggacaggacagcacctaagtcccccagtgccaccatatttacagcattttagagtcaggaacagagggctaagtagaccaagagcattggctgcctttcagacatccatctatattctaaagggattgagttatttggggttagggtacagagatgggcaggatataaatagatgtcgccaacgtttctggatctccaagacctgtatcagaatcacctgaggcacctgttcagcttgcagattcttgccaatactttgccccaccccaggtgagaatctctggaattgagattcccaggtgcatttggtgtacagtgacagtttgagagtcaccgaaatggggaaggagagactgttgactggtgtgaaaagtgttgctggggccccttctgaggggcttatcttgccatttcttcatgtcctcttgcacctgctcacttcacttctgcattatatctccaaggcgttggtatatggaaaaagatgtaggggcttggaggtgttctggacagtggggagggctccagacccaacctggtcacaaaagagcctctcccccatgcatactcatccacctccctcccctagagctattctcctttgggtttcttgctgctgcaattttatacaaccattatttaaatattattaaacacatattgttctcta

SEQ ID NO: 284975 - DNA, 2277 bp, Homo sapiens
tttttctgcttctgaagttacttcagcctggcaagtcctttacctccccgtaggcctggcgagctgcatcacaacattcaagattcaccctagagccatctgggaaactttcttctccaggtcgccctgcgtcctcgcctccccaccccgttcttctcgagtcgggtgagctgtctagttccatcacggccggcacggccgcaggggtggccggttatttactgctctactgggcccgtgagcagtctggcgagccgagcagttgccgacgcccggcacaatccgctgcacgtagcaggagcctcaggtccaggccggaagtgaaagggcagggtgtgggtcctcctggggtcgcaggcgcagagccgcctctggtcacgtgattcgccgataagtcacgggggcgccgctcacctgaccagggtctcacgtggccagccccctccgagaggggagaccagcgggccatgacaagctccaggctttggttttcgctgctgctggcggcagcgttcgcaggacgggcgacggccctctggccctggcctcagaacttccaaacctccgaccagcgctacgtcctttacccgaacaactttcaattccagtacgatgtcagctcggccgcgcagcccggctgctcagtcctcgacgaggccttccagcgctatcgtgacctgcttttcggttccgggtcttggccccgtccttacctcacagggaaacggcatacactggagaagaatgtgttggttgtctctgtagtcacacctggatgtaaccagcttcctactttggagtcagtggagaattataccctgaccataaatgatgaccagtgtttactcctctctgagactgtctggggagctctccgaggtctggagacttttagccagcttgtttggaaatctgctgagggcacattctttatcaacaagactgagattgaggactttccccgctttcctcaccggggcttgctgttggatacatctcgccattacctgccactctctagcatcctggacactctggatgtcatggcgtacaataaattgaacgtgttccactggcatctggtagatgatccttccttcccatatgagagcttcacttttccagagctcatgagaaaggggtcctacaaccctgtcacccacatctacacagcacaggatgtgaaggaggtcattgaatacgcacggctccggggtatccgtgtgcttgcagagtttgacactcctggccacactttgtcctggggaccaggtatccctggattactgactccttgctactctgggtctgagccctctggcacctttggaccagtgaatcccagtctcaataatacctatgagttcatgagcacattcttcttagaagtcagctctgtcttcccagatttttatcttcatcttggaggagatgaggttgatttcacctgctggaagtccaacccagagatccaggactttatgaggaagaaaggcttcggtgaggacttcaagcagctggagtccttctacatccagacgctgctggacatcgtctcttcttatggcaagggctatgtggtgtggcaggaggtgtttgataataaagtaaagattcagccagacacaatcatacaggtgtggcgagaggatattccagtgaactatatgaaggagctggaactggtcaccaaggccggcttccgggcccttctctctgccccctggtacctgaaccgtatatcctatggccctgactggaaggatttctacgtagtggaacccctggcatttgaaggtacccctgagcagaaggctctggtgattggtggagaggcttgtatgtggggagaatatgtggacaacacaaacctggtccccaggctctggcccagagcaggggctgttgccgaaaggctgtggagcaacaagttgacatctgacctgacatttgcctatgaacgtttgtcacacttccgctgtgagttgctgaggcgaggtgtccaggcccaacccctcaatgtaggcttctgtgagcaggagtttgaacagacctgagccccaggcaccgaggagggtgctggctgtaggtgaatggtagtggagccaggcttccactgcatcctggccaggggacggagccccttgccttcgtgccccttgcctgcgtgcccctgtgcttggagagaaaggggccggtgctggcgctcgcattcaataaagagtaatgtggcatttttctataataaacatggattacctgtgtttaaaaaaaaaa

SEQ ID NO: 284976 - DNA, 2697 bp, Homo sapiens
tttttctgcttctgaagttacttcagcctggcaagtcctttacctccccgtaggcctggcgagctgcatcacaacattcaagattcaccctagagccatctgggaaactttcttctccaggtcgccctgcgtcctcgcctccccaccccgttcttctcgagtcgggtgagctgtctagttccatcacggccggcacggccgcaggggtggccggttatttactgctctactgggcccgtgagcagtctggcgagccgagcagttgccgacgcccggcacaatccgctgcacgtagcaggagcctcaggtccaggccggaagtgaaagggcagggtgtgggtcctcctggggtcgcaggcgcagagccgcctctggtcacgtgattcgccgataagtcacgggggcgccgctcacctgaccagggtctcacgtggccagccccctccgagaggggagaccagcgggccatgacaagctccaggctttggttttcgctgctgctggcggcagcgttcgcaggacgggcgacggccctctggccctggcctcagaacttccaaacctccgaccagcgctacgtcctttacccgaacaactttcaattccagtacgatgtcagctcggccgcgcagcccggctgctcagtcctcgacgaggccttccagcgctatcgtgacctgcttttcggttccgggtcttggccccgtccttacctcacagggaaacggcatacactggagaagaatgtgttggttgtctctgtagtcacacctggatgtaaccagcttcctactttggagtcagtggagaattataccctgaccataaatgatgaccagtgtttactcctctctgagactgtctggggagctctccgaggtctggagacttttagccagcttgtttggaaatctgctgagggcacattctttatcaacaagactgagattgaggactttccccgctttcctcaccggggcttgctgttggatacatctcgccattacctgccactctctagcatcctggacactctggatgtcatggcgtacaataaattgaacgtgttccactggcatctggtagatgatccttccttcccatatgagagcttcacttttccagagctcatgagaaaggggtcctacaaccctgtcacccacatctacacagcacaggatgtgaaggaggtcattgaatacgcacggctccggggtatccgtgtgcttgcagagtttgacactcctggccacactttgtcctggggaccaggtatccctggattactgactccttgctactctgggtctgagccctctggcacctttggaccagtgaatcccagtctcaataatacctatgagttcatgagcacattcttcttagaagtcagctctgtcttcccagatttttatcttcatcttggaggagatgaggttgatttcacctgctggaagtccaacccagagatccaggactttatgaggaagaaaggcttcggtgaggacttcaagcagctggagtccttctacatccagacgctgctggacatcgtctcttcttatggcaagggctatgtggtgtggcaggaggtgtttgataataaagtaaagattcagccagacacaatcatacaggtgtggcgagaggatattccagtgaactatatgaaggagctggaactggtcaccaaggccggcttccgggcccttctctctgccccctggtacctgaaccgtatatcctatggccctgactggaaggatttctacgtagtggaacccctggcatttgaaggtacccctgagcagaaggctctggtgattggtggagaggcttgtatgtggggagaatatgtggacaacacaaacctggtccccaggctctggcccagagcaggggctgttgccgaaaggctgtggagcaacaagttgacatctgacctgacatttgcctatgaacgtttgtcacacttccgctgtgagttgctgaggcgaggtgtccaggcccaacccctcaatgtaggcttctgtgagcaggagtttgaacagacctgagccccaggcaccgaggagggtgctggctgtaggtgaatggtagtggagccaggcttccactgcatcctggccaggggacggagccccttgccttcgtgccccttgcctgcgtgcccctgtgcttggagagaaaggggccggtgctggcgctcgcattcaataaagagtaatgtggcatttttctataataaacatggattacctgtgtttaaaaaaaaaagtgtgaatggcgttagggtaagggcacagccaggctggagtcagtgtctgcccctgaggtcttttaagttgagggctgggaatgaaacctatagcctttgtgctgttctgccttgcctgtgagctatgtcactcccctcccactcctgaccatattccagacacctgccctaatcctcagcctgctcacttcacttctgcattatatctccaaggcgttggtatatggaaaaagatgtaggggcttggaggtgttctggacagtggggagggctccagacccaacctggtcacaaaagagcctctcccccatgcatactcatccacctccctcccctagagctattctcctttgggtttcttgctgctgcaattttatacaaccattatttaaatattattaaacacatattgttctcta

SEQ ID NO: 284977 - DNA, 3289 bp, Homo sapiens
  misc_feature (2801)..(2801): n is a, c, g, or t
tttttctgcttctgaagttacttcagcctggcaagtcctttacctccccgtaggcctggcgagctgcatcacaacattcaagattcaccctagagccatctgggaaactttcttctccaggtcgccctgcgtcctcgcctccccaccccgttcttctcgagtcgggtgagctgtctagttccatcacggccggcacggccgcaggggtggccggttatttactgctctactgggcccgtgagcagtctggcgagccgagcagttgccgacgcccggcacaatccgctgcacgtagcaggagcctcaggtccaggccggaagtgaaagggcagggtgtgggtcctcctggggtcgcaggcgcagagccgcctctggtcacgtgattcgccgataagtcacgggggcgccgctcacctgaccagggtctcacgtggccagccccctccgagaggggagaccagcgggccatgacaagctccaggctttggttttcgctgctgctggcggcagcgttcgcaggacgggcgacggccctctggccctggcctcagaacttccaaacctccgaccagcgctacgtcctttacccgaacaactttcaattccagtacgatgtcagctcggccgcgcagcccggctgctcagtcctcgacgaggccttccagcgctatcgtgacctgcttttcggttccgggtcttggccccgtccttacctcacagggaaacggcatacactggagaagaatgtgttggttgtctctgtagtcacacctggatgtaaccagcttcctactttggagtcagtggagaattataccctgaccataaatgatgaccagtgtttactcctctctgagactgtctggggagctctccgaggtctggagacttttagccagcttgtttggaaatctgctgagggcacattctttatcaacaagactgagattgaggactttccccgctttcctcaccggggcttgctgttggatacatctcgccattacctgccactctctagcatcctggacactctggatgtcatggcgtacaataaattgaacgtgttccactggcatctggtagatgatccttccttcccatatgagagcttcacttttccagagctcatgagaaaggggtcctacaaccctgtcacccacatctacacagcacaggatgtgaaggaggtcattgaatacgcacggctccggggtatccgtgtgcttgcagagtttgacactcctggccacactttgtcctggggaccaggtatccctggattactgactccttgctactctgggtctgagccctctggcacctttggaccagtgaatcccagtctcaataatacctatgagttcatgagcacattcttcttagaagtcagctctgtcttcccagatttttatcttcatcttggaggagatgaggttgatttcacctgctggaagtccaacccagagatccaggactttatgaggaagaaaggcttcggtgaggacttcaagcagctggagtccttctacatccagacgctgctggacatcgtctcttcttatggcaagggctatgtggtgtggcaggaggtgtttgataataaagtaaagattcagccagacacaatcatacaggtgtggcgagaggatattccagtgaactatatgaaggagctggaactggtcaccaaggccggcttccgggcccttctctctgccccctggtacctgaaccgtatatcctatggccctgactggaaggatttctacgtagtggaacccctggcatttgaaggtacccctgagcagaaggctctggtgattggtggagaggcttgtatgtggggagaatatgtggacaacacaaacctggtccccaggctctggcccagagcaggggctgttgccgaaaggctgtggagcaacaagttgacatctgacctgacatttgcctatgaacgtttgtcacacttccgctgtgagttgctgaggcgaggtgtccaggcccaacccctcaatgtaggcttctgtgagcaggagtttgaacagacctgagccccaggcaccgaggagggtgctggctgtaggtgaatggtagtggagccaggcttccactgcatcctggccaggggacggagccccttgccttcgtgccccttgcctgcgtgcccctgtgcttggagagaaaggggccggtgctggcgctcgcattcaataaagagtaatgtggcatttttctataataaacatggattacctgtgtttaaaaaaaaaagtgtgaatggcgttagggtaagggcacagccaggctggagtcagtgtctgcccctgaggtcttttaagttgagggctgggaatgaaacctatagcctttgtgctgttctgccttgcctgtgagctatgtcactcccctcccactcctgaccatattccagacacctgccctaatcctcagcctgctcacttcacttctgcattatatctccaaggcgttggtatatggaaaaagatgtaggggcttggaggtgttctggacagtggggagggctccagacccaacctggtcacaaaagagcctctcccccatgcatactcatccacctccctcccctagagctattctcctttgggtttcttgctgctgcaattttatacaaccattatttaaatattattaaacacatattgttctctaaaaactgtggtagtgggtttttttgttgtttttgtttttgagactgtctcaaaaactctgtcgcccaggctgacagtgcagtggcacaatcttggctcactgcngcctctgcctcctgggttcaagcgattctcgtgcatcagcctcctgagtaactggaattaataggcacgtgccaccatgtccatctaattcatatatatatattttttttttctgagacggagtctcactgtcactctggcttgggagacagagtgagactccgtctcaaaaaaaagaaaaaaagaaaaacatgtacaacatggaatagagttgatatccagccagtatacactttgagtgatctcattcacactcagtgtatcttcagctaccctcatatgaagtcacagactcacacctgtatttccagcactttgggaggccaaggcagtaggatcactacagcctgagttcagggctgcagtgatctatgattgcagcattgcactggagcctggccaacagagtgagaccctatctcttaaaaattaaaaaataaaaataagtcattataaaagtgtaattatcaagacagttggtattggtg

SEQ ID NO: 284978 - DNA, 2962 bp, Homo sapiens
tttttctgcttctgaagttacttcagcctggcaagtcctttacctccccgtaggcctggcgagctgcatcacaacattcaagattcaccctagagccatctgggaaactttcttctccaggtcgccctgcgtcctcgcctccccaccccgttcttctcgagtcgggtgagctgtctagttccatcacggccggcacggccgcaggggtggccggttatttactgctctactgggcccgtgagcagtctggcgagccgagcagttgccgacgcccggcacaatccgctgcacgtagcaggagcctcaggtccaggccggaagtgaaagggcagggtgtgggtcctcctggggtcgcaggcgcagagccgcctctggtcacgtgattcgccgataagtcacgggggcgccgctcacctgaccagggtctcacgtggccagccccctccgagaggggagaccagcgggccatgacaagctccaggctttggttttcgctgctgctggcggcagcgttcgcaggacgggcgacggccctctggccctggcctcagaacttccaaacctccgaccagcgctacgtcctttacccgaacaactttcaattccagtacgatgtcagctcggccgcgcagcccggctgctcagtcctcgacgaggccttccagcgctatcgtgacctgcttttcggttccgggtcttggccccgtccttacctcacagggaaacggcatacactggagaagaatgtgttggttgtctctgtagtcacacctggatgtaaccagcttcctactttggagtcagtggagaattataccctgaccataaatgatgaccagtgtttactcctctctgagactgtctggggagctctccgaggtctggagacttttagccagcttgtttggaaatctgctgagggcacattctttatcaacaagactgagattgaggactttccccgctttcctcaccggggcttgctgttggatacatctcgccattacctgccactctctagcatcctggacactctggatgtcatggcgtacaataaattgaacgtgttccactggcatctggtagatgatccttccttcccatatgagagcttcacttttccagagctcatgagaaaggggtcctacaaccctgtcacccacatctacacagcacaggatgtgaaggaggtcattgaatacgcacggctccggggtatccgtgtgcttgcagagtttgacactcctggccacactttgtcctggggaccaggtatccctggattactgactccttgctactctgggtctgagccctctggcacctttggaccagtgaatcccagtctcaataatacctatgagttcatgagcacattcttcttagaagtcagctctgtcttcccagatttttatcttcatcttggaggagatgaggttgatttcacctgctggaagtccaacccagagatccaggactttatgaggaagaaaggcttcggtgaggacttcaagcagctggagtccttctacatccagacgctgctggacatcgtctcttcttatggcaagggctatgtggtgtggcaggaggtgtttgataataaagtaaagattcagccagacacaatcatacaggtgtggcgagaggatattccagtgaactatatgaaggagctggaactggtcaccaaggccggcttccgggcccttctctctgccccctggtacctgaaccgtatatcctatggccctgactggaaggatttctacgtagtggaacccctggcatttgaaggtacccctgagcagaaggctctggtgattggtggagaggcttgtatgtggggagaatatgtggacaacacaaacctggtccccaggctctggtaagggttttcgggggggaggtggagggttgggcctgagagcaggagttctcccttagagacccaatcccatctagccacctctggactagtacccttctttcaggcctgagagagagcaggccgtgcaacgagccttctgaagatttgtgtgcaatattcactctccacatgacttccgtctatatccctccagctgccctttggtatgtgggatagggattgttaaccttacttcccagagagataatgaggcctggagaacataggtgagttgctcaagacccagcacaagcatccatgattcctgtaataaggcttccctctgctgttttcactgcagccttaccaagtatggttgggtgtgcaaagtttacattttaaggacctctgctgctgccactgtcattgtggttaatgatggctttaaggtttattcttattcccgtatctttgagagaggaagagagtgggattgctacccacattttaatgaaggtggagctgagccgtagaactctctgggagccatccaacctggctgtggctcataacaaggtattgatcacttcctttggcctgagtgagtccagggtgcctagacaagaggtagcagcctgtggatgtccagcacctttgcagggaatacagggcccaatctggcacatgccccttttcctccagggcccagagcaggggctgttgccgaaaggctgtggagcaacaagttgacatctgacctgacatttgcctatgaacgtttgtcacacttccgctgtgagttgctgaggcgaggtgtccaggcccaacccctcaatgtaggcttctgtgagcaggagtttgaacagacctgagccccaggcaccgaggagggtgctggctgtaggtgaatggtagtggagccaggcttccactgcatcctggccaggggacggagccccttgccttcgtgccccttgcctgcgtgcccctgtgcttggagagaaaggggccggtgctggcgctcgcattcaataaagagtaatgtggcatttttctataataaacatggattacctgtgtttaaaaaaaaaa

SEQ ID NO: 284979 - DNA, 2574 bp, Homo sapiens
  misc_feature (2472)..(2472): n is a, c, g, or t
tttttctgcttctgaagttacttcagcctggcaagtcctttacctccccgtaggcctggcgagctgcatcacaacattcaagattcaccctagagccatctgggaaactttcttctccaggtcgccctgcgtcctcgcctccccaccccgttcttctcgagtcgggtgagctgtctagttccatcacggccggcacggccgcaggggtggccggttatttactgctctactgggcccgtgagcagtctggcgagccgagcagttgccgacgcccggcacaatccgctgcacgtagcaggagcctcaggtccaggccggaagtgaaagggcagggtgtgggtcctcctggggtcgcaggcgcagagccgcctctggtcacgtgattcgccgataagtcacgggggcgccgctcacctgaccagggtctcacgtggccagccccctccgagaggggagaccagcgggccatgacaagctccaggctttggttttcgctgctgctggcggcagcgttcgcaggacgggcgacggccctctggccctggcctcagaacttccaaacctccgaccagcgctacgtcctttacccgaacaactttcaattccagtacgatgtcagctcggccgcgcagcccggctgctcagtcctcgacgaggccttccagcgctatcgtgacctgcttttcggttccgggtcttggccccgtccttacctcacagggaaacggcatacactggagaagaatgtgttggttgtctctgtagtcacacctggatgtaaccagcttcctactttggagtcagtggagaattataccctgaccataaatgatgaccagtgtttactcctctctgagactgtctggggagctctccgaggtctggagacttttagccagcttgtttggaaatctgctgagggcacattctttatcaacaagactgagattgaggactttccccgctttcctcaccggggcttgctgttggatacatctcgccattacctgccactctctagcatcctggacactctggatgtcatggcgtacaataaattgaacgtgttccactggcatctggtagatgatccttccttcccatatgagagcttcacttttccagagctcatgagaaaggggtcctacaaccctgtcacccacatctacacagcacaggatgtgaaggaggtcattgaatacgcacggctccggggtatccgtgtgcttgcagagtttgacactcctggccacactttgtcctggggaccaggtatccctggattactgactccttgctactctgggtctgagccctctggcacctttggaccagtgaatcccagtctcaataatacctatgagttcatgagcacattcttcttagaagtcagctctgtcttcccagatttttatcttcatcttggaggagatgaggttgatttcacctgctggaagtccaacccagagatccaggactttatgaggaagaaaggcttcggtgaggacttcaagcagctggagtccttctacatccagacgctgctggacatcgtctcttcttatggcaagggctatgtggtgtggcaggaggtgtttgataataaagtaaagattcagccagacacaatcatacaggtgtggcgagaggatattccagtgaactatatgaaggagctggaactggtcaccaaggccggcttccgggcccttctctctgccccctggtacctgaaccgtatatcctatggccctgactggaaggatttctacgtagtggaacccctggcatttgaaggtacccctgagcagaaggctctggtgattggtggagaggcttgtatgtggggagaatatgtggacaacacaaacctggtccccaggctctggcccagagcaggggctgttgccgaaaggctgtggagcaacaagttgacatctgacctgacatttgcctatgaacgtttgtcacacttccgctgtgagttgctgaggcgaggtgtccaggcccaacccctcaatgtaggcttctgtgagcaggagtttgaacagacctgagccccaggcaccgaggagggtgctggctgtaggtgaatggtagtggagccaggcttccactgcatcctggccaggggacggagccccttgccttcgtgccccttgcctgcgtgcccctgtgcttggagagaaaggggccggtgctggcgctcgcattcaataaagagtaatgtggcatttttctataataaacatggattacctgtgtttaaaaaaaaaaaaaaaaaaaaaaaaaaaaaaaacgggggaaaaaggggggggcgcacaaacagaggggtactaaactgcgagcagtgtggtcatctgcggttcctctgtacccagctttctgctccccgcggagattcgcgggccccccaaaagggggggcgataatcgagatacgccggtacctcgtgattttctctcagaaaangccgcacagaacgcaacacacaatagacgacacctagttggaacaccacggcaagcaacaacaactcgctacaaacttccccatacagtacagtagtgcctg

SEQ ID NO: 284980 - DNA, 2835 bp, Homo sapiens
tttttctgcttctgaagttacttcagcctggcaagtcctttacctccccgtaggcctggcgagctgcatcacaacattcaagattcaccctagagccatctgggaaactttcttctccaggtcgccctgcgtcctcgcctccccaccccgttcttctcgagtcgggtgagctgtctagttccatcacggccggcacggccgcaggggtggccggttatttactgctctactgggcccgtgagcagtctggcgagccgagcagttgccgacgcccggcacaatccgctgcacgtagcaggagcctcaggtccaggccggaagtgaaagggcagggtgtgggtcctcctggggtcgcaggcgcagagccgcctctggtcacgtgattcgccgataagtcacgggggcgccgctcacctgaccagggtctcacgtggccagccccctccgagaggggagaccagcgggccatgacaagctccaggctttggttttcgctgctgctggcggcagcgttcgcaggacgggcgacggccctctggccctggcctcagaacttccaaacctccgaccagcgctacgtcctttacccgaacaactttcaattccagtacgatgtcagctcggccgcgcagcccggctgctcagtcctcgacgaggccttccagcgctatcgtgacctgcttttcggttccgggtcttggccccgtccttacctcacagggaaacggcatacactggagaagaatgtgttggttgtctctgtagtcacacctggatgtaaccagcttcctactttggagtcagtggagaattataccctgaccataaatgatgaccagtgtttactcctctctgagactgtctggggagctctccgaggtctggagacttttagccagcttgtttggaaatctgctgagggcacattctttatcaacaagactgagattgaggactttccccgctttcctcaccggggcttgctgttggatacatctcgccattacctgccactctctagcatcctggacactctggatgtcatggcgtacaataaattgaacgtgttccactggcatctggtagatgatccttccttcccatatgagagcttcacttttccagagctcatgagaaaggggtcctacaaccctgtcacccacatctacacagcacaggatgtgaaggaggtcattgaatacgcacggctccggggtatccgtgtgcttgcagagtttgacactcctggccacactttgtcctggggaccaggtatccctggattactgactccttgctactctgggtctgagccctctggcacctttggaccagtgaatcccagtctcaataatacctatgagttcatgagcacattcttcttagaagtcagctctgtcttcccagatttttatcttcatcttggaggagatgaggttgatttcacctgctggaagtccaacccagagatccaggactttatgaggaagaaaggcttcggtgaggacttcaagcagctggagtccttctacatccagacgctgctggacatcgtctcttcttatggcaagggctatgtggtgtggcaggaggtgtttgataataaagtaaagattcagccagacacaatcatacaggtgtggcgagaggatattccagtgaactatatgaaggagctggaactggtcaccaaggccggcttccgggcccttctctctgccccctggtacctgaaccgtatatcctatggccctgactggaaggatttctacgtagtggaacccctggcatttgaaggtacccctgagcagaaggctctggtgattggtggagaggcttgtatgtggggagaatatgtggacaacacaaacctggtccccaggctctggtaagggttttcgggggggaggtggagggttgggcctgagagcaggagttctcccttagagacccaatcccatctagccacctctggactagtacccttctttcaggcctgagagagagcaggccgtgcaacgagccttctgaagatttgtgtgcaatattcactctccacatgacttccgtctatatccctccagctgccctttggtatgtgggatagggattgttaaccttacttcccagagagataatgaggcctggagaacataggtgagttgctcaagacccagcacaagcatccatgattcctgtaataaggcttccctctgctgttttcactgcagccttaccaagtatggttgggtgtgcaaagtttacattttaaggacctctgctgctgccactgtcattgtggttaatgatggctttaaggtttattcttattcccgtatctttgagagaggaagagagtgggattgctacccacattttaatgaaggtggagctgagccgtagaactctctgggagccatccaacctggctgtggctcataacaaggcccagagcaggggctgttgccgaaaggctgtggagcaacaagttgacatctgacctgacatttgcctatgaacgtttgtcacacttccgctgtgagttgctgaggcgaggtgtccaggcccaacccctcaatgtaggcttctgtgagcaggagtttgaacagacctgagccccaggcaccgaggagggtgctggctgtaggtgaatggtagtggagccaggcttccactgcatcctggccaggggacggagccccttgccttcgtgccccttgcctgcgtgcccctgtgcttggagagaaaggggccggtgctggcgctcgcattcaataaagagtaatgtggcatttttctataataaacatggattacctgtgtttaaaaaaaaaa

SEQ ID NO: 284981 - DNA, 2093 bp, Homo sapiens
tttttctgcttctgaagttacttcagcctggcaagtcctttacctccccgtaggcctggcgagctgcatcacaacattcaagattcaccctagagccatctgggaaactttcttctccaggtcgccctgcgtcctcgcctccccaccccgttcttctcgagtcgggtgagctgtctagttccatcacggccggcacggccgcaggggtggccggttatttactgctctactgggcccgtgagcagtctggcgagccgagcagttgccgacgcccggcacaatccgctgcacgtagcaggagcctcaggtccaggccggaagtgaaagggcagggtgtgggtcctcctggggtcgcaggcgcagagccgcctctggtcacgtgattcgccgataagtcacgggggcgccgctcacctgaccagggtctcacgtggccagccccctccgagaggggagaccagcgggccatgacaagctccaggctttggttttcgctgctgctggcggcagcgttcgcaggacgggcgacggccctctggccctggcctcagaacttccaaacctccgaccagcgctacgtcctttacccgaacaactttcaattccagtacgatgtcagctcggccgcgcagcccggctgctcagtcctcgacgaggccttccagcgctatcgtgacctgcttttcggttccgggtcttggccccgtccttacctcacagggaaacggcatacactggagaagaatgtgttggttgtctctgtagtcacacctggatgtaaccagcttcctactttggagtcagtggagaattataccctgaccataaatgatgaccagtgtttactcctctctgagactgtctggggagctctccgaggtctggagacttttagccagcttgtttggaaatctgctgagggcacattctttatcaacaagactgagattgaggactttccccgctttcctcaccggggcttgctgttggatacatctcgccattacctgccactctctagcatcctggacactctggatgtcatggcgtacaataaattgaacgtgttccactggcatctggtagatgatccttccttcccatatgagagcttcacttttccagagctcatgagaaaggggtcctacaaccctgtcacccacatctacacagcacaggatgtgaaggaggtcattgaatacgcacggctccggggtatccgtgtgcttgcagagtttgacactcctggccacactttgtcctggggaccaggtatccctggattactgactccttgctactctgggtctgagccctctggcacctttggaccagtgaatcccagtctcaataatacctatgagttcatgagcacattcttcttagaagtcagctctgtcttcccagatttttatcttcatcttggaggagatgaggttgatttcacctgctggaagtccaacccagagatccaggactttatgaggaagaaaggcttcggtgaggacttcaagcagctggagtccttctacatccagacgctgctggacatcgtctcttcttatggcaagggctatgtggtgtggcaggaggtgtttgataataaagtaaaggtacccctgagcagaaggctctggtgattggtggagaggcttgtatgtggggagaatatgtggacaacacaaacctggtccccaggctctggcccagagcaggggctgttgccgaaaggctgtggagcaacaagttgacatctgacctgacatttgcctatgaacgtttgtcacacttccgctgtgagttgctgaggcgaggtgtccaggcccaacccctcaatgtaggcttctgtgagcaggagtttgaacagacctgagccccaggcaccgaggagggtgctggctgtaggtgaatggtagtggagccaggcttccactgcatcctggccaggggacggagccccttgccttcgtgccccttgcctgcgtgcccctgtgcttggagagaaaggggccggtgctggcgctcgcattcaataaagagtaatgtggcatttttctataataaacatggattacctgtgtttaaaaaaaaaa

SEQ ID NO: 284982 - DNA, 2896 bp, Homo sapiens
tttttctgcttctgaagttacttcagcctggcaagtcctttacctccccgtaggcctggcgagctgcatcacaacattcaagattcaccctagagccatctgggaaactttcttctccaggtcgccctgcgtcctcgcctccccaccccgttcttctcgagtcgggtgagctgtctagttccatcacggccggcacggccgcaggggtggccggttatttactgctctactgggcccgtgagcagtctggcgagccgagcagttgccgacgcccggcacaatccgctgcacgtagcaggagcctcaggtccaggccggaagtgaaagggcagggtgtgggtcctcctggggtcgcaggcgcagagccgcctctggtcacgtgattcgccgataagtcacgggggcgccgctcacctgaccagggtctcacgtggccagccccctccgagaggggagaccagcgggccatgacaagctccaggctttggttttcgctgctgctggcggcagcgttcgcaggacgggcgacggccctctggccctggcctcagaacttccaaacctccgaccagcgctacgtcctttacccgaacaactttcaattccagtacgatgtcagctcggccgcgcagcccggctgctcagtcctcgacgaggccttccagcgctatcgtgacctgcttttcggttccgggtcttggccccgtccttacctcacagggaaacggcatacactggagaagaatgtgttggttgtctctgtagtcacacctggatgtaaccagcttcctactttggagtcagtggagaattataccctgaccataaatgatgaccagtgtttactcctctctgagactgtctggggagctctccgaggtctggagacttttagccagcttgtttggaaatctgctgagggcacattctttatcaacaagactgagattgaggactttccccgctttcctcaccggggcttgctgttggatacatctcgccattacctgccactctctagcatcctggacactctggatgtcatggcgtacaataaattgaacgtgttccactggcatctggtagatgatccttccttcccatatgagagcttcacttttccagagctcatgagaaaggggtcctacaaccctgtcacccacatctacacagcacaggatgtgaaggaggtcattgaatacgcacggctccggggtatccgtgtgcttgcagagtttgacactcctggccacactttgtcctggggaccaggtatccctggattactgactccttgctactctgggtctgagccctctggcacctttggaccagtgaatcccagtctcaataatacctatgagttcatgagcacattcttcttagaagtcagctctgtcttcccagatttttatcttcatcttggaggagatgaggttgatttcacctgctggaagtccaacccagagatccaggactttatgaggaagaaaggcttcggtgaggacttcaagcagctggagtccttctacatccagacgctgctggacatcgtctcttcttatggcaagggctatgtggtgtggcaggaggtgtttgataataaagtaaagattcagccagacacaatcatacaggtgtggcgagaggatattccagtgaactatatgaaggagctggaactggtcaccaaggccggcttccgggcccttctctctgccccctggtacctgaaccgtatatcctatggccctgactggaaggatttctacgtagtggaacccctggcatttgaaggtacccctgagcagaaggctctggtgattggtggagaggcttgtatgtggggagaatatgtggacaacacaaacctggtccccaggctctggtaagggttttcgggggggaggtggagggttgggcctgagagcaggagttctcccttagagacccaatcccatctagccacctctggactagtacccttctttcaggcctgagagagagcaggccgtgcaacgagccttctgaagatttgtgtgcaatattcactctccacatgacttccgtctatatccctccagctgccctttggtatgtgggatagggattgttaaccttacttcccagagagataatgaggcctggagaacataggtgagttgctcaagacccagcacaagcatccatgattcctgtaataaggcttccctctgctgttttcactgcagccttaccaagtatggttgggtgtgcaaagtttacattttaaggacctctgctgctgccactgtcattgtggttaatgatggctttaaggtttattcttattcccgtatctttgagagaggaagagagtgggattgctacccacattttaatgaaggtggagctgagccgtagaactctctgggagccatccaacctggctgtggctcataacaaggtattgatcacttcctttggcctgagtgagtccagggtgcctagacaagaggtagcagcctgtggatgtccagcacctttgcagggaatacagggcccaatctggcacatgccccttttcctccagggcccagagcaggggctgttgccgaaaggctgtggagcaacaagttgacatctgacctgacatttgcctatgaacgtttgtcacacttccgctgtgagttgctgagggtaagcaagctgtggggccttcgcaaggcggagcaggccagatccagggctggggaaccccttagagagaggaagacaataattaacaatagctaacacttacagaggcttatagtcagccctcatccacggattcaaccaactgcgataaaaagtattcaggaaaaaaaaaatacaacaaaaaatggtacaaataaaaaatactgtataacaacta

SEQ ID NO: 284983 - DNA, 2186 bp, Homo sapiens
tttttctgcttctgaagttacttcagcctggcaagtcctttacctccccgtaggcctggcgagctgcatcacaacattcaagattcaccctagagccatctgggaaactttcttctccaggtcgccctgcgtcctcgcctccccaccccgttcttctcgagtcgggtgagctgtctagttccatcacggccggcacggccgcaggggtggccggttatttactgctctactgggcccgtgagcagtctggcgagccgagcagttgccgacgcccggcacaatccgctgcacgtagcaggagcctcaggtccaggccggaagtgaaagggcagggtgtgggtcctcctggggtcgcaggcgcagagccgcctctggtcacgtgattcgccgataagtcacgggggcgccgctcacctgaccagggtctcacgtggccagccccctccgagaggggagaccagcgggccatgacaagctccaggctttggttttcgctgctgctggcggcagcgttcgcaggacgggcgacggccctctggccctggcctcagaacttccaaacctccgaccagcgctacgtcctttacccgaacaactttcaattccagtacgatgtcagctcggccgcgcagcccggctgctcagtcctcgacgaggccttccagcgctatcgtgacctgcttttcggttccgggtcttggccccgtccttacctcacagggaaacggcatacactggagaagaatgtgttggttgtctctgtagtcacacctggatgtaaccagcttcctactttggagtcagtggagaattataccctgaccataaatgatgaccagtgtttactcctctctgagactgtctggggagctctccgaggtctggagacttttagccagcttgtttggaaatctgctgagggcacattctttatcaacaagactgagattgaggactttccccgctttcctcaccggggcttgctgttggatacatctcgccattacctgccactctctagcatcctggacactctggatgtcatggcgtacaataaattgaacgtgttccactggcatctggtagatgatccttccttcccatatgagagcttcacttttccagagctcatgagaaaggggtcctacaaccctgtcacccacatctacacagcacaggatgtgaaggaggtcattgaatacgcacggctccggggtatccgtgtgcttgcagagtttgacactcctggccacactttgtcctggggaccaggtatccctggattactgactccttgctactctgggtctgagccctctggcacctttggaccagtgaatcccagtctcaataatacctatgagttcatgagcacattcttcttagaagtcagctctgtcttcccagatttttatcttcatcttggaggagatgaggttgatttcacctgctggaagtccaacccagagatccaggactttatgaggaagaaaggcttcggtgaggacttcaagcagctggagtccttctacatccagacgctgctggacatcgtctcttcttatggcaagggctatgtggtgtggcaggaggtgtttgataataaagtaaagattcagccagacacaatcatacaggtgtggcgagaggatattccagtgaactatatgaaggagctggaactggtcaccaaggccggcttccgggcccttctctctgccccctggtacctgaaccgtatatcctatggccctgactggaaggatttctacgtagtggaacccctggcatttgaaggcccagagcaggggctgttgccgaaaggctgtggagcaacaagttgacatctgacctgacatttgcctatgaacgtttgtcacacttccgctgtgagttgctgaggcgaggtgtccaggcccaacccctcaatgtaggcttctgtgagcaggagtttgaacagacctgagccccaggcaccgaggagggtgctggctgtaggtgaatggtagtggagccaggcttccactgcatcctggccaggggacggagccccttgccttcgtgccccttgcctgcgtgcccctgtgcttggagagaaaggggccggtgctggcgctcgcattcaataaagagtaatgtggcatttttctataataaacatggattacctgtgtttaaaaaaaaaa

SEQ ID NO: 284984 - DNA, 2211 bp, Homo sapiens
tttttctgcttctgaagttacttcagcctggcaagtcctttacctccccgtaggcctggcgagctgcatcacaacattcaagattcaccctagagccatctgggaaactttcttctccaggtcgccctgcgtcctcgcctccccaccccgttcttctcgagtcgggtgagctgtctagttccatcacggccggcacggccgcaggggtggccggttatttactgctctactgggcccgtgagcagtctggcgagccgagcagttgccgacgcccggcacaatccgctgcacgtagcaggagcctcaggtccaggccggaagtgaaagggcagggtgtgggtcctcctggggtcgcaggcgcagagccgcctctggtcacgtgattcgccgataagtcacgggggcgccgctcacctgaccagggtctcacgtggccagccccctccgagaggggagaccagcgggccatgacaagctccaggctttggttttcgctgctgctggcggcagcgttcgcaggacgggcgacggccctctggccctggcctcagaacttccaaacctccgaccagcgctacgtcctttacccgaacaactttcaattccagtacgatgtcagctcggccgcgcagcccggctgctcagtcctcgacgaggccttccagcgctatcgtgacctgcttttcggttccgggtcttggccccgtccttacctcacagggaaacggcatacactggagaagaatgtgttggttgtctctgtagtcacacctggatgtaaccagcttcctactttggagtcagtggagaattataccctgaccataaatgatgaccagtgtttactcctctctgagactgtctggggagctctccgaggtctggagacttttagccagcttgtttggaaatctgctgagggcacattctttatcaacaagactgagattgaggactttccccgctttcctcaccggggcttgctgttggatacatctcgccattacctgccactctctagcatcctggacactctggatgtcatggcgtacaataaattgaacgtgttccactggcatctggtagatgatccttccttcccatatgagagcttcacttttccagagctcatgagaaaggggtcctacaaccctgtcacccacatctacacagcacaggatgtgaaggaggtcattgaatacgcacggctccggggtatccgtgtgcttgcagagtttgacactcctggccacactttgtcctggggaccaggtatccctggattactgactccttgctactctgggtctgagccctctggcacctttggaccagtgaatcccagtctcaataatacctatgagttcatgagcacattcttcttagaagtcagctctgtcttcccagatttttatcttcatcttggaggagatgaggttgatttcacctgctggaagtccaacccagagatccaggactttatgaggaagaaaggcttcggtgaggacttcaagcagctggagtccttctacatccagacgctgctggacatcgtctcttcttatggcaagggctatgtggtgtggcaggaggtgtttgataataaagtaaagattcagccagacacaatcatacaggtgtggcgagaggatattccagtgaactatatgaaggagctggaactggtcaccaaggccggcttccgggcccttctctctgccccctggtacctgaaccgtatatcctatggccctgactggaaggatttctacgtagtggaacccctggcatttgaaggtacccctgagcagaaggctctggtgattggtggagaggcttgtatgtggggagaatatgtggacaacacaaacctggtccccaggctctggcccagagcaggggctgttgccgaaaggctgtggagcaacaagttgacatctgacctgacatttgcctatgaacgtttgtcacacttccgctgtgagttgctgagggtaagcaagctgtggggccttcgcaaggcggagcaggccagatccagggctggggaaccccttagagagaggaagacaataattaacaatagctaacacttacagaggcttatagtcagccctcatccacggattcaaccaactgcgataaaaagtattcaggaaaaaaaaaatacaacaaaaaatggtacaaataaaaaatactgtataacaacta

SEQ ID NO: 284985 - DNA, 1834 bp, Homo sapiens
tttttctgcttctgaagttacttcagcctggcaagtcctttacctccccgtaggcctggcgagctgcatcacaacattcaagattcaccctagagccatctgggaaactttcttctccaggtcgccctgcgtcctcgcctccccaccccgttcttctcgagtcggtacgatgtcagctcggccgcgcagcccggctgctcagtcctcgacgaggccttccagcgctatcgtgacctgcttttcggttccgggtcttggccccgtccttacctcacagggaaacggcatacactggagaagaatgtgttggttgtctctgtagtcacacctggatgtaaccagcttcctactttggagtcagtggagaattataccctgaccataaatgatgaccagtgtttactcctctctgagactgtctggggagctctccgaggtctggagacttttagccagcttgtttggaaatctgctgagggcacattctttatcaacaagactgagattgaggactttccccgctttcctcaccggggcttgctgttggatacatctcgccattacctgccactctctagcatcctggacactctggatgtcatggcgtacaataaattgaacgtgttccactggcatctggtagatgatccttccttcccatatgagagcttcacttttccagagctcatgagaaaggggtcctacaaccctgtcacccacatctacacagcacaggatgtgaaggaggtcattgaatacgcacggctccggggtatccgtgtgcttgcagagtttgacactcctggccacactttgtcctggggaccaggtatccctggattactgactccttgctactctgggtctgagccctctggcacctttggaccagtgaatcccagtctcaataatacctatgagttcatgagcacattcttcttagaagtcagctctgtcttcccagatttttatcttcatcttggaggagatgaggttgatttcacctgctggaagtccaacccagagatccaggactttatgaggaagaaaggcttcggtgaggacttcaagcagctggagtccttctacatccagacgctgctggacatcgtctcttcttatggcaagggctatgtggtgtggcaggaggtgtttgataataaagtaaagattcagccagacacaatcatacaggtgtggcgagaggatattccagtgaactatatgaaggagctggaactggtcaccaaggccggcttccgggcccttctctctgccccctggtacctgaaccgtatatcctatggccctgactggaaggatttctacgtagtggaacccctggcatttgaaggtacccctgagcagaaggctctggtgattggtggagaggcttgtatgtggggagaatatgtggacaacacaaacctggtccccaggctctggcccagagcaggggctgttgccgaaaggctgtggagcaacaagttgacatctgacctgacatttgcctatgaacgtttgtcacacttccgctgtgagttgctgaggcgaggtgtccaggcccaacccctcaatgtaggcttctgtgagcaggagtttgaacagacctgagccccaggcaccgaggagggtgctggctgtaggtgaatggtagtggagccaggcttccactgcatcctggccaggggacggagccccttgccttcgtgccccttgcctgcgtgcccctgtgcttggagagaaaggggccggtgctggcgctcgcattcaataaagagtaatgtggcatttttctataataaacatggattacctgtgtttaaaaaaaaaa

SEQ ID NO: 284986 - DNA, 2769 bp, Homo sapiens
tttttctgcttctgaagttacttcagcctggcaagtcctttacctccccgtaggcctggcgagctgcatcacaacattcaagattcaccctagagccatctgggaaactttcttctccaggtcgccctgcgtcctcgcctccccaccccgttcttctcgagtcgggtgagctgtctagttccatcacggccggcacggccgcaggggtggccggttatttactgctctactgggcccgtgagcagtctggcgagccgagcagttgccgacgcccggcacaatccgctgcacgtagcaggagcctcaggtccaggccggaagtgaaagggcagggtgtgggtcctcctggggtcgcaggcgcagagccgcctctggtcacgtgattcgccgataagtcacgggggcgccgctcacctgaccagggtctcacgtggccagccccctccgagaggggagaccagcgggccatgacaagctccaggctttggttttcgctgctgctggcggcagcgttcgcaggacgggcgacggccctctggccctggcctcagaacttccaaacctccgaccagcgctacgtcctttacccgaacaactttcaattccagtacgatgtcagctcggccgcgcagcccggctgctcagtcctcgacgaggccttccagcgctatcgtgacctgcttttcggttccgggtcttggccccgtccttacctcacagggaaacggcatacactggagaagaatgtgttggttgtctctgtagtcacacctggatgtaaccagcttcctactttggagtcagtggagaattataccctgaccataaatgatgaccagtgtttactcctctctgagactgtctggggagctctccgaggtctggagacttttagccagcttgtttggaaatctgctgagggcacattctttatcaacaagactgagattgaggactttccccgctttcctcaccggggcttgctgttggatacatctcgccattacctgccactctctagcatcctggacactctggatgtcatggcgtacaataaattgaacgtgttccactggcatctggtagatgatccttccttcccatatgagagcttcacttttccagagctcatgagaaaggggtcctacaaccctgtcacccacatctacacagcacaggatgtgaaggaggtcattgaatacgcacggctccggggtatccgtgtgcttgcagagtttgacactcctggccacactttgtcctggggaccaggtatccctggattactgactccttgctactctgggtctgagccctctggcacctttggaccagtgaatcccagtctcaataatacctatgagttcatgagcacattcttcttagaagtcagctctgtcttcccagatttttatcttcatcttggaggagatgaggttgatttcacctgctggaagtccaacccagagatccaggactttatgaggaagaaaggcttcggtgaggacttcaagcagctggagtccttctacatccagacgctgctggacatcgtctcttcttatggcaagggctatgtggtgtggcaggaggtgtttgataataaagtaaagattcagccagacacaatcatacaggtgtggcgagaggatattccagtgaactatatgaaggagctggaactggtcaccaaggccggcttccgggcccttctctctgccccctggtacctgaaccgtatatcctatggccctgactggaaggatttctacgtagtggaacccctggcatttgaaggtacccctgagcagaaggctctggtgattggtggagaggcttgtatgtggggagaatatgtggacaacacaaacctggtccccaggctctggtaagggttttcgggggggaggtggagggttgggcctgagagcaggagttctcccttagagacccaatcccatctagccacctctggactagtacccttctttcaggcctgagagagagcaggccgtgcaacgagccttctgaagatttgtgtgcaatattcactctccacatgacttccgtctatatccctccagctgccctttggtatgtgggatagggattgttaaccttacttcccagagagataatgaggcctggagaacataggtgagttgctcaagacccagcacaagcatccatgattcctgtaataaggcttccctctgctgttttcactgcagccttaccaagtatggttgggtgtgcaaagtttacattttaaggacctctgctgctgccactgtcattgtggttaatgatggctttaaggtttattcttattcccgtatctttgagagaggaagagagtgggattgctacccacattttaatgaaggtggagctgagccgtagaactctctgggagccatccaacctggctgtggctcataacaaggcccagagcaggggctgttgccgaaaggctgtggagcaacaagttgacatctgacctgacatttgcctatgaacgtttgtcacacttccgctgtgagttgctgagggtaagcaagctgtggggccttcgcaaggcggagcaggccagatccagggctggggaaccccttagagagaggaagacaataattaacaatagctaacacttacagaggcttatagtcagccctcatccacggattcaaccaactgcgataaaaagtattcaggaaaaaaaaaatacaacaaaaaatggtacaaataaaaaatactgtataacaacta

SEQ ID NO: 284987 - DNA, 3034 bp, Homo sapiens
tttttctgcttctgaagttacttcagcctggcaagtcctttacctccccgtaggcctggcgagctgcatcacaacattcaagattcaccctagagccatctgggaaactttcttctccaggtcgccctgcgtcctcgcctccccaccccgttcttctcgagtcgggtgagctgtctagttccatcacggccggcacggccgcaggggtggccggttatttactgctctactgggcccgtgagcagtctggcgagccgagcagttgccgacgcccggcacaatccgctgcacgtagcaggagcctcaggtccaggccggaagtgaaagggcagggtgtgggtcctcctggggtcgcaggcgcagagccgcctctggtcacgtgattcgccgataagtcacgggggcgccgctcacctgaccagggtctcacgtggccagccccctccgagaggggagaccagcgggccatgacaagctccaggctttggttttcgctgctgctggcggcagcgttcgcaggacgggcgacggccctctggccctggcctcagaacttccaaacctccgaccagcgctacgtcctttacccgaacaactttcaattccagtacgatgtcagctcggccgcgcagcccggctgctcagtcctcgacgaggccttccagcgctatcgtgacctgcttttcggttccgggtcttggccccgtccttacctcacagggaaacggcatacactggagaagaatgtgttggttgtctctgtagtcacacctggatgtaaccagcttcctactttggagtcagtggagaattataccctgaccataaatgatgaccagtgtttactcctctctgagactgtctggggagctctccgaggtctggagacttttagccagcttgtttggaaatctgctgagggcacattctttatcaacaagactgagattgaggactttccccgctttcctcaccggggcttgctgttggatacatctcgccattacctgccactctctagcatcctggacactctggatgtcatggcgtacaataaattgaacgtgttccactggcatctggtagatgatccttccttcccatatgagagcttcacttttccagagctcatgagaaaggggtcctacaaccctgtcacccacatctacacagcacaggatgtgaaggaggtcattgaatacgcacggctccggggtatccgtgtgcttgcagagtttgacactcctggccacactttgtcctggggaccaggtatccctggattactgactccttgctactctgggtctgagccctctggcacctttggaccagtgaatcccagtctcaataatacctatgagttcatgagcacattcttcttagaagtcagctctgtcttcccagatttttatcttcatcttggaggagatgaggttgatttcacctgctggaagtccaacccagagatccaggactttatgaggaagaaaggcttcggtgaggacttcaagcagctggagtccttctacatccagacgctgctggacatcgtctcttcttatggcaagggctatgtggtgtggcaggaggtgtttgataataaagtaaagattcagccagacacaatcatacaggtgtggcgagaggatattccagtgaactatatgaaggagctggaactggtcaccaaggccggcttccgggcccttctctctgccccctggtacctgaaccgtatatcctatggccctgactggaaggatttctacgtagtggaacccctggcatttgaaggtacccctgagcagaaggctctggtgattggtggagaggcttgtatgtggggagaatatgtggacaacacaaacctggtccccaggctctggtaagggttttcgggggggaggtggagggttgggcctgagagcaggagttctcccttagagacccaatcccatctagccacctctggactagtacccttctttcaggcctgagagagagcaggccgtgcaacgagccttctgaagatttgtgtgcaatattcactctccacatgacttccgtctatatccctccagctgccctttggtatgtgggatagggattgttaaccttacttcccagagagataatgaggcctggagaacataggtgagttgctcaagacccagcacaagcatccatgattcctgtaataaggcttccctctgctgttttcactgcagccttaccaagtatggttgggtgtgcaaagtttacattttaaggacctctgctgctgccactgtcattgtggttaatgatggctttaaggtttattcttattcccgtatctttgagagaggaagagagtgggattgctacccacattttaatgaaggtggagctgagccgtagaactctctgggagccatccaacctggctgtggctcataacaaggtattgatcacttcctttggcctgagtgagtccagggtgcctagacaagaggtagcagcctgtggatgtccagcacctttgcagggaatacagggcccaatctggcacatgccccttttcctccagggcccagagcaggggctgttgccgaaaggctgtggaccatcgttgcaacgatggtcctcagctggggtaatggatgtataacacctctctgcactgtttatgagtctataattaaaaagcagggccttggcaacagagttgtgttgaatcccccattaccccagctgagaggtgactttttcctcctggcatttaacgtaattcttaactacctatttgctctgtgcctttctcccccaggagaaagcagaagctgagtctgttttgttcactgctaaattctctgtctcctaacacagtgtgtggcacctgtgttttgaagtcagatgtttgggtgaaagaatagttatggacacaggtgacttaaattctctcaggcggtctgcagttaggtcatacctccctgtcaggacgatgggagaattaaatgtgtataatgtagctaaactgagaccatcgttg

SEQ ID NO: 284988 - DNA, 2773 bp, Homo sapiens
tttttctgcttctgaagttacttcagcctggcaagtcctttacctccccgtaggcctggcgagctgcatcacaacattcaagattcaccctagagccatctgggaaactttcttctccaggtcgccctgcgtcctcgcctccccaccccgttcttctcgagtcgggtgagctgtctagttccatcacggccggcacggccgcaggggtggccggttatttactgctctactgggcccgtgagcagtctggcgagccgagcagttgccgacgcccggcacaatccgctgcacgtagcaggagcctcaggtccaggccggaagtgaaagggcagggtgtgggtcctcctggggtcgcaggcgcagagccgcctctggtcacgtgattcgccgataagtcacgggggcgccgctcacctgaccagggtctcacgtggccagccccctccgagaggggagaccagcgggccatgacaagctccaggctttggttttcgctgctgctggcggcagcgttcgcaggacgggcgacggccctctggccctggcctcagaacttccaaacctccgaccagcgctacgtcctttacccgaacaactttcaattccagtacgatgtcagctcggccgcgcagcccggctgctcagtcctcgacgaggccttccagcgctatcgtgacctgcttttcggttccgggtcttggccccgtccttacctcacagggaaacggcatacactggagaagaatgtgttggttgtctctgtagtcacacctggatgtaaccagcttcctactttggagtcagtggagaattataccctgaccataaatgatgaccagtgtttactcctctctgagactgtctggggagctctccgaggtctggagacttttagccagcttgtttggaaatctgctgagggcacattctttatcaacaagactgagattgaggactttccccgctttcctcaccggggcttgctgttggatacatctcgccattacctgccactctctagcatcctggacactctggatgtcatggcgtacaataaattgaacgtgttccactggcatctggtagatgatccttccttcccatatgagagcttcacttttccagagctcatgagaaaggggtcctacaaccctgtcacccacatctacacagcacaggatgtgaaggaggtcattgaatacgcacggctccggggtatccgtgtgcttgcagagtttgacactcctggccacactttgtcctggggaccaggtatccctggattactgactccttgctactctgggtctgagccctctggcacctttggaccagtgaatcccagtctcaataatacctatgagttcatgagcacattcttcttagaagtcagctctgtcttcccagatttttatcttcatcttggaggagatgaggttgatttcacctgctggaagtccaacccagagatccaggactttatgaggaagaaaggcttcggtgaggacttcaagcagctggagtccttctacatccagacgctgctggacatcgtctcttcttatggcaagggctatgtggtgtggcaggaggtgtttgataataaagtaaagattcagccagacacaatcatacaggtgtggcgagaggatattccagtgaactatatgaaggagctggaactggtcaccaaggccggcttccgggcccttctctctgccccctggtacctgaaccgtatatcctatggccctgactggaaggatttctacgtagtggaacccctggcatttgaaggtacccctgagcagaaggctctggtgattggtggagaggcttgtatgtggggagaatatgtggacaacacaaacctggtccccaggctctggtaagggttttcgggggggaggtggagggttgggcctgagagcaggagttctcccttagagacccaatcccatctagccacctctggactagtacccttctttcaggcctgagagagagcaggccgtgcaacgagccttctgaagatttgtgtgcaatattcactctccacatgacttccgtctatatccctccagctgccctttggtatgtgggatagggattgttaaccttacttcccagagagataatgaggcctggagaacataggtgagttgctcaagacccagcacaagcatccatgattcctgtaataaggcttccctctgctgttttcactgcagccttaccaagtatggttgggtgtgcaaagtttacattttaaggacctctgctgctgccactgtcattgtggttaatgatggctttaaggtttattcttattcccgtatctttgagagaggaagagagtgggattgctacccacattttaatgaaggtggagctgagccgtagaactctctgggagccatccaacctggctgtggctcataacaaggtattgatcacttcctttggcctgagtgagtccagggtgcctagacaagaggtagcagcctgtggatgtccagcacctttgcagggaatacagggcccaatctggcacatgccccttttcctccagggcccagagcaggggctgttgccgaaaggctgtggagcaacaagttgacatctgacctgacatttgcctatgaacgtttgtcacacttccgctgtgagttgctgaggctgcaagggagacgaatgtgtctgaggctcaggggtaagaaagtggttaaagacaccgaagacagagatgtgtgatggggcggggtgggattgg

SEQ ID NO: 284989 - DNA, 2067 bp, Homo sapiens
tttttctgcttctgaagttacttcagcctggcaagtcctttacctccccgtaggcctggcgagctgcatcacaacattcaagattcaccctagagccatctgggaaactttcttctccaggtcgccctgcgtcctcgcctccccaccccgttcttctcgagtcgggtgagctgtctagttccatcacggccggcacggccgcaggggtggccggttatttactgctctactgggcccgtgagcagtctggcgagccgagcagttgccgacgcccggcacaatccgctgcacgtagcaggagcctcaggtccaggccggaagtgaaagggcagggtgtgggtcctcctggggtcgcaggcgcagagccgcctctggtcacgtgattcgccgataagtcacgggggcgccgctcacctgaccagggtctcacgtggccagccccctccgagaggggagaccagcgggccatgacaagctccaggctttggttttcgctgctgctggcggcagcgttcgcaggacgggcgacggccctctggccctggcctcagaacttccaaacctccgaccagcgctacgtcctttacccgaacaactttcaattccagtacgatgtcagctcggccgcgcagcccggctgctcagtcctcgacgaggccttccagcgctatcgtgacctgcttttcggttccgggtcttggccccgtccttacctcacagggaaacggcatacactggagaagaatgtgttggttgtctctgtagtcacacctggatgtaaccagcttcctactttggagtcagtggagaattataccctgaccataaatgatgaccagtgtttactcctctctgagactgtctggggagctctccgaggtctggagacttttagccagcttgtttggaaatctgctgagggcacattctttatcaacaagactgagattgaggactttccccgctttcctcaccggggcttgctgttggatacatctcgccattacctgccactctctagcatcctggacactctggatgtcatggcgtacaataaattgaacgtgttccactggcatctggtagatgatccttccttcccatatgagagcttcacttttccagagctcatgagaaaggggtcctacaaccctgtcacccacatctacacagcacaggatgtgaaggaggtcattgaatacgcacggctccggggtatccgtgtgcttgcagagtttgacactcctggccacactttgtcctggggaccaggtatccctggattactgactccttgctactctgggtctgagccctctggcacctttggaccagtgaatcccagtctcaataatacctatgagttcatgagcacattcttcttagaagtcagctctgtcttcccagatttttatcttcatcttggaggagatgaggttgatttcacctgctggaagtccaacccagagatccaggactttatgaggaagaaaggcttcggtgaggacttcaagcagctggagtccttctacatccagacgctgctggacatcgtctcttcttatggcaagggctatgtggtgtggcaggaggtgtttgataataaagtaaagattcagccagacacaatcatacaggtgtggcgagaggatattccagtgaactatatgaaggagctggaactggtcaccaaggccggcttccgggcccttctctctgccccctggtacctgaaccgtatatcctatgaacgtttgtcacacttccgctgtgagttgctgaggcgaggtgtccaggcccaacccctcaatgtaggcttctgtgagcaggagtttgaacagacctgagccccaggcaccgaggagggtgctggctgtaggtgaatggtagtggagccaggcttccactgcatcctggccaggggacggagccccttgccttcgtgccccttgcctgcgtgcccctgtgcttggagagaaaggggccggtgctggcgctcgcattcaataaagagtaatgtggcatttttctataataaacatggattacctgtgtttaaaaaaaaaa

SEQ ID NO: 284990 - DNA, 1724 bp, Homo sapiens
  misc_feature (1619)..(1619): n is a, c, g, or t
  misc_feature (1623)..(1623): n is a, c, g, or t
tttttctgcttctgaagttacttcagcctggcaagtcctttacctccccgtaggcctggcgagctgcatcacaacattcaagattcaccctagagccatctgggaaactttcttctccaggtcgccctgcgtcctcgcctccccaccccgttcttctcgagtcgggtgagctgtctagttccatcacggccggcacggccgcaggggtggccggttatttactgctctactgggcccgtgagcagtctggcgagccgagcagttgccgacgcccggcacaatccgctgcacgtagcaggagcctcaggtccaggccggaagtgaaagggcagggtgtgggtcctcctggggtcgcaggcgcagagccgcctctggtcacgtgattcgccgataagtcacgggggcgccgctcacctgaccagggtctcacgtggccagccccctccgagaggggagaccagcgggccatgacaagctccaggctttggttttcgctgctgctggcggcagcgttcgcaggacgggcgacggccctctggccctggcctcagaacttccaaacctccgaccagcgctacgtcctttacccgaacaactttcaattccagtacgatgtcagctcggccgcgcagcccggctgctcagtcctcgacgaggccttccagcgctatcgtgacctgcttttcggttccgggtcttggccccgtccttacctcacagggaaacggcatacactggagaagaatgtgttggttgtctctgtagtcacacctggatgtaaccagcttcctactttggagtcagtggagaattataccctgaccataaatgatgaccagtgtttactcctctctgagactgtctggggagctctccgaggtctggagacttttagccagcttgtttggaaatctgctgagggcacattctttatcaacaagactgagattgaggactttccccgctttcctcaccggggcttgctgttggatacatctcgccattacctgccactctctagcatcctggacactctggatgtcatggcgtacaataaattgaacgtgttccactggcatctggtagatgatccttccttcccatatgagagcttcacttttccagagctcatgagaaaggggtcctacaaccctgtcacccacatctacacagcacaggatgtgaaggaggtcattgaatacgcacggctccggggtatccgtgtgcttgcagagtttgacactcctggccacactttgtcctggggaccaggtatccctggattactgactccttgctactctgggtctgagccctctggcacctttggaccagtgaatcccagtctcaataatacctatgagttcatgagcacattcttcttagaagtcagctctgtcttcccagatttttatcttcatcttggaggagatgaggttgatttcacctgctggaagtccaacccagagatccaggactttatgaggaagaaaggcttcggtgaggacttcaagcagctggagtccttctacatccagacgctgctggacatcgtctcttcttatggcaagggctatgtggtgtggcaggaggtgtttgataataaagtaaaggattcnggcnaccatctacgggtgggaggattccggacaattaggagggaggccagcgcgtcggccttttgcccggagaaggaacaagcgaggggaaaaaccccatgcccc

SEQ ID NO: 284991 - DNA, 1796 bp, Homo sapiens
tttttctgcttctgaagttacttcagcctggcaagtcctttacctccccgtaggcctggcgagctgcatcacaacattcaagattcaccctagagccatctgggaaactttcttctccaggtcgccctgcgtcctcgcctccccaccccgttcttctcgagtcgggtgagctgtctagttccatcacggccggcacggccgcaggggtggccggttatttactgctctactgggcccgtgagcagtctggcgagccgagcagttgccgacgcccggcacaatccgctgcacgtagcaggagcctcaggtccaggccggaagtgaaagggcagggtgtgggtcctcctggggtcgcaggcgcagagccgcctctggtcacgtgattcgccgataagtcacgggggcgccgctcacctgaccagggtctcacgtggccagccccctccgagaggggagaccagcgggccatgacaagctccaggctttggttttcgctgctgctggcggcagcgttcgcaggacgggcgacggccctctggccctggcctcagaacttccaaacctccgaccagcgctacgtcctttacccgaacaactttcaattccagtacgatgtcagctcggccgcgcagcccggctgctcagtcctcgacgaggccttccagcgctatcgtgacctgcttttcggttccgggtcttggccccgtccttacctcacagggaaacggcatacactggagaagaatgtgttggttgtctctgtagtcacacctggatgtaaccagcttcctactttggagtcagtggagaattataccctgaccataaatgatgaccagtgtttactcctctctgagactgtctggggagctctccgaggtctggagacttttagccagcttgtttggaaatctgctgagggcacattctttatcaacaagactgagattgaggactttccccgctttcctcaccggggcttgctgttggatacatctcgccattacctgccactctctagcatcctggacactctggatgtcatggcgtacaataaattgaacgtgttccactggcatctggtagatgatccttccttcccatatgagagcttcacttttccagagctcatgagaaaggggtcctacaaccctgtcacccacatctacacagcacaggatgtgaaggaggtcattgaatacgcacggctccggggtatccgtgtgcttgcagagtttgacactcctggccacactttgtcctggggaccaggtatccctggattactgactccttgctactctgggtctgagccctctggcacctttggaccagtgaatcccagtctcaataatacctatgagttcatgagcacattcttcttagaagtcagctctgtcttcccaggcccagagcaggggctgttgccgaaaggctgtggagcaacaagttgacatctgacctgacatttgcctatgaacgtttgtcacacttccgctgtgagttgctgaggcgaggtgtccaggcccaacccctcaatgtaggcttctgtgagcaggagtttgaacagacctgagccccaggcaccgaggagggtgctggctgtaggtgaatggtagtggagccaggcttccactgcatcctggccaggggacggagccccttgccttcgtgccccttgcctgcgtgcccctgtgcttggagagaaaggggccggtgctggcgctcgcattcaataaagagtaatgtggcatttttctataataaacatggattacctgtgtttaaaaaaaaaa

SEQ ID NO: 284992 - DNA, 2230 bp, Homo sapiens
tttttctgcttctgaagttacttcagcctggcaagtcctttacctccccgtaggcctggcgagctgcatcacaacattcaagattcaccctagagccatctgggaaactttcttctccaggtcgccctgcgtcctcgcctccccaccccgttcttctcgagtcgggtgagctgtctagttccatcacggccggcacggccgcaggggtggccggttatttactgctctactgggcccgtgagcagtctggcgagccgagcagttgccgacgcccggcacaatccgctgcacgtagcaggagcctcaggtccaggccggaagtgaaagggcagggtgtgggtcctcctggggtcgcaggcgcagagccgcctctggtcacgtgattcgccgataagtcacgggggcgccgctcacctgaccagggtctcacgtggccagccccctccgagaggggagaccagcgggccatgacaagctccaggctttggttttcgctgctgctggcggcagcgttcgcaggacgggcgacggccctctggccctggcctcagaacttccaaacctccgaccagcgctacgtcctttacccgaacaactttcaattccagtacgatgtcagctcggccgcgcagcccggctgctcagtcctcgacgaggccttccagcgctatcgtgacctgcttttcggttccgggtcttggccccgtccttacctcacagggaaacggcatacactggagaagaatgtgttggttgtctctgtagtcacacctggatgtaaccagcttcctactttggagtcagtggagaattataccctgaccataaatgatgaccagtgtttactcctctctgagactgtctggggagctctccgagttctttatcaacaagactgagattgaggactttccccgctttcctcaccggggcttgctgttggatacatctcgccattacctgccactctctagcatcctggacactctggatgtcatggcgtacaataaattgaacgtgttccactggcatctggtagatgatccttccttcccatatgagagcttcacttttccagagctcatgagaaaggggtcctacaaccctgtcacccacatctacacagcacaggatgtgaaggaggtcattgaatacgcacggctccggggtatccgtgtgcttgcagagtttgacactcctggccacactttgtcctggggaccaggtatccctggattactgactccttgctactctgggtctgagccctctggcacctttggaccagtgaatcccagtctcaataatacctatgagttcatgagcacattcttcttagaagtcagctctgtcttcccagatttttatcttcatcttggaggagatgaggttgatttcacctgctggaagtccaacccagagatccaggactttatgaggaagaaaggcttcggtgaggacttcaagcagctggagtccttctacatccagacgctgctggacatcgtctcttcttatggcaagggctatgtggtgtggcaggaggtgtttgataataaagtaaagattcagccagacacaatcatacaggtgtggcgagaggatattccagtgaactatatgaaggagctggaactggtcaccaaggccggcttccgggcccttctctctgccccctggtacctgaaccgtatatcctatggccctgactggaaggatttctacgtagtggaacccctggcatttgaaggtacccctgagcagaaggctctggtgattggtggagaggcttgtatgtggggagaatatgtggacaacacaaacctggtccccaggctctggcccagagcaggggctgttgccgaaaggctgtggagcaacaagttgacatctgacctgacatttgcctatgaacgtttgtcacacttccgctgtgagttgctgaggcgaggtgtccaggcccaacccctcaatgtaggcttctgtgagcaggagtttgaacagacctgagccccaggcaccgaggagggtgctggctgtaggtgaatggtagtggagccaggcttccactgcatcctggccaggggacggagccccttgccttcgtgccccttgcctgcgtgcccctgtgcttggagagaaaggggccggtgctggcgctcgcattcaataaagagtaatgtggcatttttctataataaacatggattacctgtgtttaaaaaaaaaa

SEQ ID NO: 284993 - DNA, 1954 bp, Homo sapiens
tttttctgcttctgaagttacttcagcctggcaagtcctttacctccccgtaggcctggcgagctgcatcacaacattcaagattcaccctagagccatctgggaaactttcttctccaggtcgccctgcgtcctcgcctccccaccccgttcttctcgagtcgggtgagctgtctagttccatcacggccggcacggccgcaggggtggccggttatttactgctctactgggcccgtgagcagtctggcgagccgagcagttgccgacgcccggcacaatccgctgcacgtagcaggagcctcaggtccaggccggaagtgaaagggcagggtgtgggtcctcctggggtcgcaggcgcagagccgcctctggtcacgtgattcgccgataagtcacgggggcgccgctcacctgaccagggtctcacgtggccagccccctccgagaggggagaccagcgggccatgacaagctccaggctttggttttcgctgctgctggcggcagcgttcgcaggacgggcgacggccctctggccctggcctcagaacttccaaacctccgaccagcgctacgtcctttacccgaacaactttcaattccagtacgatgtcagctcggccgcgcagcccggctgctcagtcctcgacgaggccttccagcgctatcgtgacctgcttttcggttccgggtcttggccccgtccttacctcacagggaaacggcatacactggagaagaatgtgttggttgtctctgtagtcacacctggatgtaaccagcttcctactttggagtcagtggagaattataccctgaccataaatgatgaccagtgtttactcctctctgagactgtctggggagctctccgaggtctggagacttttagccagcttgtttggaaatctgctgagggcacattctttatcaacaagactgagattgaggactttccccgctttcctcaccggggcttgctgttggatacatctcgccattacctgccactctctagcatcctggacactctggatgtcatggcgtacaataaattgaacgtgttccactggcatctggtagatgatccttccttcccatatgagagcttcacttttccagagctcatgagaaaggggtcctacaaccctgtcacccacatctacacagcacaggatgtgaaggaggtcattgaatacgcacggctccggggtatccgtgtgcttgcagagtttgacactcctggccacactttgtcctggggaccaggtatccctggattactgactccttgctactctgggtctgagccctctggcacctttggaccagtgaatcccagtctcaataatacctatgagttcatgagcacattcttcttagaagtcagctctgtcttcccagatttttatcttcatcttggaggagatgaggttgatttcacctgctggaagtccaacccagagatccaggactttatgaggaagaaaggcttcggtgaggacttcaagcagctggagtccttctacatccagacgtacccctgagcagaaggctctggtgattggtggagaggcttgtatgtggggagaatatgtggacaacacaaacctggtccccaggctctggcccagagcaggggctgttgccgaaaggctgtggagcaacaagttgacatctgacctgacatttgcctatgaacgtttgtcacacttccgctgtgagttgctgagggtaagcaagctgtggggccttcgcaaggcggagcaggccagatccagggctggggaaccccttagagagaggaagacaataattaacaatagctaacacttacagaggcttatagtcagccctcatccacggattcaaccaactgcgataaaaagtattcaggaaaaaaaaaatacaacaaaaaatggtacaaataaaaaatactgtataacaacta

SEQ ID NO: 284994 - DNA, 2297 bp, Homo sapiens
tttttctgcttctgaagttacttcagcctggcaagtcctttacctccccgtaggcctggcgagctgcatcacaacattcaagattcaccctagagccatctgggaaactttcttctccaggtcgccctgcgtcctcgcctccccaccccgttcttctcgagtcgggtgagctgtctagttccatcacggccggcacggccgcaggggtggccggttatttactgctctactgggcccgtgagcagtctggcgagccgagcagttgccgacgcccggcacaatccgctgcacgtagcaggagcctcaggtccaggccggaagtgaaagggcagggtgtgggtcctcctggggtcgcaggcgcagagccgcctctggtcacgtgattcgccgataagtcacgggggcgccgctcacctgaccagggtctcacgtggccagccccctccgagaggggagaccagcgggccatgacaagctccaggctttggttttcgctgctgctggcggcagcgttcgcaggacgggcgacggccctctggccctggcctcagaacttccaaacctccgaccagcgctacgtcctttacccgaacaactttcaattccagtacgatgtcagctcggccgcgcagcccggctgctcagtcctcgacgaggccttccagcgctatcgtgacctgcttttcggttccgggtcttggccccgtccttacctcacagggaaacggcatacactggagaagaatgtgttggttgtctctgtagtcacacctggatgtaaccagcttcctactttggagtcagtggagaattgcatccctgttccctttgccaggagaagacttctttcatctttctgctgtggaaactgacccatgagataccctgaccataaatgatgaccagtgtttactcctctctgagactgtctggggagctctccgagttctttatcaacaagactgagattgaggactttccccgctttcctcaccggggcttgctgttggatacatctcgccattacctgccactctctagcatcctggacactctggatgtcatggcgtacaataaattgaacgtgttccactggcatctggtagatgatccttccttcccatatgagagcttcacttttccagagctcatgagaaaggggtcctacaaccctgtcacccacatctacacagcacaggatgtgaaggaggtcattgaatacgcacggctccggggtatccgtgtgcttgcagagtttgacactcctggccacactttgtcctggggaccaggtatccctggattactgactccttgctactctgggtctgagccctctggcacctttggaccagtgaatcccagtctcaataatacctatgagttcatgagcacattcttcttagaagtcagctctgtcttcccagatttttatcttcatcttggaggagatgaggttgatttcacctgctggaagtccaacccagagatccaggactttatgaggaagaaaggcttcggtgaggacttcaagcagctggagtccttctacatccagacgctgctggacatcgtctcttcttatggcaagggctatgtggtgtggcaggaggtgtttgataataaagtaaagattcagccagacacaatcatacaggtgtggcgagaggatattccagtgaactatatgaaggagctggaactggtcaccaaggccggcttccgggcccttctctctgccccctggtacctgaaccgtatatcctatggccctgactggaaggatttctacgtagtggaacccctggcatttgaaggtacccctgagcagaaggctctggtgattggtggagaggcttgtatgtggggagaatatgtggacaacacaaacctggtccccaggctctggcccagagcaggggctgttgccgaaaggctgtggagcaacaagttgacatctgacctgacatttgcctatgaacgtttgtcacacttccgctgtgagttgctgaggcgaggtgtccaggcccaacccctcaatgtaggcttctgtgagcaggagtttgaacagacctgagccccaggcaccgaggagggtgctggctgtaggtgaatggtagtggagccaggcttccactgcatcctggccaggggacggagccccttgccttcgtgccccttgcctgcgtgcccctgtgcttggagagaaaggggccggtgctggcgctcgcattcaataaagagtaatgtggcatttttctataataaacatggattacctgtgtttaaaaaaaaaa

SEQ ID NO: 284995 - DNA, 1274 bp, Homo sapiens
ggacgcgtgggtccgacccacgcgttccgctctggatgtcatggcgtacaataaattgaacgtgttccactggcatctggtagatgatccttccttcccatatgagagcttcacttttccagagctcatgagaaaggggtcctacaaccctgtcacccacatctacacagcacaggatgtgaaggaggtcattgaatacgcacggctccggggtatccgtgtgcttgcagagtttgacactcctggccacactttgtcctggggaccaggtatccctggattactgactccttgctactctgggtctgagccctctggcacctttggaccagtgaatcccagtctcaataatacctatgagttcatgagcacattcttcttagaagtcagctctgtcttcccagatttttatcttcatcttggaggagatgaggttgatttcacctgctggaagtccaacccagagatccaggactttatgaggaagaaaggcttcggtgaggacttcaagcagctggagtccttctacatccagacgctgctggacatcgtctcttcttatggcaagggctatgtggtgtggcaggaggtgtttgataataaagtaaagattcagccagacacaatcatacaggtgtggcgagaggatattccagtgaactatatgaaggagctggaactggtcaccaaggccggcttccgggcccttctctctgccccctggtacctgaaccgtatatcctatggccctgactggaaggatttctacgtagtggaacccctggcatttgaaggtacccctgagcagaaggctctggtgattggtggagaggcttgtatgtggggagaatatgtggacaacacaaacctggtccccaggctctggcccagagcaggggctgttgccgaaaggctgtggagcaacaagttgacatctgacctgacatttgcctatgaacgtttgtcacacttccgctgtgagttgctgaggcgaggtgtccaggcccaacccctcaatgtaggcttctgtgagcaggagtttgaacagacctgagccccaggcaccgaggagggtgctggctgtaggtgaatggtagtggagccaggcttccactgcatcctggccaggggacggagccccttgccttcgtgccccttgcctgcgtgcccctgtgcttggagagaaaggggccggtgctggcgctcgcattcaataaagagtaatgtggcatttttctataataaacatggattacctgtgtttaaaaaaaaaa

SEQ ID NO: 284996 - DNA, 1235 bp, Homo sapiens
gacttagaggatccccgcaaactggattcactggcatctggtagatgatccttccttcccatatgagagcttcacttttccagagctcatgagaaaggggtcctacaaccctgtcacccacatctacacagcacaggatgtgaaggaggtcattgaatacgcacggctccggggtatccgtgtgcttgcagagtttgacactcctggccacactttgtcctggggaccaggtatccctggattactgactccttgctactctgggtctgagccctctggcacctttggaccagtgaatcccagtctcaataatacctatgagttcatgagcacattcttcttagaagtcagctctgtcttcccagatttttatcttcatcttggaggagatgaggttgatttcacctgctggaagtccaacccagagatccaggactttatgaggaagaaaggcttcggtgaggacttcaagcagctggagtccttctacatccagacgctgctggacatcgtctcttcttatggcaagggctatgtggtgtggcaggaggtgtttgataataaagtaaagattcagccagacacaatcatacaggtgtggcgagaggatattccagtgaactatatgaaggagctggaactggtcaccaaggccggcttccgggcccttctctctgccccctggtacctgaaccgtatatcctatggccctgactggaaggatttctacgtagtggaacccctggcatttgaaggtacccctgagcagaaggctctggtgattggtggagaggcttgtatgtggggagaatatgtggacaacacaaacctggtccccaggctctggcccagagcaggggctgttgccgaaaggctgtggagcaacaagttgacatctgacctgacatttgcctatgaacgtttgtcacacttccgctgtgagttgctgaggcgaggtgtccaggcccaacccctcaatgtaggcttctgtgagcaggagtttgaacagacctgagccccaggcaccgaggagggtgctggctgtaggtgaatggtagtggagccaggcttccactgcatcctggccaggggacggagccccttgccttcgtgccccttgcctgcgtgcccctgtgcttggagagaaaggggccggtgctggcgctcgcattcaataaagagtaatgtggcatttttctataataaacatggattacctgtgtttaaaaaaaaaa

SEQ ID NO: 284997 - DNA, 1705 bp, Homo sapiens
tttttctgcttctgaagttacttcagcctggcaagtcctttacctccccgtaggcctggcgagctgcatcacaacattcaagattcaccctagagccatctgggaaactttcttctccaggtcgccctgcgtcctcgcctccccaccccgttcttctcgagtcgggtgagctgtctagttccatcacggccggcacggccgcaggggtggccggttatttactgctctactgggcccgtgagcagtctggcgagccgagcagttgccgacgcccggcacaatccgctgcacgtagcaggagcctcaggtccaggccggaagtgaaagggcagggtgtgggtcctcctggggtcgcaggcgcagagccgcctctggtcacgtgattcgccgataagtcacgggggcgccgctcacctgaccagggtctcacgtggccagccccctccgagaggggagaccagcgggccatgacaagctccaggctttggttttcgctgctgctggcggcagcgttcgcaggacgggcgacggccctctggccctggcctcagaacttccaaacctccgaccagcgctacgtcctttacccgaacaactttcaattccagtacgatgtcagctcggccgcgcagcccggctgctcagtcctcgacgaggccttccagcgctatcgtgacctgcttttcggttccgggtcttggccccgtccttacctcacagggaaacggcatacactggagaagaatgtgttggttgtctctgtagtcacacctggatgtaaccagcttcctactttggagtcagtggagaattataccctgaccataaatgatgaccagtgtttactcctctctgagactgtctggggagctctccgaggtctggagacttttagccagcttgtttggaaatctgctgagggcacattctttatcaacaagactgagattgaggactttccccgctttcctcaccggggcttgctgttggatacatctcgccattacctgccactctctagcatcctggacactctggatgtcatggcgtacaataaattgaacgtgttccactggcatctggtagatgatccttccttcccatatgagagcttcacttttccagagctcatgagaaaggggtcctacaaccctgtcacccacatctacacagcacaggatgtgaaggaggtcattgaatacgcacggctccggggtatccgtgtgcttgcagagtttgacactcctggccacactttgtcctggggaccaggtatccctggattactgactccttgctactctgggtctgagcccgcccagagcaggggctgttgccgaaaggctgtggagcaacaagttgacatctgacctgacatttgcctatgaacgtttgtcacacttccgctgtgagttgctgaggcgaggtgtccaggcccaacccctcaatgtaggcttctgtgagcaggagtttgaacagacctgagccccaggcaccgaggagggtgctggctgtaggtgaatggtagtggagccaggcttccactgcatcctggccaggggacggagccccttgccttcgtgccccttgcctgcgtgcccctgtgcttggagagaaaggggccggtgctggcgctcgcattcaataaagagtaatgtggcatttttctataataaacatggattacctgtgtttaaaaaaaaaa

SEQ ID NO: 284998 - DNA, 1724 bp, Homo sapiens
tttttctgcttctgaagttacttcagcctggcaagtcctttacctccccgtaggcctggcgagctgcatcacaacattcaagattcaccctagagccatctgggaaactttcttctccaggtcgccctgcgtcctcgcctccccaccccgttcttctcgagtcgggtgagctgtctagttccatcacggccggcacggccgcaggggtggccggttatttactgctctactgggcccgtgagcagtctggcgagccgagcagttgccgacgcccggcacaatccgctgcacgtagcaggagcctcaggtccaggccggaagtgaaagggcagggtgtgggtcctcctggggtcgcaggcgcagagccgcctctggtcacgtgattcgccgataagtcacgggggcgccgctcacctgaccagggtctcacgtggccagccccctccgagaggggagaccagcgggccatgacaagctccaggctttggttttcgctgctgctggcggcagcgttcgcaggacgggcgacggccctctggccctggcctcagaacttccaaacctccgaccagcgctacgtcctttacccgaacaactttcaattccagtacgatgtcagctcggccgcgcagcccggctgctcagtcctcgacgaggccttccagcgctatcgtgacctgcttttcggttccgggtcttggccccgtccttacctcacagggaaacggcatacactggagaagaatgtgttggttgtctctgtagtcacacctggatgtaaccagcttcctactttggagtcagtggagaattataccctgaccataaatgatgaccagtgtttactcctctctgagactgtctggggagctctccgaggtctggagacttttagccagcttgtttggaaatctgctgagggcacattctttatcaacaagactgagattgaggattcaagcagctggagtccttctacatccagacgctgctggacatcgtctcttcttatggcaagggctatgtggtgtggcaggaggtgtttgataataaagtaaagattcagccagacacaatcatacaggtgtggcgagaggatattccagtgaactatatgaaggagctggaactggtcaccaaggccggcttccgggcccttctctctgccccctggtacctgaaccgtatatcctatggccctgactggaaggatttctacgtagtggaacccctggcatttgaaggtacccctgagcagaaggctctggtgattggtggagaggcttgtatgtggggagaatatgtggacaacacaaacctggtccccaggctctggcccagagcaggggctgttgccgaaaggctgtggagcaacaagttgacatctgacctgacatttgcctatgaacgtttgtcacacttccgctgtgagttgctgaggcgaggtgtccaggcccaacccctcaatgtaggcttctgtgagcaggagtttgaacagacctgagccccaggcaccgaggagggtgctggctgtaggtgaatggtagtggagccaggcttccactgcatcctggccaggggacggagccccttgccttcgtgccccttgcctgcgtgcccctgtgcttggagagaaaggggccggtgctggcgctcgcattcaataaagagtaatgtggcatttttctataataaacatggattacctgtgtttaaaaaaaaaa

SEQ ID NO: 284999 - DNA, 991 bp, Homo sapiens
ggctagagggccggggtgaatcggcgaggatctggcacctttggaccagtgaatcccagtctcaataatacctatgagttcatgagcacattcttcttagaagtcagctctgtcttcccagatttttatcttcatcttggaggagatgaggttgatttcacctgctggaagtccaacccagagatccaggactttatgaggaagaaaggcttcggtgaggacttcaagcagctggagtccttctacatccagacgctgctggacatcgtctcttcttatggcaagggctatgtggtgtggcaggaggtgtttgataataaagtaaagattcagccagacacaatcatacaggtgtggcgagaggatattccagtgaactatatgaaggagctggaactggtcaccaaggccggcttccgggcccttctctctgccccctggtacctgaaccgtatatcctatggccctgactggaaggatttctacgtagtggaacccctggcatttgaaggtacccctgagcagaaggctctggtgattggtggagaggcttgtatgtggggagaatatgtggacaacacaaacctggtccccaggctctggcccagagcaggggctgttgccgaaaggctgtggagcaacaagttgacatctgacctgacatttgcctatgaacgtttgtcacacttccgctgtgagttgctgaggcgaggtgtccaggcccaacccctcaatgtaggcttctgtgagcaggagtttgaacagacctgagccccaggcaccgaggagggtgctggctgtaggtgaatggtagtggagccaggcttccactgcatcctggccaggggacggagccccttgccttcgtgccccttgcctgcgtgcccctgtgcttggagagaaaggggccggtgctggcgctcgcattcaataaagagtaatgtggcatttttctataataaacatggattacctgtgtttaaaaaaaaaa

SEQ ID NO: 285000 - DNA, 1586 bp, Homo sapiens
tttttctgcttctgaagttacttcagcctggcaagtcctttacctccccgtaggcctggcgagctgcatcacaacattcaagattcaccctagagccatctgggaaactttcttctccaggtcgccctgcgtcctcgcctccccaccccgttcttctcgagtcgggtgagctgtctagttccatcacggccggcacggccgcaggggtggccggttatttactgctctactgggcccgtgagcagtctggcgagccgagcagttgccgacgcccggcacaatccgctgcacgtagcaggagcctcaggtccaggccggaagtgaaagggcagggtgtgggtcctcctggggtcgcaggcgcagagccgcctctggtcacgtgattcgccgataagtcacgggggcgccgctcacctgaccagggtctcacgtggccagccccctccgagaggggagaccagcgggccatgacaagctccaggctttggttttcgctgctgctggcggcagcgttcgcaggacgggcgacggccctctggccctggcctcagaacttccaaacctccgaccagcgctacgtcctttacccgaacaactttcaattccagtacgatgtcagctcggccgcgcagcccggctgctcagtcctcgacgaggccttccagcgctatcgtgacctgcttttcggttccgggtcttggccccgtccttacctcacagggaaacggcatacactggagaagaatgtgttggttgtctctgtagtcacacctggatgtaaccagcttcctactttggagtcagtggagaattataccctgaccataaatgatgaccagtgtttactcctctctgagactgtctggggagctctccgagctggagacttttagccagcaggaggtgtttgataataaagtaaattcagccagacacaatcatacaggtgtggcgagaggatattccagtgaactatatgaaggagctggaactggtcaccaaggccggcttccgggcccttctctctgccccctggtacctgaaccgtatatcctatggccctgactggaaggatttctacgtagtggaacccctggcatttgaaggtacccctgagcagaaggctctggtgattggtggagaggcttgtatgtggggagaatatgtggacaacacaaacctggtccccaggctctggcccagagcaggggctgttgccgaaaggctgtggagcaacaagttgacatctgacctgacatttgcctatgaacgtttgtcacacttccgctgtgagttgctgaggcgaggtgtccaggcccaacccctcaatgtaggcttctgtgagcaggagtttgaacagacctgagccccaggcaccgaggagggtgctggctgtaggtgaatggtagtggagccaggcttccactgcatcctggccaggggacggagccccttgccttcgtgccccttgcctgcgtgcccctgtgcttggagagaaaggggccggtgctggcgctcgcattcaataaagagtaatgtggcatttttctataataaacatggattacctgtgtttaaaaaaaaaa

SEQ ID NO: 285001 - DNA, 1637 bp, Homo sapiens
tttttctgcttctgaagttacttcagcctggcaagtcctttacctccccgtaggcctggcgagctgcatcacaacattcaagattcaccctagagccatctgggaaactttcttctccaggtcgccctgcgtcctcgcctccccaccccgttcttctcgagtcgggtgagctgtctagttccatcacggccggcacggccgcaggggtggccggttatttactgctctactgggcccgtgagcagtctggcgagccgagcagttgccgacgcccggcacaatccgctgcacgtagcaggagcctcaggtccaggccggaagtgaaagggcagggtgtgggtcctcctggggtcgcaggcgcagagccgcctctggtcacgtgattcgccgataagtcacgggggcgccgctcacctgaccagggtctcacgtggccagccccctccgagaggggagaccagcgggccatgacaagctccaggctttggttttcgctgctgctggcggcagcgttcgcaggacgggcgacggccctctggccctggcctcagaacttccaaacctccgaccagcgctacgtcctttacccgaacaactttcaattccagtacgatgtcagctcggccgcgcagcccggctgctcagtcctcgacgaggccttccagcgctatcgtgacctgcttttcggttccgggtcttggccccgtccttacctcacagggaaacggcatacactggagaagaatgtgttggttgtctctgtagtcacacctggatgtaaccagcttcctactttggagtcagtggagaattataccctgaccataaatgatgaccagtgtttactcctctctgagactgtctggggagctctccgaggtctggagacttttagccagcttgtttggaaatctgctgagggcacattctttatcaacaagactgagattgaggactttccccgctttcctcaccggggcttgctgttggatacatctcgccattacctgccactctctagcatcctggacactctggatgtcatggcgtacaataaattgaacgtgttccactggcatctggtagatgatccttccttcccatatgagagcttcacttttccagagctcatgagaaaggggtcctacaaccctgtcacccacatctacacagcacaggatgtgaaggaggtcattgaatacgcacggctccggggtatccgtgtgcttgcagagtttgacactcctggcccagagcaggggctgttgccgaaaggctgtggagcaacaagttgacatctgacctgacatttgcctatgaacgtttgtcacacttccgctgtgagttgctgaggcgaggtgtccaggcccaacccctcaatgtaggcttctgtgagcaggagtttgaacagacctgagccccaggcaccgaggagggtgctggctgtaggtgaatggtagtggagccaggcttccactgcatcctggccaggggacggagccccttgccttcgtgccccttgcctgcgtgcccctgtgcttggagagaaaggggccggtgctggcgctcgcattcaataaagagtaatgtggcatttttctataataaacatggattacctgtgtttaaaaaaaaaa

SEQ ID NO: 285002 - DNA, 1253 bp, Homo sapiens
tacctacctacctacctcctacctacctacctacctacctacctacctcctacctacctacctacctacctacctacctcctacctacctacctacctacctacctacctcctacctacctacctacctacctacctacctcctacctacctacctacctacctacctacctcctacctacctacctacctacctacctacctcctacctacctacctacctacctacctacctcctacctacctacctacctacctacctacctcctacctacctacctacctacctacctacctcctacctacctacctacctacctacctacctcctacctacctacctacctacctacctacctcctacctacctacctacctacctacctacctcctacctacctacctacctacctacctacctcctacctacctacctacctacctacctacctcctacctacctacctacctacctacctacctcctacctacctacctacctacctacctacctcctacctacctacctacctacctacctacctcctacctacctacctacctacctacctacctcctacctacctacctacctacctacctacctcctacctacctacctacctacctacctacctcctacctacctacctacctacctacctacctcctacctacctacctacctacctacctacctccaacctacctaccttaaaacctaatacccctaactggaaggatttctacgtagtggaacccctggcatttgaagtacccctgagcagaaggctctggtgattggtggagaggcttgtatgtggggagaatatgtggacaacacaaacctggtccccaggctctggcccagagcaggggctgttgccgaaaggctgtggagcaacaagttgacatctgacctgacatttgcctatgaacgtttgtcacacttccgctgtgagttgctgaggcgaggtgtccaggcccaacccctcaatgtaggcttctgtgagcaggagtttgaacagacctgagccccaggcaccgaggagggtgctggctgtaggtgaatggtagtggagccaggcttccactgcatcctggccaggggacggagccccttgccttcgtgccccttgcctgcgtgcccctgtgcttggagagaaaggggccggtgctggcgctcgcattcaataaagagtaatgtggcatttttctataataaacatggattacctgtgtttaaaaaaaaaa

SEQ ID NO: 285003 - DNA, 1677 bp, Homo sapiens
  misc_feature (1572)..(1572): n is a, c, g, or t
  misc_feature (1576)..(1576): n is a, c, g, or t
tttttctgcttctgaagttacttcagcctggcaagtcctttacctccccgtaggcctggcgagctgcatcacaacattcaagattcaccctagagccatctgggaaactttcttctccaggtcgccctgcgtcctcgcctccccaccccgttcttctcgagtcgggtgagctgtctagttccatcacggccggcacggccgcaggggtggccggttatttactgctctactgggcccgtgagcagtctggcgagccgagcagttgccgacgcccggcacaatccgctgcacgtagcaggagcctcaggtccaggccggaagtgaaagggcagggtgtgggtcctcctggggtcgcaggcgcagagccgcctctggtcacgtgattcgccgataagtcacgggggcgccgctcacctgaccagggtctcacgtggccagccccctccgagaggggagaccagcgggccatgacaagctccaggctttggttttcgctgctgctggcggcagcgttcgcaggacgggcgacggccctctggccctggcctcagaacttccaaacctccgaccagcgctacgtcctttacccgaacaactttcaattccagtacgatgtcagctcggccgcgcagcccggctgctcagtcctcgacgaggccttccagcgctatcgtgacctgcttttcggttccgggtcttggccccgtccttacctcacagggaaacggcatacactggagaagaatgtgttggttgtctctgtagtcacacctggatgtaaccagcttcctactttggagtcagtggagaattataccctgaccataaatgatgaccagtgtttactcctctctgagactgtctggggagctctccgagttctttatcaacaagactgagattgaggactttccccgctttcctcaccggggcttgctgttggatacatctcgccattacctgccactctctagcatcctggacactctggatgtcatggcgtacaataaattgaacgtgttccactggcatctggtagatgatccttccttcccatatgagagcttcacttttccagagctcatgagaaaggggtcctacaaccctgtcacccacatctacacagcacaggatgtgaaggaggtcattgaatacgcacggctccggggtatccgtgtgcttgcagagtttgacactcctggccacactttgtcctggggaccaggtatccctggattactgactccttgctactctgggtctgagccctctggcacctttggaccagtgaatcccagtctcaataatacctatgagttcatgagcacattcttcttagaagtcagctctgtcttcccagatttttatcttcatcttggaggagatgaggttgatttcacctgctggaagtccaacccagagatccaggactttatgaggaagaaaggcttcggtgaggacttcaagcagctggagtccttctacatccagacgctgctggacatcgtctcttcttatggcaagggctatgtggtgtggcaggaggtgtttgataataaagtaaaggattcnggcnaccatctacgggtgggaggattccggacaattaggagggaggccagcgcgtcggccttttgcccggagaaggaacaagcgaggggaaaaaccccatgcccc

SEQ ID NO: 285004 - DNA, 1141 bp, Homo sapiens
tttttctgcttctgaagttacttcagcctggcaagtcctttacctccccgtaggcctggcgagctgcatcacaacattcaagattcaccctagagccatctgggaaactttcttctccaggtcgccctgcgtcctcgcctccccaccccgttcttctcgagtcgggtgagctgtctagttccatcacggccggcacggccgcaggggtggccggttatttactgctctactgggcccgtgagcagtctggcgagccgagcagttgccgacgcccggcacaatccgctgcacgtagcaggagcctcaggtccaggccggaagtgaaagggcagggtgtgggtcctcctggggtcgcaggcgcagagccgcctctggtcacgtgattcgccgataagtcacgggggcgccgctcacctgaccagggtctcacgtggccagccccctccgagaggggagaccagcgggccatgacaagctccaggctttggttttcgctgctgctggcggcagcgttcgcaggacgggcgacggccctctggccctggcctcagaacttccaaacctccgaccagcgctacgtcctttacccgaacaactttcaattccagtacgatgtcagctcggccgcgcagcccggctgctcagtcctcgacgaggccttccagcgctatcgtgacctgcttttcggttccgggtcttggccccgtccttacctcacagggaaacggcatacactggagaagaatgtgttggcccagagcaggggctgttgccgaaaggctgtggagcaacaagttgacatctgacctgacatttgcctatgaacgtttgtcacacttccgctgtgagttgctgaggcgaggtgtccaggcccaacccctcaatgtaggcttctgtgagcaggagtttgaacagacctgagccccaggcaccgaggagggtgctggctgtaggtgaatggtagtggagccaggcttccactgcatcctggccaggggacggagccccttgccttcgtgccccttgcctgcgtgcccctgtgcttggagagaaaggggccggtgctggcgctcgcattcaataaagagtaatgtggcatttttctataataaacatggattacctgtgtttaaaaaaaaaa

SEQ ID NO: 285005 - DNA, 2064 bp, Homo sapiens
  misc_feature (1576)..(1576): n is a, c, g, or t
agaagcaggatttgaaccaggctgacttacaggatgtcatgacacctttgcctctgtcagggatgtgcctgtgtaagatagtcatttccctgattccttcgttggctaggtcttgagtacttgggggacatagcctagtgcagagcagagtcctgggctgagagtcaagcatgatggtgtctaagcctcaattatgtcattcactgggtaacttccagctggttctctaagcatgttgcttacttggatgataagggaagcatgcctagaggtcccctaaggagattggtcaggttatagactgagacccaaggacaggatttcgcatccatgttcatggacaggacagcacctaagtcccccagtgccaccatatttacagcattttagagtcaggaacagagggctaagtagaccaagagcattggctgcctttcagacatccatctatattctaaagggattgagttatttggggttagggtacagagatgggcaggatataaatagatgtcgccaacgtttctggatctccaagacctgtatcagaatcacctgaggcacctgttcagcttgcagattcttgccaatactttgccccaccccaggtgagaatctctggaattgagattcccaggtgcatttggtgtacagtgacagtttgagagtcaccgaaatggggaaggagagactgttgactggtgtgaaaagtgttgctggggccccttctgaggggcttatcttgccatttcttcatgtcctcttgcagcgaggtgtccaggcccaacccctcaatgtaggcttctgtgagcaggagtttgaacagacctgagccccaggcaccgaggagggtgctggctgtaggtgaatggtagtggagccaggcttccactgcatcctggccaggggacggagccccttgccttcgtgccccttgcctgcgtgcccctgtgcttggagagaaaggggccggtgctggcgctcgcattcaataaagagtaatgtggcatttttctataataaacatggattacctgtgtttaaaaaaaaaagtgtgaatggcgttagggtaagggcacagccaggctggagtcagtgtctgcccctgaggtcttttaagttgagggctgggaatgaaacctatagcctttgtgctgttctgccttgcctgtgagctatgtcactcccctcccactcctgaccatattccagacacctgccctaatcctcagcctgctcacttcacttctgcattatatctccaaggcgttggtatatggaaaaagatgtaggggcttggaggtgttctggacagtggggagggctccagacccaacctggtcacaaaagagcctctcccccatgcatactcatccacctccctcccctagagctattctcctttgggtttcttgctgctgcaattttatacaaccattatttaaatattattaaacacatattgttctctaaaaactgtggtagtgggtttttttgttgtttttgtttttgagactgtctcaaaaactctgtcgcccaggctgacagtgcagtggcacaatcttggctcactgcngcctctgcctcctgggttcaagcgattctcgtgcatcagcctcctgagtaactggaattaataggcacgtgccaccatgtccatctaattcatatatatatattttttttttctgagacggagtctcactgtcactctggcttgggagacagagtgagactccgtctcaaaaaaaagaaaaaaagaaaaacatgtacaacatggaatagagttgatatccagccagtatacactttgagtgatctcattcacactcagtgtatcttcagctaccctcatatgaagtcacagactcacacctgtatttccagcactttgggaggccaaggcagtaggatcactacagcctgagttcagggctgcagtgatctatgattgcagcattgcactggagcctggccaacagagtgagaccctatctcttaaaaattaaaaaataaaaataagtcattataaaagtgtaattatcaagacagttggtattggtg

SEQ ID NO: 285006 - DNA, 318 bp, Homo sapiens
tttcagcccaggggaaagacactgcttaatgaggaataggcccctggccaggctcaacccctagagcactggcacaaacagtctagaacccatctgagctaagcagacacttactagacactcctctcctctccaggctgctggacatcgtctcttcttatggcaagggctatgtggtgtggcaggaggtgtttgataataaagtaaagggtgagccggggcagagaagagaagaagccaccagcagtgcctccctctggtctccccagctcctccctgcctctacagagactgatcctcctggtttggattgggctt

SEQ ID NO: 285007 - DNA, 743 bp, Homo sapiens
atttcaagaagaggaaagaccacttctatcatccatctttggatgtgttctgggaaaagtagaagtgtgctgggccttccctccatgccatccctccctgatgggaaggtttgatagaccccataaatacttaattgagagctgaggcaggtcaagcctgtaggggtgtgtggagcggcctgagagctcgcccaacatcgcaagtttgaggctgaaaccggagagactgtgatgggttcacagtgtgcactttaacctacaggatgtcatggcgtacaataaattgaacgtgttccactggcatctggtagatgatccttccttcccatatgagagcttcacttttccagagctcatgagaaaggtatgttcccgtttcactcagaccaagtttatgggtcaatgtctgaatctggctgtggccctgctggcaagaacagggtctctcatcctaaccagccagttttagaccaatataggggaaggacactggatttggagtcaggagacttgagttcaagtccaaaactttgccgataatttgccttgtgaccttcaggagagaatctcttctggccttattccctttttatgtatttatattctgttaaatggacatagtattaatacctaccatgattatctcactggcattatgatactcagataaaacagatgtgataacttctgggaaattatgatcaagttttttgaagatagtccctgacaccaaagggctatgg

SEQ ID NO: 285008 - DNA, 1388 bp, Homo sapiens
ggtttgctttccatatctgatctttaatccacctggaactgattcgtgtacagtgacagagagggatattggaggctttttccccaacaggagtaactaattgtcccagcaatatattttcatctctgatttttacagtatctctgggtatatcccattttccaaatatgtgtgaaatctgtttctgagctttctaccctgttccattagtctacttatatttttaaccataaacatgtattataacagaaagtttatgtggaaaaggatataaagggatggtgaaggagggaaaagggatggatgtgtagcccatctcaggaaacttaaattcttgaatgtcacagagactagttcagagcaattagttctacaaagaaagaactctatgagcaagttaaaagtaagacagaattaaaaagcagtcacaaattactagggggacaaaggatttgagatataaatcaaattttacacgtaagtgctaaagtatagcatactctttatatatgtaccaagatattttgctcttgctattgttttttaaccatcccctgccagaaacatatacacagatacacaaccacagtaagaaaccattcttaggatatgggttaaatgggatttaaaaaacaataataaaaatgaatttttatgaacttccactgaagttcttcacaaactgtcttaatttagacaaacttcacaaactgtcttaatttagacaattacatgctcatgcatgctatttcctacccttgtgaacttggagcacatttcctctgcttcttttatcatatttgctcgaagcatgtattttgcacatttggaattgatgaatctatcagctgtgtccaaagactgtgcttcatccatccactttgcagcttctttgagattacctatatgctataaaagataattaaaggaaccacaatttataatcaagagaatatgagtacaataaaatggaaaataatttacacagacaaaaaagaaatctgtcaccatttctgtcaaatttatttagaaatcaaaattacagttcacatttactaagagctcaaatgattacacatctaattacacattgattatacaattaatataacatgaaactacacaggattattagaaaaagattatcagggtgccctagaacttgtttccacaaagaaaaaactccaaggattcttaaagtagctgaattcttcaactactcaaaaaacaggattcagattttaccttgtaaatttttgctttcatatagaataattctattagagttggagtactagcaattgcagcattaatataatccaaagccaaagaatactgtccaagtttatcaaagtgctgtgccagtaaatataaacccattatgttat

SEQ ID NO: 285009 - DNA, 355 bp, Homo sapiens
ttttgaatataataataattttaatgcattttacagtgtgcctttatcccataagttgaaaaaaacatccttatgactttgttactgtttttctttctcttctctttgcagtgcctccaactattaagttgcgtctgagtgttcgaggagacactatcaaagttaaggcaggagagcctgtccacatccctgcagatgtgacaggccttccaatgcctaagattgaatggtccaaaaatgaaactgtaattgaaaaacccactgatgcacttcagataaccaaggaagaggtatcccgaagtgaggcaaaaactgagcttagcattcccaaagcggtccgggaggacaaaggcac

SEQ ID NO: 285010 - DNA, 2930 bp, Homo sapiens
gatgcccctcttgataatggtggcagtgaaatcacccattatgttattgacaaacgtgatgcaagtaggaagaaagcagaatgggaggaagtcaccaacactgctgtagagaaaagatatgggatctggaaacttatccccaatggtcagtatgagttccgagtcagggcagtgaataaatatggaatcagtgatgagtgcaaatcagataaagtagtcattcaagatccttatcgccttcctggacctccaggaaaaccaaaagttttggcaccgcaccaaaggatcaatgctagtgagctggactcctcctttggacaatggtggctctccaattactggctactggctggagaaaagagaagagggaagtccttattggtcacgtgttagccgagcaccaataaccaaagtgggattgaaaggcgtggaatttaatgttcctcgtttgcttgaaggcgttaaataccagttcagagccatggcaataaatgctgcaggaattggtcctcccagtgaaccatcagatccagaggttgcaggagatcccatatttccaccggggccaccttcttgcccagaagttaaagataaaacgaagtcaagcatctcactaggatggaaacctccagccaaagatggtggcagcccaatcaaaggatacattgtagaaatgcaagaagaaggtactactgactggaaaagagtaaatgaaccagacaaacttataactacctgtgaatgtgtggtgcctaatctgaaagagctcaggaagtacagattcagagtgaaagctgtcaatgaagctggtgaatctgaaccaagtgatacaactggggagatccctgccactgatattcaagaggaaccagaagttttcattgacattggagcacaggactgtctggtttgtaaagctggctcacagattaggattcctgctgtcatcaagggacgcccaacaccaaaatcatcttgggaatttgatggaaaggcaaagaaagcaatgaaggatggagttcatgacatacccgaagatgcacagctggagactgctgaaaactcctcagtaattattattccggagtgtaaacgatctcatacaggcaaatacagcatcacagccaagaataaagcaggacaaaagactgcaaattgcagagttaaagtcatggatgtaccaggcccacccaaagatctgaaagtcagtgatatcacaaggggtagttgcagactttcatggaagatgccagacgacgatggaggagacaggatcaaaggctatgttattgagaagaggactattgatggaaaagcctggaccaaagtcaatccagactgtggaagcaccacatttgtagtgcctgatctcctctctgaacagcaatatttcttccgtgtgcgagcagaaaaccgttttggtattggcccacctgtggaaaccattcagaggaccactgccagagatccgatatatcctcctgatcctcctattaaactcaagatgggcctcatcacaaagaacacagtgcatctgtcatggaaacccccgaagaatgatgggggctcccctgttacccactatattgttgagtgccttgcatgggaccctactgggacaaagaaagaagcctggaggcagtgcaataagcgtgatgtggaagaactgcaatttactgttgaagacctagtagagggtggggaatatgaattccgagtcaaagctgtcaatgctgcaggagtcagcaagccttcagccactgttggccctgtgactgtcaaagaccagacatgcccaccatcaattgatctaaaagaattcatggaggttgaagaaggaaccaatgttaacattgtggccaaaattaaaggtgtgccattcccgacactaacctggtttaaagctcctccaaagaagcctgataacaaagaacctgttctctatgacacccatgtcaacaaactggtggtagatgatacttgcactttagttattccgcagtctcgcaggagtgacactggcttatataccatcacagctgtaaataatctgggaacagcatcaaaggagatgagactgaatgtcctgggtcgtcctggccctccagtgggacccataaaatttgaatctgtttcagcagatcaaatgacactatcttggtttccacctaaagatgatggtgggtctaagattacaaactatgtaattgagaaaagagaagctaacaggaagacatgggtccatgtctccagtgaacctaaggagtgcacgtacacgattcccaaattgctagaaggccatgaatatgtattccgaatcatggcccagaataaatatggcattggagaacctcttgacagtgaacctgaaacagcaagaaacctcttctctgtccctggagcaccagataaaccaacagttagcagcgtgactcgtaactccatgactgtcaactgggaagagccagaatatgatggaggctctcctgtgacagggtactggctggaaatgaaagacaccacttcaaagagatggaagagagttaaccgagatcctatcaaagccatgactttgggtgtttcttataaagtgactggtcttattgaaggttccgactatcaattccgggtatatgcaatcaatgctgctggcgtgggtccagcaagtctgccatcagacccagcgactgctagagatccaattgcccctcctggtcctccatttcccaaagtgacagattggactaaatcatctgcagatctggagtggtctcccccactaaaagatggtggatccaaagtaactggatacatcgttgaatataaagaagaaggaaaagaagaatgggaaaagggtaaagataaagaagtgagaggaacaaagcttgttgtgacaggattaaaggaaggagcattctacaaatttagag

SEQ ID NO: 285011 - DNA, 617 bp, Homo sapiens
gttattgccaagaacaagtttggctgtggccctcctgttgaaataggaccaattcttgcagttgatccactaggtcctccaacatctccagagaggctcacatacactgaaaggacaaagtccactatcacacttgactggaaagagccccgcagtaatggtggcagtcccatccaaggatatatcattgaaaaacggcgtcatgacaaacctgactttgaaagagttaacaagcgactctgcccaaccacatcttttctggttgaaaatcttgatgaacaccaaatgtatgagttccgtgtcaaagctgtcaatgaaattggtgaaagtgaaccatccctacctcttaatgtagtcatacaagatgatgaagtgcctccaactattaagttgcgtctgagtgttcgaggagacactatcaaagttaaggcaggagagcctgtccacatccctgcagatgtgacaggccttccaatgcctaagattgaatggtccaaaaatgaaactgtaattgaaaaacccactgatgcacttcagataaccaaggaagaggtatcccgaagtgaggcaaaaactgagcttagcattcccaaagcggtccgggaggacaaaggcac

SEQ ID NO: 285012 - DNA, 383 bp, Homo sapiens
tttttttaaatttcttataatcaatatgatctttttcacagctgtccctggagcaccagataaaccaacagttagcagcgtgactcgtaactccatgactgtcaactgggaagagccagaatatgatggaggctctcctgtgacagggtactggctggaaatgaaagacaccacttcaaagagatggaagagagttaaccgagatcctatcaaagccatgactttgggtgtttcttataaagtgactggtcttattgaaggttccgactatcaattccgggtatatgcaatcaatgctgctggcgtgggtccagcaagtctgccatcagacccagcgactgctagagatccaattggtaagcctggaaaccattccttttttt

SEQ ID NO: 285013 - DNA, 512 bp, Homo sapiens
ctctttccaccatattttgaacccacatgtgaggcaacatgactcaaagtatgttcatagacatatccactatctgttaataaaagaaaaaacactttgctctcagctggtcattcaaagcaaagcttcacagacttactttcctagttcagtagaattagaagcatccccagttacaaaggtaaacaatctaaaatgttaaattaaaaaagcatacgtgcccttgatttatttttcactgataatcttgatgaaaagtttgctaagaaaaattctgtctacatgaatgtctataattttggcaactgacaagttttaggaatgattttaaataaggatgtaaggttatgccaaacagaaggctattttttacataattaagttgaagtgaaatattatttcttacatgaatatttatctcatgctaatcattttcacttgcctctggctaaaggtcctccaacatctccagagaggctcacatacactgaaaggacaaagtccactatcac

SEQ ID NO: 285014 - DNA, 510 bp, Homo sapiens
tgagcttagcattcccaaagcggtccgggaggacaaaggcacttacacagttactgcttccaatcgccttggctcagtgttccgaaatgttcacgttgaagtatatggtaagtgacttgctttcttacatcaaaaaggcatccagtgtctgtttaagaattgccttctcaatattctctgttgattcctttccagaccgcccatccccaccaagaaatcttgctgttactgacattaaagctgaatcttgctacttgacatgggatgcccctcttgataatggtggcagtgaaatcacccattatgttattgacaaacgtgatgcaagtaggaagaaagcagaatgggaggaagtcaccaacactgctgtagagaaaagatatggggtaaactcttctgaatattttcttatacacattaaaagtacatgactctggtttgatgccattttaatataaccttggaatttgataattaaactcaaaaccacacacgataagctgttatttt

SEQ ID NO: 285015 - DNA, 844 bp, Homo sapiens
aggtggaagaaaaaattgagcagctccacacaggaacaggccaacaatgacttcttcctccttgctgagctcctgagtgactacattcgcctcctggccatagtccgcgctgccttcgaccagcgcatgaagacatggcagcgctggcaggatgcccaagccacactgcagaagaagcgggaggccgaggctcggctgctgtgggccaacaagcctgataagctgcagcaggccaaggacgagatcctcgagtgggagtctcgggtgactcaatatgaaagggacttcgagaggatttcaacagtggtccgaaaagaagtgatacggtttgagaaagagaaatccaaggacttcaagaaccacgtgatcaagtaccttgagacactcctttactcacagcagcagctggcaaagtactgggaagccttccttcctgaggcaaaggccatctcctaatggaccaaggaccccagagcccacctgtgtgacgctgcctttttatacactgtcctcctccaccttgatggacccctagtgatgcatcctgcctaggctggacttaaccccttcctccctgtccccacgaccaactgtccccagttactctaaccgttatttcatttagcttccatatatattttcttacctaagagaatagtttcctgctttaagcaaaagacctacaataggtggtggaattatgggatggggtggagtattgatataaatatataaatacaaatgtatatttttcaggatgtggtttaggaactgggaataacgttttctgttactcctgatggtgccatgaaaaggttatgtaataaaatattttaaaatcagg

SEQ ID NO: 285016 - DNA, 761 bp, Homo sapiens
cctttccctcgttggcaaagagccgcgtggctttcaaccaggcaattaaaaagtgcaagcgctgccagattcccaaaccccccttcaaaaaaaacggaaggcccaagcttggcttctgtgggccaaccaaccttattaattgcaccaggccaagggccaagttcttcgatgggagtctcgggtgactcaatatgaaagggacttcgagaggatttcaacagtggtccgaaaagaagtgatacggtttgagaaagagaaatccaaggacttcaagaaccacgtgatcaagtaccttgagacactcctttactcacagcagcagctggcaaagtactgggaagccttccttcctgaggcaaaggccatctcctaatggaccaaggaccccagagcccacctgtgtgacgctgcctttttatacactgtcctcctccaccttgatggacccctagtgatgcatcctgcctaggctggacttaaccccttcctccctgtccccacgaccaactgtccccagttactctaaccgttatttcatttagcttccatatatattttcttacctaagagaatagtttcctgctttaagcaaaagacctacaataggtggtggaattatgggatggggtggagtattgatataaatatataaatacaaatgtatatttttcaggatgtggtttaggaactgggaataacgttttctgttactcctgatggtgccatgaaaaggttatgtaataaaatattttaaaatcagg

SEQ ID NO: 285017 - DNA, 985 bp, Homo sapiens
aggtggaagaaaaaattgagcagctccacacaggaacaggccaacaatgacttcttcctccttgctgagctcctgagtgactacattcgcctcctggccatagtccgcgctgccttcgaccagcgcatgaagacatggcagcgctggcaggatgcccaagccacactgcagaagaagcgggaggccgaggctcggctgctgtgggccaacaagcctgataagctgcagcaggccaaggacgagatcctcgagtgggagtctcgggtgactcaatatgaaagggacttcgagaggatttcaacagtggtccgaaaagaagtgatacggtttgagaaagagaaatccaaggacttcaagaaccacgtgatcaagtaccttgagacactcctttactcacagcagcagctggcaaagtactgggaagccttccttcctgaggcaaaggccatctcctaatggaccaaggaccccagagcccacctgtgtgacgctgcctttttatacactgtcctcctccaccttgatggacccctagtgatgcatcctgcctaggctggacttaaccccttcctccctgtccccacgaccaactgtccccagttactctaaccgttatttcatttagcttccatatatattttcttacctaagagaatagtttcctgctttaagcaaaagacctacaataggtggtggaattatgggatggggtggagtattgatataaatatataaatacaaatgtatatttttcaggatgtggtttaggaactgggaataacgttttctgttactcctgatggtgccatgaaaaggttatgtaataaaatattttaaaatcaggaaaaaaaaaaataataccttcacttttttagataatattacatgaatttttcataaaaaccccgaggggggccccggttcccaattcccccttaagggaggcagtttacaattcactgggcctgcttttatcaactttagg

SEQ ID NO: 285018 - DNA, 751 bp, Homo sapiens
aggtggaagaaaaaattgagcagctccacacaggaacaggccaacaatgacttcttcctccttgctgagctcctgagtgactacattcgcctcctggccatagtccgcgctgccttcgaccagcgcatgaagacatggcagcgctggcaggatgcccaagccacactgcagaagaagcgggaggccgaggctcggctgctgtgggccaacaagcctgataagctgcagcaggccaaggacgagatcctcgagtgggagtctcgggtgactcaatatgaaagggacttcgagaggatttcaacagtggtccgaaaagaagtgatacggtttgagaaagagaaatccaaggacttcaagaaccacgtgatcaagtaccttgagacactcctttactcacagcagcagctggcaaagtactgggaagccttccttcctgaggcaaaggccatctcctaatggactggacttaaccccttcctccctgtccccacgaccaactgtccccagttactctaaccgttatttcatttagcttccatatatattttcttacctaagagaatagtttcctgctttaagcaaaagacctacaataggtggtggaattatgggatggggtggagtattgatataaatatataaatacaaatgtatatttttcaggatgtggtttaggaactgggaataacgttttctgttactcctgatggtgccatgaaaaggttatgtaataaaatattttaaaatcagg

SEQ ID NO: 285019 - DNA, 427 bp, Homo sapiens
gaacgtcgagaataaggacgagtgaccccaaaggcacacattgagaaggggtgccgttttaaacacagtcgacttcccgccctaatgaacccataataaatgcatcataaaaagagatggacttaaccccttcctccctgtccccacgaccaactgtccccagttactctaaccgttatttcatttagcttccatatatattttcttacctaagagaatagtttcctgctttaagcaaaagacctacaataggtggtggaattatgggatggggtggagtattgatataaatatataaatacaaatgtatatttttcaggatgtggtttaggaactgggaataacgttttctgttactcctgatggtgccatgaaaaggttatgtaataaaatattttaaaatcaggaaatcaggtcacatgactca

SEQ ID NO: 285020 - DNA, 490 bp, Homo sapiens
tcccagatgcctgaaacacaggcatctcttttccagtcagcccctaaagtagccttctgccggactctgacttacgtgtggaatcctctgtgacacctcatcttacccacagggacagacagacataatgatcaattgagccctcatatgtaaaatcgctgtccaaatgtgaaggcttaataatggtgccataatatgaggtgatcctttctttcctctttcttcccagtgggagtctcgggtgactcaatatgaaagggacttcgagaggatttcaacagtggtccgaaaagaagtgatacggtttgaggtgagatagaaaatcctacttctcacttagcatgcagtgcttgttttgggagtactcttggtgttgtccaactctgttgggtaaagagagaggtgccagtaacttggcagttctcgtgagcaggcgtggccttctttgggggggcggtgcgatctcagctcacaatcactagtgaattcc

SEQ ID NO: 285021 - DNA, 521 bp, Homo sapiens
cgagctcggtaccccttttggggtctttgctaagaaccacgtgatcaagtaccttgagacactcctttactcacagcagcagctggcaaagtactgggaagccttccttcctgaggcaaaggccatctcctaatggaccaaggaccccagagcccacctgtgtgacgctgcctttttatacactgtcctcctccaccttgatggacccctagtgatgcatcctgcctaggctggacttaaccccttcctccctgtccccacgaccaactgtccccagttactctaaccgttatttcatttagcttccatatatattttcttacctaagagaatagtttcctgctttaagcaaaagacctacaataggtggtggaattatgggatggggtggagtattgatataaatatataaatacaaatgtatatttttcaggatgtggtttaggaactgggaataacgttttctgttactcctgatggtgccatgaaaaggttatgtaataaaatattttaaaatcagg

SEQ ID NO: 285022 - DNA, 896 bp, Homo sapiens
aggtggaagaaaaaattgagcagctccacacaggaacaggccaacaatgacttcttcctccttgctgagctcctgagtgactacattcgcctcctggccatagtccgcgctgccttcgaccagcgcatgaagacatggcagcgctggcaggatgcccaagccacactgcagaagaagcgggaggccgaggctcggctgctgtgggccaacaagcctgataagctgcagcaggccaaggacgagatcctcgagtgggagtctcgggtgactcaatatgaaagggacttcgagaggatttcaacagtggtccgaaaagaagtgatacggtttgagaaagagaaatccaaggacttcaagaaccacgtgatcaagtaccttgagacactcctttactcacagcagcagctggcaaagtactgggaagccttccttcctgaggcaaaggccatctcctaatggaccaaggaccccagagcccacctgtgtgacgctgcctttttatacactgtcctcctccaccttgatggacccctagtgatgcatcctgcctaggctggacttaaccccttcctccctgtccccacgaccaactgtccccagttactctaaccgttatttcatttagcttccatatatattttcttacctaagagaatagtttcctgctttaagcaaaagacctacaataggtggtggaattatgggatggggtggagtattgatataaatatataaatacaaatgtatatttttcaggatgtggtttaggaactgggaataacgttttctgttactcctgatggtgccatgaaaaggttatgtaataaaatattttaaaatcagggacgatcttttctaatgcaatacaagcttaagaaagagggcgaccgcaagtc

SEQ ID NO: 285023 - DNA, 864 bp, Homo sapiens
aggtggaagaaaaaattgagcagctccacacaggaacaggccaacaatgacttcttcctccttgctgagctcctgagtgactacattcgcctcctggccatagtccgcgctgccttcgaccagcgcatgaagacatggcagcgctggcaggatgcccaagccacactgcagaagaagcgggaggccgaggctcggctgctgtgggccaacaagcctgataagctgcagcaggccaaggacgagatcctcgagtgggagtctcgggtgactcaatatgaaagggacttcgagaggatttcaacagtggtccgaaaagaagtgatacggtttgagaaagagaaatccaaggacttcaagaaccacgtgatcaagtaccttgagacactcctttactcacagcagcagctggcaaagtactgggaagccttccttcctgaggcaaaggccatctcctaatggaccaaggaccccagagcccacctgtgtgacgctgcctttttatacactgtcctcctccaccttgatggacccctagtgatgcatcctgcctaggctggacttaaccccttcctccctgtccccacgaccaactgtccccagttactctaaccgttatttcatttagcttccatatatattttcttacctaagagaatagtttcctgctttaagcaaaagacctacaataggtggtggaattatgggatggggtggagtattgatataaatatataaatacaaatgtatatttttcaggatgtggtttaggaactgggaataacgttttctgttactcctgatggtgccatgaaaaggttatgtaataaaatattttaaaatcaggaaatcaggtcacatgactca

SEQ ID NO: 285024 - DNA, 805 bp, Homo sapiens
aggtggaagaaaaaattgagcagctccacacaggaacaggccaacaatgacttcttcctccttgctgagctcctgagtgactacattcgcctcctggccatagtccgcgctgccttcgaccagcgcatgaagacatggcagcgctggcaggatgcccaagccacactgcagaagaagcgggaggccgaggctcggctgctgtgggccaacaagcctgataagctgcagcaggccaaggacgagatcctcgagtgggagtctcgggtgactcaatatgaaagggacttcgagaggatttcaacagtggtccgaaaagaagtgatacggtttgagaaagagaaatccaaggacttcaagaaccacgtgatcaagtaccttgagacactcctttactcacagcagcagctggcaaagtactgggaagccttccttcctgaggcaaaggccatctcctaatggaccaaggaccccagagcccacctgtgtgacgctgcctttttatacactgtcctcctccaccttgatggacccctagtgatgcatcctgcctaggctggacttaaccccttcctccctgtccccacgaccaactgtccccagttactctaaccgttatttcatttagcttccatatatattttcttacctaagagaatagtttcctgctttaagcaaaagacctacaataggtggtggaattatgggtatatttttcaggatgtggtttaggaactgggaataacgttttctgttactcctgatggtgccatgaaaaggttatgtaataaaatattttaaaatcagg

SEQ ID NO: 285025 - DNA, 677 bp, Homo sapiens
gcggagcacccggcaatggcggcctccacggcctcgcaacggcccctcaaggggatcctgaaggacaacacctctacgacttcctctatggtggcgtcggccgaacatccccgtgggagtgtccacgagcagctgagcaaaaaatcccagaagtgggatgaaatgaacatcctggcgacatatcgtccagcagacaaagactatggtttaatgaaaatagatgaaccaagcactccttaccatagtacgatgggtgatgatgaagatgcatgtagtgatacagaaaccactgaagctatggcaacagatagcttgctaagaacttagctgctgctgaaggcttggagccaaagtatcaggttcaggaacaagaaagcagtggagaggaggatagtgacctctcacctgaagaacgagaaaaaaagcgacaatttgaaatgagaaggacgcttcactacaatgaaggactcaatatcaaactagctagacaattaatttcaaaagacctacacgatgatgacaaagttgaagaaatgttagagactgcacatggagaaagcatgaatacggaagaatcaaatcaaggatctactgcaagtgaccaacagcaaaataaatcacgaagttcatagaagggatttgttcaacactcttattgtttgttagatatgaacccc

SEQ ID NO: 285026 - DNA, 265 bp, Homo sapiens
ctcctggggtgcagaggatttgtgacagcctagagaacagaggaaatggttttgaaaaggcaaatggcagtgcctgaaccataaggcacaaggaatgagcccctcatcgtgagagtgcatgtgacaggagcaaaggaagcggcagctcaggaaagacaaggtcactgttcttgctcccatgacggtagcacttgttagagcaactgagtgacgtgcataattctctccaaagtaaaagtcctttttgttttttgcaattttacaa

SEQ ID NO: 285027 - DNA, 2388 bp, Homo sapiens
agcgctcccattggctgatgttggcgcgaaggtgcgcgagtcagccctcgcgctgggggcgcaggaaacaatagaggccgcgcgcacagagcgagctcttgcagcctccccgcccctcccgcaacgctcgaccccaggattcccccggctcgcctgcccgccatggccgacaaggaagcagccttcgacgacgcagtggaagaacgagtgatcaacgaggaatacaaaatatggaaaaagaacaccccttttctttatgatttggtgatgacccatgctctggagtggcccagcctaactgcccagtggcttccagatgtaaccagaccagaagggaaagatttcagcattcatcgacttgtcctggggacacacacatcggatgaacaaaaccatcttgttatagccagtgtgcagctccctaatgatgatgctcagtttgatgcgtcacactacgacagtgagaaaggagaatttggaggttttggttcagttagtggaaaaattgaaatagaaatcaagatcaaccatgaaggagaagtaaacagggcccgttatatgccccagaacccttgtatcatcgcaacaaagactccttccagtgatgttcttgtctttgactatacaaaacatccttctaaaccagatccttctggagagtgcaacccagacttgcgtctccgtggacatcagaaggaaggctatgggctttcttggaacccaaatctcagtgggcacttacttagtgcttcagatgaccataccatctgcctgtgggacatcagtgccgttccaaaggagggaaaagtggtagatgcgaagaccatctttacagggcatacggcagtagtagaagatgtttcctggcatctactccatgagtctctgtttgggtcagttgctgatgatcagaaacttatgatttgggatactcgttcaaacaatacttccaaaccaagccactcagttgatgctcacactgctgaagtgaactgcctttctttcaatccttatagtgagttcattcttgccacaggatcagctgacaagactgttgccttgtgggatctgagaaatctgaaacttaagttgcattcctttgagtcacataaggatgaaatattccaggttcagtggtcacctcacaatgagactattttagcttccagtggtactgatcgcagactgaatgtctgggatttaagtaaaattggagaggaacaatccccagaagatgcagaagacgggccaccagagttgttgtttattcatggtggtcatactgccaagatatctgatttctcctggaatcccaatgaaccttgggtgatttgttctgtatcagaagacaatatcatgcaagtgtggcaaatggcagagaacatttataatgatgaagaccctgaaggaagcgtggatccagaaggacaagggtcctagatatgtctttacttgttgtgattttagactccccttttttcttctcaaccctgagagtgatttaacactggttttgagacagactttattcagctatccctctatataataggtaccaccgataatgctattagcccaaaccgtgggtgttttctaaatattaataggggggcttgattcaacaaagccacagacttaacgttgaaattttcttcaggaattttctagtaacccaggtctaaagtagctacagaaaggggaatattatgtgtgattatttttcttcttatgctatatccccaagtttttcagactcatttaagtaaaggctagagtgagtaaggaatagagccaaatgaggtaggtgtctgagccatgaagtataaatactgaaagatgtcacttttattcaggaaatagggggagattcaagtcgtatagattcctactcgaaaatcttgacacctgactttccaggatgcacattttcatacgtagaccagtttcctcttggtttcttcagttaagtcaaaacaacacgttcctctttccccatatattcatatatttttgctcgttagtgtatttcttgagctgttttcatgttgtttatttcctgtctgtgaaatggtgtttttttttttgttgttggtttttttttttttttttttaacttgggaccaccaagttgtaaagatgtatgtttttacctgacagttataccacaggtagactgtcaagttgagaagagtgaatcaataacttgtatttgttttaaaaattaaattaatccttgataagagttgctttttttttttaggagttagtccttgaccactagtttgatgccatctccattttgggtgacctgtttcaccagcaggcctgttactctccatgactaactgtgtaagtgcttaaaatggaataaattgcttttctacataa

SEQ ID NO: 285028 - DNA, 1502 bp, Homo sapiens
agcgctcccattggctgatgttggcgcgaaggtgcgcgagtcagccctcgcgctgggggcgcaggaaacaatagaggccgcgcgcacagagcgagctcttgcagcctccccgcccctcccgcaacgctcgaccccaggattcccccggctcgcctgcccgccatggccgacaaggaagcagccttcgacgacgcagtggaagaacgagtgatcaacgaggaatacaaaatatggaaaaagaacaccccttttctttatgatttggtgatgacccatgctctggagtggcccagcctaactgcccagtggcttccagatgtaaccagaccagaagggaaagatttcagcattcatcgacttgtcctggggacacacacatcggatgaacaaaaccatcttgttatagccagtgtgcagctccctaatgatgatgctcagtttgatgcgtcacactacgacagtgagaaaggagaatttggaggttttggttcagttagtggaaaaattgaaatagaaatcaagatcaaccatgaaggagaagtaaacagggcccgttatatgccccagaacccttgtatcatcgcaacaaagactccttccagtgatgttcttgtctttgactatacaaaacatccttctaaaccagatccttctggagagtgcaacccagacttgcgtctccgtggacatcagaaggaaggctatgggctttcttggaacccaaatctcagtgggcacttacttagtgcttcagatgaccataccatctgcctgtgggacatcagtgccgttccaaaggagggaaaagtggtagatgcgaagaccatctttacagggcatacggcagtagtagaagatgtttcctggcatctactccatgagtctctgtttgggtcagttgctgatgatcagaaacttatgatttgggatactcgttcaaacaatacttccaaaccaagccactcagttgatgctcacactgctgaagtgaactgcctttctttcaatccttatagtgagttcattcttgccacaggatcagctgacaagactgttgccttgtgggatctgagaaatctgaaacttaagttgcattcctttgagtcacataaggatgaaatattccaggttcagtggtcacctcacaatgagactattttagcttccagtggtactgatcgcagactgaatgtctgggatttaagtaaaattggagaggaacaatccccagaagatgcagaagacgggccaccagagttgttgtttattcatggtggtcatactgccaagatatctgatttctcctggaatcccaatgaaccttgggtgatttgttctgtatcagaagacaatatcatgcaagtgtggcaaatggagttagtccttgaccactagtttgatgccatctccattttgggtgacctgtttcaccagcaggcctgttactctccatgactaactgtgtaagtgcttaaaatggaataaattgcttttctacataa

SEQ ID NO: 285029 - DNA, 853 bp, Homo sapiens
  misc_feature (710)..(710): n is a, c, g, or t
  misc_feature (712)..(712): n is a, c, g, or t
ggccgacccaggagggcagtgggtgcctgggctgagccgcggcctcgacatggcctaacagtgagggcaggcccgagtttgccgagtgcagtccccgcagccttcgacgacgcagtggaagaacgagtgatcaacgaggaatacaaaatatggaaaaagaacaccccttttctttatgatttggtgatgacccatgctctggagtggcccagcctaactgcccagtggcttccagatgtaaccagaccagaagggaaagatttcagcattcatcgacttgtcctggggacacacacatcggatgaacaaaaccatcttgttatagccagtgtgcagctccctaatgatgatgctcagtttgatgcgtcacactacgacagtgagaaaggagaatttggaggttttggttcagttagtggaaaaattgaaatagaaatcaagatcaaccatgaaggagaagtaaacagggcccgttatatgccccagaacccttgtatcatcgcaacaaagactccttccagtgatgttcttgtctttgactatacaaaacatccttctaaaccagatccttctggagagtgcaacccagacttgcgtctccgtggacatcagaaggaaggctatgggctttcttggaacccaaatctcagtgggcacttacttagtgcttcagatgaccataccatctggcctgtgggcatcagtgccgntncaaagggagggaaagtgggagaatgtgacatttttaaggggattagggattattttgttccgggctttattcatagttttgttgggcagtggtgtgaccgaactatgattgggagacgttacaatttcccagcattattgc

SEQ ID NO: 285030 - DNA, 710 bp, Homo sapiens
  misc_feature (524)..(524): n is a, c, g, or t
actctttttgtggtccgtgtgtgtgttagtgtgcgtgctcgtcgtggtttattattttttcttgttgtgctattctctcggtttttttcgtcctttttttttttggtctgctggccctattttttctcttttgttgtggtttcgtcctcgttttcgctcttctgttttttttttttcctcctcttgctttttttttttgttgtgtttttcgccccctttttttcctccccccgtttttgtttcttttccccaatgtgtgcctctttgtcccgtttttcctctcttttcctctttttttatttcctctcccgcgctcctttcgggttatatatataattccccctctttgtggtggccccccttttttccacaaaatgggggtggggcgcggttggggcgcccccccgcggagagaattttttgtcgcgcgcgccccccccctttttttttttttttttttttttttttttttttttttttttttttttttttttttttttttttttttttttttttttcagganccggtatttattatcaaagtcatattaatccttgataagagttgctttttttttttaggagttagtccttgaccactagtttgatgccatctccattttgggtgacctgtttcaccagcaggcctgttactctccatgactaactgtgtaagtgcttaaaatggaataaattgcttttctacataa

SEQ ID NO: 285031 - DNA, 820 bp, Homo sapiens
  misc_feature (356)..(356): n is a, c, g, or t
  misc_feature (366)..(366): n is a, c, g, or t
accaccaagttgtaaaaacatacatctttacaacttggtggtcccaagttgtaaagatgtatgtttttacctgacagttataccacaggtagactgtcaagttgagaagagtgaatcaataacttgtatttgttttaaaaattaaattaatccttgataagagttgctttttttttttaggagttagtccttgaccactagtttgatgccatctccattttgggtgacctgtttcaccagcaggcctgttactctccatgactaactgtgtaagtgcttaaaatggaataaattgcttttctacataaaaaaaaaaaaaaaaaaaaaaaaaacaaaaaaaaaaaaaaaaaaaaaanaaaaaaaaanaaaaaaaaaaaaaaaaaaaacgggggggcggcgcgtaaaaaaattccaccccgggggggcacaaccagtaagacgcgcactccacgatttgttaatcaacagagggggcccacacatgagagggcgcacattaaaaaagaggacgacgcgcggagccgtcttaaaacacaacgaggcgggaagctatggaaccaaaccaacgccccgacatggatattacttcgtttggaagagagacaccccatattgtcgggggggccgaaacaaaatttgttggcgaacccacatcatctccagacaaatatttacgcccgtgagaacataatcaacaacctcgcagggttatcattagtgactacccacacgcatcatcaaattattgccgctcgagaaagactgctccaccggagctattttatgaaaacatttataccgcgggtgcctaaattaatgg

SEQ ID NO: 285032 - DNA, 757 bp, Homo sapiens
agcgctcccattggctgatgttggcgcgaaggtgcgcgagtcagccctcgcgctgggggcgcaggaaacaatagaggccgcgcgcacagagcgagctcttgcagcctccccgcccctcccgcaacgctcgaccccaggattcccccggctcgcctgcccgccatggccgacaaggaagcagccttcgacgacgcagtggaagaacgagtgatcaacgaggaatacaaaatatggaaaaagaacaccccttttctttatgatttggtgatgacccatgctctggagtggcccagcctaactgcccagtggcttccagatgtaaccaggtgacatgactctcccgaacgttattttgatgtattttcagtgtagatttctcatattgattttcttttttccgctcttcagtcacccggagaaggcatgtgatcaaaacctcttggtgacattttttctaggccacaaagtaaggcaaaataacaaaatgattttgtaacttacctgacaagagaaaacatattggcgtttttttctcaatactgaattaaatagctgtagctgatgataatacctgtaataatagtggctgtaccaaataatagtacaaaacttgtcaactttcaaaaagtattatggccaggagcagtggctcacacttggaatccgagcactttgggaggcccaggcaggagacttacttgaggccaggagttggagaccagccctgggaataccctcgtctctactgcccccccac

SEQ ID NO: 285033 - DNA, 512 bp, Homo sapiens
  misc_feature (16)..(16): n is a, c, g, or t
  misc_feature (21)..(21): n is a, c, g, or t
gcacgagctcgtgccntgganatgtctgggatttaagtaaaattggagaggaacaatccccagaagatgcagaagacgggccaccagagttgttgtttattcatggtggtcatactgccaagatatctgatttctcctggaatcccaatgaaccttgggtgatttgttctgtatcagaagacaatatcatgcaagtgtggcaaatggcagagaacatttataatgatgaagaccctgaaggaagcgtggatccagaaggacaagggtcctagatatgtctttacttgttgtgattttagactccccttttttcttctcaaccctgagagtgatttaacactggttttgagacagactttattcagctatccctctatataataggagttagtccttgaccactagtttgatgccatctccattttgggtgacctgtttcaccagcaggcctgttactctccatgactaactgtgtaagtgcttaaaatggaataaattgcttttctacataa

SEQ ID NO: 285034 - DNA, 3173 bp, Homo sapiens
agcgctcccattggctgatgttggcgcgaaggtgcgcgagtcagccctcgcgctgggggcgcaggaaacaatagaggccgcgcgcacagagcgagctcttgcagcctccccgcccctcccgcaacgctcgaccccaggattcccccggctcgcctgcccgccatggccgacaaggaagcagccttcgacgacgcagtggaagaacgagtgatcaacgaggaatacaaaatatggaaaaagaacaccccttttctttatgatttggtgatgacccatgctctggagtggcccagcctaactgcccagtggcttccagatgtaaccagaccagaagggaaagatttcagcattcatcgacttgtcctggggacacacacatcggatgaacaaaaccatcttgttatagccagtgtgcagctccctaatgatgatgctcagtttgatgcgtcacactacgacagtgagaaaggagaatttggaggttttggttcagttagtggaaaaattgaaatagaaatcaagatcaaccatgaaggagaagtaaacagggcccgttatatgccccagaacccttgtatcatcgcaacaaagactccttccagtgatgttcttgtctttgactatacaaaacatccttctaaaccagatccttctggagagtgcaacccagacttgcgtctccgtggacatcagaaggaaggctatgggctttcttggaacccaaatctcagtgggcacttacttagtgcttcagatgaccataccatctgcctgtgggacatcagtgccgttccaaaggagggaaaagtggtagatgcgaagaccatctttacagggcatacggcagtagtagaagatgtttcctggcatctactccatgagtctctgtttgggtcagttgctgatgatcagaaacttatgatttgggatactcgttcaaacaatacttccaaaccaagccactcagttgatgctcacactgctgaagtgaactgcctttctttcaatccttatagtgagttcattcttgccacaggatcagctgacaagactgttgccttgtgggatctgagaaatctgaaacttaagttgcattcctttgagtcacataaggatgaaatattccaggttcagtggtcacctcacaatgagactattttagcttccagtggtactgatcgcagactgaatgtctgggatttaagtaaaattggagaggaacaatccccagaagatgcagaagacgggccaccagagttgttgtttattcatggtggtcatactgccaagatatctgatttctcctggaatcccaatgaaccttgggtgatttgttctgtatcagaagacaatatcatgcaagtgtggcaaatggcagagaacatttataatgatgaagaccctgaaggaagcgtggatccagaaggacaagggtcctagatatgtctttacttgttgtgattttagactccccttttttcttctcaaccctgagagtgatttaacactggttttgagacagactttattcagctatccctctatataataggtaccaccgataatgctattagcccaaaccgtgggtgttttctaaatattaataggggggcttgattcaacaaagccacagacttaacgttgaaattttcttcaggaattttctagtaacccaggtctaaagtagctacagaaaggggaatattatgtgtgattatttttcttcttatgctatatccccaagtttttcagactcatttaagtaaaggctagagtgagtaaggaatagagccaaatgaggtaggtgtctgagccatgaagtataaatactgaaagatgtcacttttattcaggaaatagggggagattcaagtcgtatagattcctactcgaaaatcttgacacctgactttccaggatgcacattttcatacgtagaccagtttcctcttggtttcttcagttaagtcaaaacaacacgttcctctttccccatatattcatatatttttgctcgttagtgtatttcttgagctgttttcatgttgtttatttcctgtctgtgaaatggtgtttttttttttgttgttggtttttttttttttttttttaacttgggaccaccaagttgtaaagatgtatgtttttacctgacagttataccacaggtagactgtcaagttgagaagagtgaatcaataacttgtatttgttttaaaaattaaattaatccttgataagagttgctttttttttttaggagttagtccttgaccactagtttgatgccatctccattttgggtgacctgtttcaccagcaggcctgttactctccatgactaactgtgtaagtgcttaaaatggaataaattgcttttctacataaccccatgctgatgggttttatttagtataaaacatccatcaaacaccagtctctggcttctagaagagtccttcagatgacagttgttgtccatggtctttgactatcaagagcagaattaaatgtaatagtcccagagctgtagaaaagaactttactccttcccagggaaagtgaaagacataaaacactgaatcagaggtggcacagattagtctttgataaggtaacgtttctttgaagtctgtctgtagagaactacatggacttccaagagtgtcaaaggcagtgtggtagagagaatttaaggcaagatttaaatttggaaaaggtgcttgaaccttttctcagaggttttatttccccagtatgtttttcactggggcctttacttaggttagaaataataggctttgaaggcctctatcaccagatgcaataaccagataaaattcctgttttttcccaatcgcttagttttttgttgttgttgttttttaactgagtagatcattctgacccagaactactttcatgaggtaagatctttgggaaaatctgaatagcgttaaccattagattcaaatctcaaatggtttcttttcaagtctagttgttttagagtatagtgagaaataccttgacacaattttaagagtaaactatatgggtcagcatatccttgaacaaaaagtagactttgtaaaagtattcatttaaattctaacactcgtggcacaaaagaatggaaattgtaaacccatgtaatggaaattggctatctt

SEQ ID NO: 285035 - DNA, 2702 bp, Homo sapiens
agcgctcccattggctgatgttggcgcgaaggtgcgcgagtcagccctcgcgctgggggcgcaggaaacaatagaggccgcgcgcacagagcgagctcttgcagcctccccgcccctcccgcaacgctcgaccccaggattcccccggctcgcctgcccgccatggccgacaaggaagcagccttcgacgacgcagtggaagaacgagtgatcaacgaggaatacaaaatatggaaaaagaacaccccttttctttatgatttggtgatgacccatgctctggagtggcccagcctaactgcccagtggcttccagatgtaaccagaccagaagggaaagatttcagcattcatcgacttgtcctggggacacacacatcggatgaacaaaaccatcttgttatagccagtgtgcagctccctaatgatgatgctcagtttgatgcgtcacactacgacagtgagaaaggagaatttggaggttttggttcagttagtggaaaaattgaaatagaaatcaagatcaaccatgaaggagaagtaaacagggcccgttatatgccccagaacccttgtatcatcgcaacaaagactccttccagtgatgttcttgtctttgactatacaaaacatccttctaaaccagatccttctggagagtgcaacccagacttgcgtctccgtggacatcagaaggaaggctatgggctttcttggaacccaaatctcagtgggcacttacttagtgcttcagatgaccataccatctgcctgtgggacatcagtgccgttccaaaggagggaaaagtggtagatgcgaagaccatctttacagggcatacggcagtagtagaagatgtttcctggcatctactccatgagtctctgtttgggtcagttgctgatgatcagaaacttatgatttgggatactcgttcaaacaatacttccaaaccaagccactcagttgatgctcacactgctgaagtgaactgcctttctttcaatccttatagtgagttcattcttgccacaggatcagctgacaagactgttgccttgtgggatctgagaaatctgaaacttaagttgcattcctttgagtcacataaggatgaaatattccaggttcagtggtcacctcacaatgagactattttagcttccagtggtactgatcgcagactgaatgtctgggatttaagtaaaattggagaggaacaatccccagaagatgcagaagacgggccaccagagttgttgtttattcatggtggtcatactgccaagatatctgatttctcctggaatcccaatgaaccttgggtgatttgttctgtatcagaagacaatatcatgcaagtgtggcaaatggcagagaacatttataatgatgaagaccctgaaggaagcgtggatccagaaggacaagggtcctagatatgtctttacttgttgtgattttagactccccttttttcttctcaaccctgagagtgatttaacactggttttgagacagactttattcagctatccctctatataataggtaccaccgataatgctattagcccaaaccgtgggtgttttctaaatattaataggggggcttgattcaacaaagccacagacttaacgttgaaattttcttcaggaattttctagtaacccaggtctaaagtagctacagaaaggggaatattatgtgtgattatttttcttcttatgctatatccccaagtttttcagactcatttaagtaaaggctagagtgagtaaggaatagagccaaatgaggtaggtgtctgagccatgaagtataaatactgaaagatgtcacttttattcaggaaatagggggagattcaagtcgtatagattcctactcgaaaatcttgacacctgactttccaggatgcacattttcatacgtagaccagtttcctcttggtttcttcagttaagtcaaaacaacacgttcctctttccccatatattcatatatttttgctcgttagtgtatttcttgagctgttttcatgttgtttatttcctgtctgtgaaatggtgtttttttttttgttgttggtttttttttttttttttttaacttgggaccaccaagttgtaaagatgtatgtttttacctgacagttataccacaggtagactgtcaagttgagaagagtgaatcaataacttgtatttgttttaaaaattaaattaatccttgataagagttgctttttttttttaggagttagtccttgaccactagtttgatgccatctccattttgggtgacctgtttcaccagcaggcctgttactctccatgactaactgtgtaagtgcttaaaatggaataaattgcttttctacataaaaaaaaaaaaaaaaaaaaaaaaaacatatactcatcaaatatttctattaaaataaaaaaaaaactcggggggggcccggccccaattcccctatgtgggtctttacaattactgccgtcgtttacaactctggactggaaaaccctgcttcccaacttaatgcttggacacatcccctttgccagtgcctataacaaaagccccaccatcgctttcaacattgcacctgatggcaatgcaattagactaatttttgtaaaatccttaaattttaaacatctttttaccatggccaatgcaaatctttaaaaaa

SEQ ID NO: 285036 - DNA, 2309 bp, Homo sapiens
aagctaggtacgagactggtgtgttaatcggcaccgaggacgtcacgctcgaccccaggattcccccggctcgcctgcccgccatggccgacaaggaagcagccttcgacgacgcagtggaagaacgagtgatcaacgaggaatacaaaatatggaaaaagaacaccccttttctttatgatttggtgatgacccatgctctggagtggcccagcctaactgcccagtggcttccagatgtaaccagaccagaagggaaagatttcagcattcatcgacttgtcctggggacacacacatcggatgaacaaaaccatcttgttatagccagtgtgcagctccctaatgatgatgctcagtttgatgcgtcacactacgacagtgagaaaggagaatttggaggttttggttcagttagtggaaaaattgaaatagaaatcaagatcaaccatgaaggagaagtaaacagggcccgttatatgccccagaacccttgtatcatcgcaacaaagactccttccagtgatgttcttgtctttgactatacaaaacatccttctaaaccagatccttctggagagtgcaacccagacttgcgtctccgtggacatcagaaggaaggctatgggctttcttggaacccaaatctcagtgggcacttacttagtgcttcagatgaccataccatctgcctgtgggacatcagtgccgttccaaaggagggaaaagtggtagatgcgaagaccatctttacagggcatacggcagtagtagaagatgtttcctggcatctactccatgagtctctgtttgggtcagttgctgatgatcagaaacttatgatttgggatactcgttcaaacaatacttccaaaccaagccactcagttgatgctcacactgctgaagtgaactgcctttctttcaatccttatagtgagttcattcttgccacaggatcagctgacaagactgttgccttgtgggatctgagaaatctgaaacttaagttgcattcctttgagtcacataaggatgaaatattccaggttcagtggtcacctcacaatgagactattttagcttccagtggtactgatcgcagactgaatgtctgggatttaagtaaaattggagaggaacaatccccagaagatgcagaagacgggccaccagagttgttgtttattcatggtggtcatactgccaagatatctgatttctcctggaatcccaatgaaccttgggtgatttgttctgtatcagaagacaatatcatgcaagtgtggcaaatggcagagaacatttataatgatgaagaccctgaaggaagcgtggatccagaaggacaagggtcctagatatgtctttacttgttgtgattttagactccccttttttcttctcaaccctgagagtgatttaacactggttttgagacagactttattcagctatccctctatataataggtaccaccgataatgctattagcccaaaccgtgggtgttttctaaatattaataggggggcttgattcaacaaagccacagacttaacgttgaaattttcttcaggaattttctagtaacccaggtctaaagtagctacagaaaggggaatattatgtgtgattatttttcttcttatgctatatccccaagtttttcagactcatttaagtaaaggctagagtgagtaaggaatagagccaaatgaggtaggtgtctgagccatgaagtataaatactgaaagatgtcacttttattcaggaaatagggggagattcaagtcgtatagattcctactcgaaaatcttgacacctgactttccaggatgcacattttcatacgtagaccagtttcctcttggtttcttcagttaagtcaaaacaacacgttcctctttccccatatattcatatatttttgctcgttagtgtatttcttgagctgttttcatgttgtttatttcctgtctgtgaaatggtgtttttttttttgttgttggtttttttttttttttttttaacttgggaccaccaagttgtaaagatgtatgtttttacctgacagttataccacaggtagactgtcaagttgagaagagtgaatcaataacttgtatttgttttaaaaattaaattaatccttgataagagttgctttttttttttaggagttagtccttgaccactagtttgatgccatctccattttgggtgacctgtttcaccagcaggcctgttactctccatgactaactgtgtaagtgcttaaaatggaataaattgcttttctacataa

SEQ ID NO: 285037 - DNA, 2307 bp, Homo sapiens
ggccgacccaggagggcagtgggtgcctgggctgagccgcggcctcgacatggcctaacagtgagggcaggcccgagtttgccgagtgcagtccccgcagccttcgacgacgcagtggaagaacgagtgatcaacgaggaatacaaaatatggaaaaagaacaccccttttctttatgatttggtgatgacccatgctctggagtggcccagcctaactgcccagtggcttccagatgtaaccagaccagaagggaaagatttcagcattcatcgacttgtcctggggacacacacatcggatgaacaaaaccatcttgttatagccagtgtgcagctccctaatgatgatgctcagtttgatgcgtcacactacgacagtgagaaaggagaatttggaggttttggttcagttagtggaaaaattgaaatagaaatcaagatcaaccatgaaggagaagtaaacagggcccgttatatgccccagaacccttgtatcatcgcaacaaagactccttccagtgatgttcttgtctttgactatacaaaacatccttctaaaccagatccttctggagagtgcaacccagacttgcgtctccgtggacatcagaaggaaggctatgggctttcttggaacccaaatctcagtgggcacttacttagtgcttcagatgaccataccatctgcctgtgggacatcagtgccgttccaaaggagggaaaagtggtagatgcgaagaccatctttacagggcatacggcagtagtagaagatgtttcctggcatctactccatgagtctctgtttgggtcagttgctgatgatcagaaacttatgatttgggatactcgttcaaacaatacttccaaaccaagccactcagttgatgctcacactgctgaagtgaactgcctttctttcaatccttatagtgagttcattcttgccacaggatcagctgacaagactgttgccttgtgggatctgagaaatctgaaacttaagttgcattcctttgagtcacataaggatgaaatattccaggttcagtggtcacctcacaatgagactattttagcttccagtggtactgatcgcagactgaatgtctgggatttaagtaaaattggagaggaacaatccccagaagatgcagaagacgggccaccagagttgttgtttattcatggtggtcatactgccaagatatctgatttctcctggaatcccaatgaaccttgggtgatttgttctgtatcagaagacaatatcatgcaagtgtggcaaatggcagagaacatttataatgatgaagaccctgaaggaagcgtggatccagaaggacaagggtcctagatatgtctttacttgttgtgattttagactccccttttttcttctcaaccctgagagtgatttaacactggttttgagacagactttattcagctatccctctatataataggtaccaccgataatgctattagcccaaaccgtgggtgttttctaaatattaataggggggcttgattcaacaaagccacagacttaacgttgaaattttcttcaggaattttctagtaacccaggtctaaagtagctacagaaaggggaatattatgtgtgattatttttcttcttatgctatatccccaagtttttcagactcatttaagtaaaggctagagtgagtaaggaatagagccaaatgaggtaggtgtctgagccatgaagtataaatactgaaagatgtcacttttattcaggaaatagggggagattcaagtcgtatagattcctactcgaaaatcttgacacctgactttccaggatgcacattttcatacgtagaccagtttcctcttggtttcttcagttaagtcaaaacaacacgttcctctttccccatatattcatatatttttgctcgttagtgtatttcttgagctgttttcatgttgtttatttcctgtctgtgaaatggtgtttttttttttgttgttggtttttttttttttttttttaacttgggaccaccaagttgtaaagatgtatgtttttacctgacagttataccacaggtagactgtcaagttgagaagagtgaatcaataacttgtatttgttttaaaaattaaattaatccttgataagagttgctttttttttttaggagttagtccttgaccactagtttgatgccatctccattttgggtgacctgtttcaccagcaggcctgttactctccatgactaactgtgtaagtgcttaaaatggaataaattgcttttctacataa

SEQ ID NO: 285038 - DNA, 2552 bp, Homo sapiens
cgccagttccctgggaccgatttcggtcgcagctggcgaagccagcggtggggcccccggccagtgtttgtttctcttcctgcctccgatatcggtttctcggcctctgtcccgagcgtggggacaccgcttcctacccacaaggctcgaagctcgggcctcctcgtcgggcttgtgagtttcggcgcgcacgagcgtgctccgaaggcctggctggccccttggcctggaacgggtaacggagtgtttggcggggatggcccgaggagtttcggcgccgcgaaagtggagagtgtggatgcctctgccgtggggatttagacaaatcacctccatttcatgcagccttcgacgacgcagtggaagaacgagtgatcaacgaggaatacaaaatatggaaaaagaacaccccttttctttatgatttggtgatgacccatgctctggagtggcccagcctaactgcccagtggcttccagatgtaaccagaccagaagggaaagatttcagcattcatcgacttgtcctggggacacacacatcggatgaacaaaaccatcttgttatagccagtgtgcagctccctaatgatgatgctcagtttgatgcgtcacactacgacagtgagaaaggagaatttggaggttttggttcagttagtggaaaaattgaaatagaaatcaagatcaaccatgaaggagaagtaaacagggcccgttatatgccccagaacccttgtatcatcgcaacaaagactccttccagtgatgttcttgtctttgactatacaaaacatccttctaaaccagatccttctggagagtgcaacccagacttgcgtctccgtggacatcagaaggaaggctatgggctttcttggaacccaaatctcagtgggcacttacttagtgcttcagatgaccataccatctgcctgtgggacatcagtgccgttccaaaggagggaaaagtggtagatgcgaagaccatctttacagggcatacggcagtagtagaagatgtttcctggcatctactccatgagtctctgtttgggtcagttgctgatgatcagaaacttatgatttgggatactcgttcaaacaatacttccaaaccaagccactcagttgatgctcacactgctgaagtgaactgcctttctttcaatccttatagtgagttcattcttgccacaggatcagctgacaagactgttgccttgtgggatctgagaaatctgaaacttaagttgcattcctttgagtcacataaggatgaaatattccaggttcagtggtcacctcacaatgagactattttagcttccagtggtactgatcgcagactgaatgtctgggatttaagtaaaattggagaggaacaatccccagaagatgcagaagacgggccaccagagttgttgtttattcatggtggtcatactgccaagatatctgatttctcctggaatcccaatgaaccttgggtgatttgttctgtatcagaagacaatatcatgcaagtgtggcaaatggcagagaacatttataatgatgaagaccctgaaggaagcgtggatccagaaggacaagggtcctagatatgtctttacttgttgtgattttagactccccttttttcttctcaaccctgagagtgatttaacactggttttgagacagactttattcagctatccctctatataataggtaccaccgataatgctattagcccaaaccgtgggtgttttctaaatattaataggggggcttgattcaacaaagccacagacttaacgttgaaattttcttcaggaattttctagtaacccaggtctaaagtagctacagaaaggggaatattatgtgtgattatttttcttcttatgctatatccccaagtttttcagactcatttaagtaaaggctagagtgagtaaggaatagagccaaatgaggtaggtgtctgagccatgaagtataaatactgaaagatgtcacttttattcaggaaatagggggagattcaagtcgtatagattcctactcgaaaatcttgacacctgactttccaggatgcacattttcatacgtagaccagtttcctcttggtttcttcagttaagtcaaaacaacacgttcctctttccccatatattcatatatttttgctcgttagtgtatttcttgagctgttttcatgttgtttatttcctgtctgtgaaatggtgtttttttttttgttgttggtttttttttttttttttttaacttgggaccaccaagttgtaaagatgtatgtttttacctgacagttataccacaggtagactgtcaagttgagaagagtgaatcaataacttgtatttgttttaaaaattaaattaatccttgataagagttgctttttttttttaggagttagtccttgaccactagtttgatgccatctccattttgggtgacctgtttcaccagcaggcctgttactctccatgactaactgtgtaagtgcttaaaatggaataaattgcttttctacataa

SEQ ID NO: 285039 - DNA, 2334 bp, Homo sapiens
agcgctcccattggctgatgttggcgcgaaggtgcgcgagtcagccctcgcgctgggggcgcaggaaacaatagaggccgcgcgcacagagcgagctcttgcagcctccccgcccctcccgcaacgctcgaccccaggattcccccggctcgcctgcccgccatggccgacaaggaagcagccttcgacgacgcagtggaagaacgagtgatcaacgaggaatacaaaatatggaaaaagaacaccccttttctttatgatttggtgatgacccatgctctggagtggcccagcctaactgcccagtggcttccagatgtaaccagaccagaagggaaagatttcagcattcatcgacttgtcctggggacacacacatcggatgaacaaaaccatcttgttatagccagtgtgcagctccctaatgatgatgctcagtttgatgcgtcacactacgacagtgagaaaggagaatttggaggttttggttcagttagtggaaaaattgaaatagaaatcaagatcaaccatgaaggagaagtaaacagggcccgttatatgccccagaacccttgtatcatcgcaacaaagactccttccagtgatgttcttgtctttgactatacaaaacatccttctaaaccagatccttctggagagtgcaacccagacttgcgtctccgtggacatcagaaggaaggctatgggctttcttggaacccaaatctcagtgggcacttacttagtgcttcagatgaccataccatctgcctgtgggacatcagtgccgttccaaaggagggaaaagtggtagatgcgaagaccatctttacagggcatacggcagtagtagaagatgtttcctggcatctactccatgagtctctgtttgggtcagttgctgatgatcagaaacttatgatttgggatactcgttcaaacaatacttccaaaccaagccactcagttgatgctcacactgctgaagtgaactgcctttctttcaatccttatagtgagttcattcttgccacaggatcagctgacaagactgttgccttgtgggatctgagaaatctgaaacttaagttgcattcctttgagtcacataaggatgaaatattccaggttcagtggtcacctcacaatgagactattttagcttccagtggtactgatcgcagactgaatgtctgggatttaagtaaaattggagaggaacaatccccagaagatgcagaagacgggccaccagagttgttgtttattcatggtggtcatactgccaagatatctgatttctcctggaatcccaatgaaccttgggtgatttgttctgtatcagaagacaatatcatgcaagtgtggcaaatggcagagaacatttataatgatgaagaccctgaaggaagcgtggatccagaaggacaagggtcctagatatgtctttacttgttgtgattttagactccccttttttcttctcaaccctgagagtgatttaacactggttttgagacagactttattcagctatccctctatataataggtaccaccgataatgctattagcccaaaccgtgggtgttttctaaatattaataggggggcttgattcaacaaagccacagacttaacgttgaaattttcttcaggaattttctagtaacccaggtctaaagtagctacagaaaggggaatattatgtgtgattatttttcttcttatgctatatccccaagtttttcagactcatttaagtaaaggctagagtgagtaaggaatagagccaaatgaggtaggtgtctgagccatgaagtataaatactgaaagatgtcacttttattcaggaaatagggggagattcaagtcgtatagattcctactcgcctcttggtttcttcagttaagtcaaaacaacacgttcctctttccccatatattcatatatttttgctcgttagtgtatttcttgagctgttttcatgttgtttatttcctgtctgtgaaatggtgtttttttttttgttgttggtttttttttttttttttttaacttgggaccaccaagttgtaaagatgtatgtttttacctgacagttataccacaggtagactgtcaagttgagaagagtgaatcaataacttgtatttgttttaaaaattaaattaatccttgataagagttgctttttttttttaggagttagtccttgaccactagtttgatgccatctccattttgggtgacctgtttcaccagcaggcctgttactctccatgactaactgtgtaagtgcttaaaatggaataaattgcttttctacataa

SEQ ID NO: 285040 - DNA, 2510 bp, Homo sapiens
agcgctcccattggctgatgttggcgcgaaggtgcgcgagtcagccctcgcgctgggggcgcaggaaacaatagaggccgcgcgcacagagcgagctcttgcagcctccccgcccctcccgcaacgctcgaccccaggattcccccggctcgcctgcccgccatggccgacaaggaagcagccttcgacgacgcagtggaagaacgagtgatcaacgaggaatacaaaatatggaaaaagaacaccccttttctttatgatttggtgatgacccatgctctggagtggcccagcctaactgcccagtggcttccagatgtaaccagaccagaagggaaagatttcagcattcatcgacttgtcctggggacacacacatcggatgaacaaaaccatcttgttatagccagtgtgcagctccctaatgatgatgctcagtttgatgcgtcacactacgacagtgagaaaggagaatttggaggttttggttcagttagtggaaaaattgaaatagaaatcaagatcaaccatgaaggagaagtaaacagggcccgttatatgccccagaacccttgtatcatcgcaacaaagactccttccagtgatgttcttgtctttgactatacaaaacatccttctaaaccagatccttctggagagtgcaacccagacttgcgtctccgtggacatcagaaggaaggctatgggctttcttggaacccaaatctcagtgggcacttacttagtgcttcagatgaccataccatctgcctgtgggacatcagtgccgttccaaaggagggaaaagtggtagatgcgaagaccatctttacagggcatacggcagtagtagaagatgtttcctggcatctactccatgagtctctgtttgggtcagttgctgatgatcagaaacttatgatttgggatactcgttcaaacaatacttccaaaccaagccactcagttgatgctcacactgctgaagtgaactgcctttctttcaatccttatagtgagttcattcttgccacaggatcagctgacaagactgttgccttgtgggatctgagaaatctgaaacttaagttgcattcctttgagtcacataaggatgaaatattccaggttcagtggtcacctcacaatgagactattttagcttccagtggtactgatcgcagactgaatgtctgggatttaagtaaaattggagaggaacaatccccagaagatgcagaagacgggccaccagagttgttgtttattcatggtggtcatactgccaagatatctgatttctcctggaatcccaatgaaccttgggtgatttgttctgtatcagaagacaatatcatgcaagtgtggcaaatgatggtctctcactttttcacccaggctggagtgcaatggtgcaatctcggctcactgcaacttccacctcccaggttcgatcgattctcctgcctcagccttctgagtagctgggactataggcagagaacatttataatgatgaagaccctgaaggaagcgtggatccagaaggacaagggtcctagatatgtctttacttgttgtgattttagactccccttttttcttctcaaccctgagagtgatttaacactggttttgagacagactttattcagctatccctctatataataggtaccaccgataatgctattagcccaaaccgtgggtgttttctaaatattaataggggggcttgattcaacaaagccacagacttaacgttgaaattttcttcaggaattttctagtaacccaggtctaaagtagctacagaaaggggaatattatgtgtgattatttttcttcttatgctatatccccaagtttttcagactcatttaagtaaaggctagagtgagtaaggaatagagccaaatgaggtaggtgtctgagccatgaagtataaatactgaaagatgtcacttttattcaggaaatagggggagattcaagtcgtatagattcctactcgaaaatcttgacacctgactttccaggatgcacattttcatacgtagaccagtttcctcttggtttcttcagttaagtcaaaacaacacgttcctctttccccatatattcatatatttttgctcgttagtgtatttcttgagctgttttcatgttgtttatttcctgtctgtgaaatggtgtttttttttttgttgttggtttttttttttttttttttaacttgggaccaccaagttgtaaagatgtatgtttttacctgacagttataccacaggtagactgtcaagttgagaagagtgaatcaataacttgtatttgttttaaaaattaaattaatccttgataagagttgctttttttttttaggagttagtccttgaccactagtttgatgccatctccattttgggtgacctgtttcaccagcaggcctgttactctccatgactaactgtgtaagtgcttaaaatggaataaattgcttttctacataa

SEQ ID NO: 285041 - DNA, 2556 bp, Homo sapiens
agcgctcccattggctgatgttggcgcgaaggtgcgcgagtcagccctcgcgctgggggcgcaggaaacaatagaggccgcgcgcacagagcgagctcttgcagcctccccgcccctcccgcaacgctcgaccccaggattcccccggctcgcctgcccgccatggccgacaaggaagcagccttcgacgacgcagtggaagaacgagtgatcaacgaggaatacaaaatatggaaaaagaacaccccttttctttatgatttggtgatgacccatgctctggagtggcccagcctaactgcccagtggcttccagatgtaaccagaccagaagggaaagatttcagcattcatcgacttgtcctggggacacacacatcggatgaacaaaaccatcttgttatagccagtgtgcagctccctaatgatgatgctcagtttgatgcgtcacactacgacagtgagaaaggagaatttggaggttttggttcagttagtggaaaaattgaaatagaaatcaagatcaaccatgaaggagaagtaaacagggcccgttatatgccccagaacccttgtatcatcgcaacaaagactccttccagtgatgttcttgtctttgactatacaaaacatccttctaaaccagatccttctggagagtgcaacccagacttgcgtctccgtggacatcagaaggaaggctatgggctttcttggaacccaaatctcagtgggcacttacttagtgcttcagatgaccataccatctgcctgtgggacatcagtgccgttccaaaggagggaaaagtggtagatgcgaagaccatctttacagggcatacggcagtagtagaagatgtttcctggcatctactccatgagtctctgtttgggtcagttgctgatgatcagaaacttatgatttgggatactcgttcaaacaatacttccaaaccaagccactcagttgatgctcacactgctgaagtgaactgcctttctttcaatccttatagtgagttcattcttgccacaggatcagctgacaagactgttgccttgtgggatctgagaaatctgaaacttaagttgcattcctttgagtcacataaggatgaaatattccaggttcagtggtcacctcacaatgagactattttagcttccagtggtactgatcgcagactgaatgtctgggatttaagtaaaattggagaggaacaatccccagaagatgcagaagacgggccaccagagttgttgtttattcatggtggtcatactgccaagatatctgatttctcctggaatcccaatgaaccttgggtgatttgttctgtatcagaagacaatatcatgcaagtgtggcaaatggttgtctccggatactttcatccaagagttgaatagttgtaacacagattgtgtggcccaaaagctataaagtatttactctctggcttcctggcctaatctgttgttgaaaccttgagttttagaagaagtcttcatgtttaaattctttttcttgtttttgggcaggcagagaacatttataatgatgaagaccctgaaggaagcgtggatccagaaggacaagggtcctagatatgtctttacttgttgtgattttagactccccttttttcttctcaaccctgagagtgatttaacactggttttgagacagactttattcagctatccctctatataataggtaccaccgataatgctattagcccaaaccgtgggtgttttctaaatattaataggggggcttgattcaacaaagccacagacttaacgttgaaattttcttcaggaattttctagtaacccaggtctaaagtagctacagaaaggggaatattatgtgtgattatttttcttcttatgctatatccccaagtttttcagactcatttaagtaaaggctagagtgagtaaggaatagagccaaatgaggtaggtgtctgagccatgaagtataaatactgaaagatgtcacttttattcaggaaatagggggagattcaagtcgtatagattcctactcgaaaatcttgacacctgactttccaggatgcacattttcatacgtagaccagtttcctcttggtttcttcagttaagtcaaaacaacacgttcctctttccccatatattcatatatttttgctcgttagtgtatttcttgagctgttttcatgttgtttatttcctgtctgtgaaatggtgtttttttttttgttgttggtttttttttttttttttttaacttgggaccaccaagttgtaaagatgtatgtttttacctgacagttataccacaggtagactgtcaagttgagaagagtgaatcaataacttgtatttgttttaaaaattaaattaatccttgataagagttgctttttttttttaggagttagtccttgaccactagtttgatgccatctccattttgggtgacctgtttcaccagcaggcctgttactctccatgactaactgtgtaagtgcttaaaatggaataaattgcttttctacataa

SEQ ID NO: 285042 - DNA, 2110 bp, Homo sapiens
cgtgcactggcccgtcgctaactgccgtctggattggagaaagtcctgaccagaagggaaagatttcagcattcatcgacttgtcctggggacacacacatcggatgaacaaaaccatcttgttatagccagtgtgcagctccctaatgatgatgctcagtttgatgcgtcacactacgacagtgagaaaggagaatttggaggttttggttcagttagtggaaaaattgaaatagaaatcaagatcaaccatgaaggagaagtaaacagggcccgttatatgccccagaacccttgtatcatcgcaacaaagactccttccagtgatgttcttgtctttgactatacaaaacatccttctaaaccagatccttctggagagtgcaacccagacttgcgtctccgtggacatcagaaggaaggctatgggctttcttggaacccaaatctcagtgggcacttacttagtgcttcagatgaccataccatctgcctgtgggacatcagtgccgttccaaaggagggaaaagtggtagatgcgaagaccatctttacagggcatacggcagtagtagaagatgtttcctggcatctactccatgagtctctgtttgggtcagttgctgatgatcagaaacttatgatttgggatactcgttcaaacaatacttccaaaccaagccactcagttgatgctcacactgctgaagtgaactgcctttctttcaatccttatagtgagttcattcttgccacaggatcagctgacaagactgttgccttgtgggatctgagaaatctgaaacttaagttgcattcctttgagtcacataaggatgaaatattccaggttcagtggtcacctcacaatgagactattttagcttccagtggtactgatcgcagactgaatgtctgggatttaagtaaaattggagaggaacaatccccagaagatgcagaagacgggccaccagagttgttgtttattcatggtggtcatactgccaagatatctgatttctcctggaatcccaatgaaccttgggtgatttgttctgtatcagaagacaatatcatgcaagtgtggcaaatggcagagaacatttataatgatgaagaccctgaaggaagcgtggatccagaaggacaagggtcctagatatgtctttacttgttgtgattttagactccccttttttcttctcaaccctgagagtgatttaacactggttttgagacagactttattcagctatccctctatataataggtaccaccgataatgctattagcccaaaccgtgggtgttttctaaatattaataggggggcttgattcaacaaagccacagacttaacgttgaaattttcttcaggaattttctagtaacccaggtctaaagtagctacagaaaggggaatattatgtgtgattatttttcttcttatgctatatccccaagtttttcagactcatttaagtaaaggctagagtgagtaaggaatagagccaaatgaggtaggtgtctgagccatgaagtataaatactgaaagatgtcacttttattcaggaaatagggggagattcaagtcgtatagattcctactcgaaaatcttgacacctgactttccaggatgcacattttcatacgtagaccagtttcctcttggtttcttcagttaagtcaaaacaacacgttcctctttccccatatattcatatatttttgctcgttagtgtatttcttgagctgttttcatgttgtttatttcctgtctgtgaaatggtgtttttttttttgttgttggtttttttttttttttttttaacttgggaccaccaagttgtaaagatgtatgtttttacctgacagttataccacaggtagactgtcaagttgagaagagtgaatcaataacttgtatttgttttaaaaattaaattaatccttgataagagttgctttttttttttaggagttagtccttgaccactagtttgatgccatctccattttgggtgacctgtttcaccagcaggcctgttactctccatgactaactgtgtaagtgcttaaaatggaataaattgcttttctacataa

SEQ ID NO: 285043 - DNA, 2256 bp, Homo sapiens
aatcagtttacacaaggaatttgaaagagggcaatccaaatgaagtcaacatggtcacacaaaaatcttggtaaaagaactagaatggaagcccaagctgctgagcaagtgggagaagaaaagaaaacatagtctaaacagatcacacaagggaacccaggacaaatgctgactttggcattatctaggtaaccaccagaagggaaagatttcagcattcatcgacttgtcctggggacacacacatcggatgaacaaaaccatcttgttatagccagtgtgcagctccctaatgatgatgctcagtttgatgcgtcacactacgacagtgagaaaggagaatttggaggttttggttcagttagtggaaaaattgaaatagaaatcaagatcaaccatgaaggagaagtaaacagggcccgttatatgccccagaacccttgtatcatcgcaacaaagactccttccagtgatgttcttgtctttgactatacaaaacatccttctaaaccagatccttctggagagtgcaacccagacttgcgtctccgtggacatcagaaggaaggctatgggctttcttggaacccaaatctcagtgggcacttacttagtgcttcagatgaccataccatctgcctgtgggacatcagtgccgttccaaaggagggaaaagtggtagatgcgaagaccatctttacagggcatacggcagtagtagaagatgtttcctggcatctactccatgagtctctgtttgggtcagttgctgatgatcagaaacttatgatttgggatactcgttcaaacaatacttccaaaccaagccactcagttgatgctcacactgctgaagtgaactgcctttctttcaatccttatagtgagttcattcttgccacaggatcagctgacaagactgttgccttgtgggatctgagaaatctgaaacttaagttgcattcctttgagtcacataaggatgaaatattccaggttcagtggtcacctcacaatgagactattttagcttccagtggtactgatcgcagactgaatgtctgggatttaagtaaaattggagaggaacaatccccagaagatgcagaagacgggccaccagagttgttgtttattcatggtggtcatactgccaagatatctgatttctcctggaatcccaatgaaccttgggtgatttgttctgtatcagaagacaatatcatgcaagtgtggcaaatggcagagaacatttataatgatgaagaccctgaaggaagcgtggatccagaaggacaagggtcctagatatgtctttacttgttgtgattttagactccccttttttcttctcaaccctgagagtgatttaacactggttttgagacagactttattcagctatccctctatataataggtaccaccgataatgctattagcccaaaccgtgggtgttttctaaatattaataggggggcttgattcaacaaagccacagacttaacgttgaaattttcttcaggaattttctagtaacccaggtctaaagtagctacagaaaggggaatattatgtgtgattatttttcttcttatgctatatccccaagtttttcagactcatttaagtaaaggctagagtgagtaaggaatagagccaaatgaggtaggtgtctgagccatgaagtataaatactgaaagatgtcacttttattcaggaaatagggggagattcaagtcgtatagattcctactcgaaaatcttgacacctgactttccaggatgcacattttcatacgtagaccagtttcctcttggtttcttcagttaagtcaaaacaacacgttcctctttccccatatattcatatatttttgctcgttagtgtatttcttgagctgttttcatgttgtttatttcctgtctgtgaaatggtgtttttttttttgttgttggtttttttttttttttttttaacttgggaccaccaagttgtaaagatgtatgtttttacctgacagttataccacaggtagactgtcaagttgagaagagtgaatcaataacttgtatttgttttaaaaattaaattaatccttgataagagttgctttttttttttaggagttagtccttgaccactagtttgatgccatctccattttgggtgacctgtttcaccagcaggcctgttactctccatgactaactgtgtaagtgcttaaaatggaataaattgcttttctacataa

SEQ ID NO: 285044 - DNA, 2480 bp, Homo sapiens
agcgctcccattggctgatgttggcgcgaaggtgcgcgagtcagccctcgcgctgggggcgcaggaaacaatagaggccgcgcgcacagagcgagctcttgcagcctccccgcccctcccgcaacgctcgaccccaggattcccccggctcgcctgcccgccatggccgacaaggaagcagccttcgacgacgcagtggaagaacgagtgatcaacgaggaatacaaaatatggaaaaagaacaccccttttctttatgatttggtgatgacccatgctctggagtggcccagcctaactgcccagtggcttccagatgtaaccagaccagaagggaaagatttcagcattcatcgacttgtcctggggacacacacatcggatgaacaaaaccatcttgttatagccagtgtgcagctccctaatgatgatgctcagtttgatgcgtcacactacgacagtgagaaaggaggctgagtgcagtggtgcgatctcactgcagcctccgcctcctgggttcaagtgattctcctgcctcagcctcctgagtagctgggattacagaatttggaggttttggttcagttagtggaaaaattgaaatagaaatcaagatcaaccatgaaggagaagtaaacagggcccgttatatgccccagaacccttgtatcatcgcaacaaagactccttccagtgatgttcttgtctttgactatacaaaacatccttctaaaccagatccttctggagagtgcaacccagacttgcgtctccgtggacatcagaaggaaggctatgggctttcttggaacccaaatctcagtgggcacttacttagtgcttcagatgaccataccatctgcctgtgggacatcagtgccgttccaaaggagggaaaagtggtagatgcgaagaccatctttacagggcatacggcagtagtagaagatgtttcctggcatctactccatgagtctctgtttgggtcagttgctgatgatcagaaacttatgatttgggatactcgttcaaacaatacttccaaaccaagccactcagttgatgctcacactgctgaagtgaactgcctttctttcaatccttatagtgagttcattcttgccacaggatcagctgacaagactgttgccttgtgggatctgagaaatctgaaacttaagttgcattcctttgagtcacataaggatgaaatattccaggttcagtggtcacctcacaatgagactattttagcttccagtggtactgatcgcagactgaatgtctgggatttaagtaaaattggagaggaacaatccccagaagatgcagaagacgggccaccagagttgttgtttattcatggtggtcatactgccaagatatctgatttctcctggaatcccaatgaaccttgggtgatttgttctgtatcagaagacaatatcatgcaagtgtggcaaatggcagagaacatttataatgatgaagaccctgaaggaagcgtggatccagaaggacaagggtcctagatatgtctttacttgttgtgattttagactccccttttttcttctcaaccctgagagtgatttaacactggttttgagacagactttattcagctatccctctatataataggtaccaccgataatgctattagcccaaaccgtgggtgttttctaaatattaataggggggcttgattcaacaaagccacagacttaacgttgaaattttcttcaggaattttctagtaacccaggtctaaagtagctacagaaaggggaatattatgtgtgattatttttcttcttatgctatatccccaagtttttcagactcatttaagtaaaggctagagtgagtaaggaatagagccaaatgaggtaggtgtctgagccatgaagtataaatactgaaagatgtcacttttattcaggaaatagggggagattcaagtcgtatagattcctactcgaaaatcttgacacctgactttccaggatgcacattttcatacgtagaccagtttcctcttggtttcttcagttaagtcaaaacaacacgttcctctttccccatatattcatatatttttgctcgttagtgtatttcttgagctgttttcatgttgtttatttcctgtctgtgaaatggtgtttttttttttgttgttggtttttttttttttttttttaacttgggaccaccaagttgtaaagatgtatgtttttacctgacagttataccacaggtagactgtcaagttgagaagagtgaatcaataacttgtatttgttttaaaaattaaattaatccttgataagagttgctttttttttttaggagttagtccttgaccactagtttgatgccatctccattttgggtgacctgtttcaccagcaggcctgttactctccatgactaactgtgtaagtgcttaaaatggaataaattgcttttctacataa

SEQ ID NO: 285045 - DNA, 2242 bp, Homo sapiens
agcgctcccattggctgatgttggcgcgaaggtgcgcgagtcagccctcgcgctgggggcgcaggaaacaatagaggccgcgcgcacagagcgagctcttgcagcctccccgcccctcccgcaacgctcgaccccaggattcccccggctcgcctgcccgccatggccgacaaggaagcagccttcgacgacgcagtggaagaacgagtgatcaacgaggaatacaaaatatggaaaaagaacaccccttttctttatgatttggtgatgacccatgctctggagtggcccagcctaactgcccagtggcttccagatgtaaccagaatttggaggttttggttcagttagtggaaaaattgaaatagaaatcaagatcaaccatgaaggagaagtaaacagggcccgttatatgccccagaacccttgtatcatcgcaacaaagactccttccagtgatgttcttgtctttgactatacaaaacatccttctaaaccagatccttctggagagtgcaacccagacttgcgtctccgtggacatcagaaggaaggctatgggctttcttggaacccaaatctcagtgggcacttacttagtgcttcagatgaccataccatctgcctgtgggacatcagtgccgttccaaaggagggaaaagtggtagatgcgaagaccatctttacagggcatacggcagtagtagaagatgtttcctggcatctactccatgagtctctgtttgggtcagttgctgatgatcagaaacttatgatttgggatactcgttcaaacaatacttccaaaccaagccactcagttgatgctcacactgctgaagtgaactgcctttctttcaatccttatagtgagttcattcttgccacaggatcagctgacaagactgttgccttgtgggatctgagaaatctgaaacttaagttgcattcctttgagtcacataaggatgaaatattccaggttcagtggtcacctcacaatgagactattttagcttccagtggtactgatcgcagactgaatgtctgggatttaagtaaaattggagaggaacaatccccagaagatgcagaagacgggccaccagagttgttgtttattcatggtggtcatactgccaagatatctgatttctcctggaatcccaatgaaccttgggtgatttgttctgtatcagaagacaatatcatgcaagtgtggcaaatggcagagaacatttataatgatgaagaccctgaaggaagcgtggatccagaaggacaagggtcctagatatgtctttacttgttgtgattttagactccccttttttcttctcaaccctgagagtgatttaacactggttttgagacagactttattcagctatccctctatataataggtaccaccgataatgctattagcccaaaccgtgggtgttttctaaatattaataggggggcttgattcaacaaagccacagacttaacgttgaaattttcttcaggaattttctagtaacccaggtctaaagtagctacagaaaggggaatattatgtgtgattatttttcttcttatgctatatccccaagtttttcagactcatttaagtaaaggctagagtgagtaaggaatagagccaaatgaggtaggtgtctgagccatgaagtataaatactgaaagatgtcacttttattcaggaaatagggggagattcaagtcgtatagattcctactcgaaaatcttgacacctgactttccaggatgcacattttcatacgtagaccagtttcctcttggtttcttcagttaagtcaaaacaacacgttcctctttccccatatattcatatatttttgctcgttagtgtatttcttgagctgttttcatgttgtttatttcctgtctgtgaaatggtgtttttttttttgttgttggtttttttttttttttttttaacttgggaccaccaagttgtaaagatgtatgtttttacctgacagttataccacaggtagactgtcaagttgagaagagtgaatcaataacttgtatttgttttaaaaattaaattaatccttgataagagttgctttttttttttaggagttagtccttgaccactagtttgatgccatctccattttgggtgacctgtttcaccagcaggcctgttactctccatgactaactgtgtaagtgcttaaaatggaataaattgcttttctacataa

SEQ ID NO: 285046 - DNA, 1972 bp, Homo sapiens
gactctgcaggatctcctgtaacaggctgatgcgtacactacgacagtgagaaaggaatttggaggttttggttcagttagtggaaaaattgaaatagaaatcaagatcaaccatgaaggagaagtaaacagggcccgttatatgccccagaacccttgtatcatcgcaacaaagactccttccagtgatgttcttgtctttgactatacaaaacatccttctaaaccagatccttctggagagtgcaacccagacttgcgtctccgtggacatcagaaggaaggctatgggctttcttggaacccaaatctcagtgggcacttacttagtgcttcagatgaccataccatctgcctgtgggacatcagtgccgttccaaaggagggaaaagtggtagatgcgaagaccatctttacagggcatacggcagtagtagaagatgtttcctggcatctactccatgagtctctgtttgggtcagttgctgatgatcagaaacttatgatttgggatactcgttcaaacaatacttccaaaccaagccactcagttgatgctcacactgctgaagtgaactgcctttctttcaatccttatagtgagttcattcttgccacaggatcagctgacaagactgttgccttgtgggatctgagaaatctgaaacttaagttgcattcctttgagtcacataaggatgaaatattccaggttcagtggtcacctcacaatgagactattttagcttccagtggtactgatcgcagactgaatgtctgggatttaagtaaaattggagaggaacaatccccagaagatgcagaagacgggccaccagagttgttgtttattcatggtggtcatactgccaagatatctgatttctcctggaatcccaatgaaccttgggtgatttgttctgtatcagaagacaatatcatgcaagtgtggcaaatggcagagaacatttataatgatgaagaccctgaaggaagcgtggatccagaaggacaagggtcctagatatgtctttacttgttgtgattttagactccccttttttcttctcaaccctgagagtgatttaacactggttttgagacagactttattcagctatccctctatataataggtaccaccgataatgctattagcccaaaccgtgggtgttttctaaatattaataggggggcttgattcaacaaagccacagacttaacgttgaaattttcttcaggaattttctagtaacccaggtctaaagtagctacagaaaggggaatattatgtgtgattatttttcttcttatgctatatccccaagtttttcagactcatttaagtaaaggctagagtgagtaaggaatagagccaaatgaggtaggtgtctgagccatgaagtataaatactgaaagatgtcacttttattcaggaaatagggggagattcaagtcgtatagattcctactcgaaaatcttgacacctgactttccaggatgcacattttcatacgtagaccagtttcctcttggtttcttcagttaagtcaaaacaacacgttcctctttccccatatattcatatatttttgctcgttagtgtatttcttgagctgttttcatgttgtttatttcctgtctgtgaaatggtgtttttttttttgttgttggtttttttttttttttttttaacttgggaccaccaagttgtaaagatgtatgtttttacctgacagttataccacaggtagactgtcaagttgagaagagtgaatcaataacttgtatttgttttaaaaattaaattaatccttgataagagttgctttttttttttaggagttagtccttgaccactagtttgatgccatctccattttgggtgacctgtttcaccagcaggcctgttactctccatgactaactgtgtaagtgcttaaaatggaataaattgcttttctacataa

SEQ ID NO: 285047 - DNA, 1932 bp, Homo sapiens
aatcagctcggtccactcttacccacgactcttaccctcactggaaaaattgaaatagaaatcaagatcaaccatgaaggagaagtaaacagggcccgttatatgccccagaacccttgtatcatcgcaacaaagactccttccagtgatgttcttgtctttgactatacaaaacatccttctaaaccagatccttctggagagtgcaacccagacttgcgtctccgtggacatcagaaggaaggctatgggctttcttggaacccaaatctcagtgggcacttacttagtgcttcagatgaccataccatctgcctgtgggacatcagtgccgttccaaaggagggaaaagtggtagatgcgaagaccatctttacagggcatacggcagtagtagaagatgtttcctggcatctactccatgagtctctgtttgggtcagttgctgatgatcagaaacttatgatttgggatactcgttcaaacaatacttccaaaccaagccactcagttgatgctcacactgctgaagtgaactgcctttctttcaatccttatagtgagttcattcttgccacaggatcagctgacaagactgttgccttgtgggatctgagaaatctgaaacttaagttgcattcctttgagtcacataaggatgaaatattccaggttcagtggtcacctcacaatgagactattttagcttccagtggtactgatcgcagactgaatgtctgggatttaagtaaaattggagaggaacaatccccagaagatgcagaagacgggccaccagagttgttgtttattcatggtggtcatactgccaagatatctgatttctcctggaatcccaatgaaccttgggtgatttgttctgtatcagaagacaatatcatgcaagtgtggcaaatggcagagaacatttataatgatgaagaccctgaaggaagcgtggatccagaaggacaagggtcctagatatgtctttacttgttgtgattttagactccccttttttcttctcaaccctgagagtgatttaacactggttttgagacagactttattcagctatccctctatataataggtaccaccgataatgctattagcccaaaccgtgggtgttttctaaatattaataggggggcttgattcaacaaagccacagacttaacgttgaaattttcttcaggaattttctagtaacccaggtctaaagtagctacagaaaggggaatattatgtgtgattatttttcttcttatgctatatccccaagtttttcagactcatttaagtaaaggctagagtgagtaaggaatagagccaaatgaggtaggtgtctgagccatgaagtataaatactgaaagatgtcacttttattcaggaaatagggggagattcaagtcgtatagattcctactcgaaaatcttgacacctgactttccaggatgcacattttcatacgtagaccagtttcctcttggtttcttcagttaagtcaaaacaacacgttcctctttccccatatattcatatatttttgctcgttagtgtatttcttgagctgttttcatgttgtttatttcctgtctgtgaaatggtgtttttttttttgttgttggtttttttttttttttttttaacttgggaccaccaagttgtaaagatgtatgtttttacctgacagttataccacaggtagactgtcaagttgagaagagtgaatcaataacttgtatttgttttaaaaattaaattaatccttgataagagttgctttttttttttaggagttagtccttgaccactagtttgatgccatctccattttgggtgacctgtttcaccagcaggcctgttactctccatgactaactgtgtaagtgcttaaaatggaataaattgcttttctacataa

SEQ ID NO: 285048 - DNA, 2199 bp, Homo sapiens
agcgctcccattggctgatgttggcgcgaaggtgcgcgagtcagccctcgcgctgggggcgcaggaaacaatagaggccgcgcgcacagagcgagctcttgcagcctccccgcccctcccgcaacgctcgaccccaggattcccccggctcgcctgcccgccatggccgacaaggaagcagccttcgacgacgcagtggaagaacgagtgatcaacgaggaatacaaaatatggaaaaagaacaccccttttctttatgatttggtgatgacccatgctctggagtggcccagcctaactgcccagtggcttccagatgtaaccagaccagaagggaaagatttcagcattcatcgacttgtcctggggacacacacatcggatgaacaaaaccatcttgttatagccagtgtgcagctccctaatgatgatgctcagtttgatgcgtcacactacgacagtgagaaaggagaatttggaggttttggttcagttagtggaaaaattgaaatagaaatcaagatcaaccatgaaggagaagtaaacagggcccgttatatgccccagaacccttgtatcatcgcaacaaagactccttccagtgatgttcttgtctttgactatacaaaacatccttctaaaccagggcatacggcagtagtagaagatgtttcctggcatctactccatgagtctctgtttgggtcagttgctgatgatcagaaacttatgatttgggatactcgttcaaacaatacttccaaaccaagccactcagttgatgctcacactgctgaagtgaactgcctttctttcaatccttatagtgagttcattcttgccacaggatcagctgacaagactgttgccttgtgggatctgagaaatctgaaacttaagttgcattcctttgagtcacataaggatgaaatattccaggttcagtggtcacctcacaatgagactattttagcttccagtggtactgatcgcagactgaatgtctgggatttaagtaaaattggagaggaacaatccccagaagatgcagaagacgggccaccagagttgttgtttattcatggtggtcatactgccaagatatctgatttctcctggaatcccaatgaaccttgggtgatttgttctgtatcagaagacaatatcatgcaagtgtggcaaatggcagagaacatttataatgatgaagaccctgaaggaagcgtggatccagaaggacaagggtcctagatatgtctttacttgttgtgattttagactccccttttttcttctcaaccctgagagtgatttaacactggttttgagacagactttattcagctatccctctatataataggtaccaccgataatgctattagcccaaaccgtgggtgttttctaaatattaataggggggcttgattcaacaaagccacagacttaacgttgaaattttcttcaggaattttctagtaacccaggtctaaagtagctacagaaaggggaatattatgtgtgattatttttcttcttatgctatatccccaagtttttcagactcatttaagtaaaggctagagtgagtaaggaatagagccaaatgaggtaggtgtctgagccatgaagtataaatactgaaagatgtcacttttattcaggaaatagggggagattcaagtcgtatagattcctactcgaaaatcttgacacctgactttccaggatgcacattttcatacgtagaccagtttcctcttggtttcttcagttaagtcaaaacaacacgttcctctttccccatatattcatatatttttgctcgttagtgtatttcttgagctgttttcatgttgtttatttcctgtctgtgaaatggtgtttttttttttgttgttggtttttttttttttttttttaacttgggaccaccaagttgtaaagatgtatgtttttacctgacagttataccacaggtagactgtcaagttgagaagagtgaatcaataacttgtatttgttttaaaaattaaattaatccttgataagagttgctttttttttttaggagttagtccttgaccactagtttgatgccatctccattttgggtgacctgtttcaccagcaggcctgttactctccatgactaactgtgtaagtgcttaaaatggaataaattgcttttctacataa

SEQ ID NO: 285049 - DNA, 1561 bp, Homo sapiens
agcgctcccattggctgatgttggcgcgaaggtgcgcgagtcagccctcgcgctgggggcgcaggaaacaatagaggccgcgcgcacagagcgagctcttgcagcctccccgcccctcccgcaacgctcgaccccaggattcccccggctcgcctgcccgccatggccgacaaggaagcagccttcgacgacgcagtggaagaacgagtgatcaacgaggaatacaaaatatggaaaaagaacaccccttttctttatgatttggtgatgacccatgctctggagtggcccagcctaactgcccagtggcttccagatgtaaccagaccagaagggaaagatttcagcattcatcgacttgtcctggggacacacacatcggatgaacaaaaccatcttgttatagccagtgtgcagctccctaatgatgatgctcagtttgatgcgtcacactacgacagtgagaaaggagaatttggaggttttggttcagttagtggaaaaattgaaatagaaatcaagatcaaccatgaaggagaagtaaacagggcccgttatatgccccagaacccttgtatcatcgcaacaaagactccttccagtgatgttcttgtctttgactatacaaaacatccttctaaaccagatccttctggagagtgcaacccagacttgcgtctccgtggacatcagaaggaaggctatgggctttcttggaacccaaatctcagtgggcacttacttagtgcttcagatgaccataccatctgcctgtgggacatcagtgccgttccaaaggagggaaaagtggtagatgcgaagaccatctttacagggcatacggcagtagtagaagatgtttcctggcatctactccatgagtctctgtttgggtcagttgctgatgatcagaaacttatgatttgggatactcgttcaaacaatacttccaaaccaagccactcagttgatgctcacactgctgaagtgaactgcctttctttcaatccttatagtgagttcattcttgccacaggatcagctgacaagactgttgccttgtgggatctgagaaatctgaaacttaagttgcattcctttgagtcacataaggatgaaatattccaggttcagtggtcacctcacaatgagactattttagcttccagtggtactgatcgcagactgaatgtctgggatttaagtaaaattggagaggaacaatccccagaagatgcagaagacgggccaccagagttgttgtttattcatggtggtcatactgccaagatatctgatttctcctggaatcccaatgaaccttgggtgatttgttctgtatcagaagacaatatcatgcaagtgtggcaaatggcagagaacatttataatgatgaagaccctgaaggaagcgtggatccagaaggacaagggagttagtccttgaccactagtttgatgccatctccattttgggtgacctgtttcaccagcaggcctgttactctccatgactaactgtgtaagtgcttaaaatggaataaattgcttttctacataa

SEQ ID NO: 285050 - DNA, 1425 bp, Homo sapiens
  misc_feature (1396)..(1396): n is a, c, g, or t
  misc_feature (1403)..(1403): n is a, c, g, or t
  misc_feature (1423)..(1423): n is a, c, g, or t
agcgctcccattggctgatgttggcgcgaaggtgcgcgagtcagccctcgcgctgggggcgcaggaaacaatagaggccgcgcgcacagagcgagctcttgcagcctccccgcccctcccgcaacgctcgaccccaggattcccccggctcgcctgcccgccatggccgacaaggaagcagccttcgacgacgcagtggaagaacgagtgatcaacgaggaatacaaaatatggaaaaagaacaccccttttctttatgatttggtgatgacccatgctctggagtggcccagcctaactgcccagtggcttccagatgtaaccagaccagaagggaaagatttcagcattcatcgacttgtcctggggacacacacatcggatgaacaaaaccatcttgttatagccagtgtgcagctccctaatgatgatgctcagtttgatgcgtcacactacgacagtgagaaaggagaatttggaggttttggttcagttagtggaaaaattgaaatagaaatcaagatcaaccatgaaggagaagtaaacagggcccgttatatgccccagaacccttgtatcatcgcaacaaagactccttccagtgatgttcttgtctttgactatacaaaacatccttctaaaccagatccttctggagagtgcaacccagacttgcgtctccgtggacatcagaaggaaggctatgggctttcttggaacccaaatctcagtgggcacttacttagtgcttcagatgaccataccatctgcctgtgggacatcagtgccgttccaaaggagggaaaagtggtagatgcgaagaccatctttacagggcatacggcagtagtagaagatgtttcctggcatctactccatgagtctctgtttgggtcagttgctgatgatcagaaacttatgatttgggatactcgttcaaacaatacttccaaaccaagccactcagttgatgctcacactgctgaagtgaactgcctttctttcaatccttatagtgagttcattcttgccacaggatcagctgacaagactgttgccttgtgggatctgagaaatctgaaacttaagttgcattcctttgagtcacataaggatgaaatattccaggttcagtggtcacctcacaatgagactattttagcttccagtggtactgatcgcagactgaatgtctgggatttaagtaaaattggagaggaacaatccccagaagatgcagaagacgggccaccagagttgttgtttattcatggtggtcatactgccaagatatctgatttctcctggaatcccaatgaaccttgggtgatttgttctgtatcagaagacaatatcatgcaagtgtggcaaatgtgggccagaaaaactttttttnattgaanaaaaaaccctgaaaaggaancc

SEQ ID NO: 285051 - DNA, 1522 bp, Homo sapiens
agcgctcccattggctgatgttggcgcgaaggtgcgcgagtcagccctcgcgctgggggcgcaggaaacaatagaggccgcgcgcacagagcgagctcttgcagcctccccgcccctcccgcaacgctcgaccccaggattcccccggctcgcctgcccgccatggccgacaaggaagcagccttcgacgacgcagtggaagaacgagtgatcaacgaggaatacaaaatatggaaaaagaacaccccttttctttatgatttggtgatgacccatgctctggagtggcccagcctaactgcccagtggcttccagatgtaaccagaccagaagggaaagatttcagcattcatcgacttgtcctggggacacacacatcggatgaacaaaaccatcttgttatagccagtgtgcagctccctaatgatgatgctcagtttgatgcgtcacactacgacagtgagaaaggagaatttggaggttttggttcagttagtggaaaaattgaaatagaaatcaagatcaaccatgaaggagaagtaaacagggcccgttatatgccccagaacccttgtatcatcgcaacaaagactccttccagtgatgttcttgtctttgactatacaaaacatccttctaaaccagatccttctggagagtgcaacccagacttgcgtctccgtggacatcagaaggaaggctatgggctttcttggaacccaaatctcagtgggcacttacttagtgcttcagatgaccataccatctgcctgtgggacatcagtgccgttccaaaggagggaaaagtggtagatgcgaagaccatctttacagggcatacggcagtagtagaagatgtttcctggcatctactccatgagtctctgtttgggtcagttgctgatgatcagaaacttatgatttgggatactcgttcaaacaatacttccaaaccaagccactcagttgatgctcacactgctgaagtgaactgcctttctttcaatccttatagtgagttcattcttgccacaggatcagctgacaagactgttgccttgtgggatctgagaaatctgaaacttaagttgcattcctttgagtcacataaggatgaaatattccaggttcagtggtcacctcacaatgagactattttagcttccagtggtactgatcgcagactgaatgtctgggatttaagtaaaattggagaggaacaatccccagaagatgcagaagacgggccaccagagttgttgtttattcatggtggtcatactgccaagatatctgatttctcctggaatcccaatgaaccttgggtgatttgttctgtatcagaagacaatatcatgcaagtgtggcaaatgggtaagggtttagtcatttattttggggaggtgaaataagtgagacatagaatcaatttacatttgcatattctatgattacagataccatctctgatcatttcactcccaggtgtgattgtaagacttgtctatacattatcatttt

SEQ ID NO: 285052 - DNA, 1407 bp, Homo sapiens
gtatcaacgcagagtcgtcattacggccgggatagtgagttcattcttgccacaggatcagctgacaagactgttgccttgtgggatctgagaaatctgaaacttaagttgcattcctttgagtcacataaggatgaaatattccaggttcagtggtcacctcacaatgagactattttagcttccagtggtactgatcgcagactgaatgtctgggatttaagtaaaattggagaggaacaatccccagaagatgcagaagacgggccaccagagttgttgtttattcatggtggtcatactgccaagatatctgatttctcctggaatcccaatgaaccttgggtgatttgttctgtatcagaagacaatatcatgcaagtgtggcaaatggcagagaacatttataatgatgaagaccctgaaggaagcgtggatccagaaggacaagggtcctagatatgtctttacttgttgtgattttagactccccttttttcttctcaaccctgagagtgatttaacactggttttgagacagactttattcagctatccctctatataataggtaccaccgataatgctattagcccaaaccgtgggtgttttctaaatattaataggggggcttgattcaacaaagccacagacttaacgttgaaattttcttcaggaattttctagtaacccaggtctaaagtagctacagaaaggggaatattatgtgtgattatttttcttcttatgctatatccccaagtttttcagactcatttaagtaaaggctagagtgagtaaggaatagagccaaatgaggtaggtgtctgagccatgaagtataaatactgaaagatgtcacttttattcaggaaatagggggagattcaagtcgtatagattcctactcgaaaatcttgacacctgactttccaggatgcacattttcatacgtagaccagtttcctcttggtttcttcagttaagtcaaaacaacacgttcctctttccccatatattcatatatttttgctcgttagtgtatttcttgagctgttttcatgttgtttatttcctgtctgtgaaatggtgtttttttttttgttgttggtttttttttttttttttttaacttgggaccaccaagttgtaaagatgtatgtttttacctgacagttataccacaggtagactgtcaagttgagaagagtgaatcaataacttgtatttgttttaaaaattaaattaatccttgataagagttgctttttttttttaggagttagtccttgaccactagtttgatgccatctccattttgggtgacctgtttcaccagcaggcctgttactctccatgactaactgtgtaagtgcttaaaatggaataaattgcttttctacataa

SEQ ID NO: 285053 - DNA, 1091 bp, Homo sapiens
agcgctcccattggctgatgttggcgcgaaggtgcgcgagtcagccctcgcgctgggggcgcaggaaacaatagaggccgcgcgcacagagcgagctcttgcagcctccccgcccctcccgcaacgctcgaccccaggattcccccggctcgcctgcccgccatggccgacaaggaagcagccttcgacgacgcagtggaagaacgagtgatcaacgaggaatacaaaatatggaaaaagaacaccccttttctttatgatttggtgatgacccatgctctggagtggcccagcctaactgcccagtggcttccagatgtaaccagaccagaagggaaagatttcagcattcatcgacttgtcctggggacacacacatcggatgaacaaaaccatcttgttatagccagtgtgcagctccctaatgatgatgctcagtttgatgcgtcacactacgacagtgagaaaggagaatttggaggttttggttcagttagtggaaaaattgaaatagaaatcaagatcaaccatgaaggagaagtaaacagggcccgttatatgccccagaacccttgtatcatcgcaacaaagactccttccagtgatgttcttgtctttgactatacaaaacatccttctaaaccagatccttctggagagtgcaacccagacttgcgtctccgtggacatcagaaggaaggctatgggctttcttggaacccaaatctcagtgggcacttacttagtgcttcagatgaccataccatctgcctgtgggacatcagtgccgttccaaaggagggaaaagtggtagatgcgaagaccatctttacagggcatacggcagtagtagaagatgtttcctggcatctactccatgagtctctgtttgggtcagttgctgatgatcagaaacttatgatttgggatactcgttcaaacaatacttccaaaccaagccactcagttgatgctcacactgctgaagtgaactgcctttctttcaatccttatagtgagttcattcttgccacaggatcagctgacaagactgtggcttgtgggaactgggcttgaacttgttgttcctt

SEQ ID NO: 285054 - DNA, 1220 bp, Homo sapiens
  misc_feature (16)..(16): n is a, c, g, or t
  misc_feature (21)..(21): n is a, c, g, or t
gcacgagctcgtgccntgganatgtctgggatttaagtaaaattggagaggaacaatccccagaagatgcagaagacgggccaccagagttgttgtttattcatggtggtcatactgccaagatatctgatttctcctggaatcccaatgaaccttgggtgatttgttctgtatcagaagacaatatcatgcaagtgtggcaaatggcagagaacatttataatgatgaagaccctgaaggaagcgtggatccagaaggacaagggtcctagatatgtctttacttgttgtgattttagactccccttttttcttctcaaccctgagagtgatttaacactggttttgagacagactttattcagctatccctctatataataggtaccaccgataatgctattagcccaaaccgtgggtgttttctaaatattaataggggggcttgattcaacaaagccacagacttaacgttgaaattttcttcaggaattttctagtaacccaggtctaaagtagctacagaaaggggaatattatgtgtgattatttttcttcttatgctatatccccaagtttttcagactcatttaagtaaaggctagagtgagtaaggaatagagccaaatgaggtaggtgtctgagccatgaagtataaatactgaaagatgtcacttttattcaggaaatagggggagattcaagtcgtatagattcctactcgaaaatcttgacacctgactttccaggatgcacattttcatacgtagaccagtttcctcttggtttcttcagttaagtcaaaacaacacgttcctctttccccatatattcatatatttttgctcgttagtgtatttcttgagctgttttcatgttgtttatttcctgtctgtgaaatggtgtttttttttttgttgttggtttttttttttttttttttaacttgggaccaccaagttgtaaagatgtatgtttttacctgacagttataccacaggtagactgtcaagttgagaagagtgaatcaataacttgtatttgttttaaaaattaaattaatccttgataagagttgctttttttttttaggagttagtccttgaccactagtttgatgccatctccattttgggtgacctgtttcaccagcaggcctgttactctccatgactaactgtgtaagtgcttaaaatggaataaattgcttttctacataa

SEQ ID NO: 285055 - DNA, 1398 bp, Homo sapiens
cactgcactccagcctgggagacagagcaaggctccatctcaaaaggaaagaaaaataataatgcctggttaaagaactcaagaatgttggctatcaagacaaatagtatccacactgcagttttgtgggaatgtcctaatcaggcgtctggggatcagctgcttatttttattggaacatgatcatgctaattaatatttcattacccattataggttgtctccggatactttcatccaagagttgaatagttgtaacacagattgtgtggcccaaaagctataaagtatttactctctggcttcctggcctaatctgttgttgaaaccttgagttttagaagaagtcttcatgtttaaattctttttcttgtttttgggcaggcagagaacatttataatgatgaagaccctgaaggaagcgtggatccagaaggacaagggtcctagatatgtctttacttgttgtgattttagactccccttttttcttctcaaccctgagagtgatttaacactggttttgagacagactttattcagctatccctctatataataggtaccaccgataatgctattagcccaaaccgtgggtgttttctaaatattaataggggggcttgattcaacaaagccacagacttaacgttgaaattttcttcaggaattttctagtaacccaggtctaaagtagctacagaaaggggaatattatgtgtgattatttttcttcttatgctatatccccaagtttttcagactcatttaagtaaaggctagagtgagtaaggaatagagccaaatgaggtaggtgtctgagccatgaagtataaatactgaaagatgtcacttttattcaggaaatagggggagattcaagtcgtatagattcctactcgaaaatcttgacacctgactttccaggatgcacattttcatacgtagaccagtttcctcttggtttcttcagttaagtcaaaacaacacgttcctctttccccatatattcatatatttttgctcgttagtgtatttcttgagctgttttcatgttgtttatttcctgtctgtgaaatggtgtttttttttttgttgttggtttttttttttttttttttaacttgggaccaccaagttgtaaagatgtatgtttttacctgacagttataccacaggtagactgtcaagttgagaagagtgaatcaataacttgtatttgttttaaaaattaaattaatccttgataagagttgctttttttttttaggagttagtccttgaccactagtttgatgccatctccattttgggtgacctgtttcaccagcaggcctgttactctccatgactaactgtgtaagtgcttaaaatggaataaattgcttttctacataa

SEQ ID NO: 285056 - DNA, 862 bp, Homo sapiens
acaaattcaatgcaatttgcatcaaagtaccaccgataatgctattagcccaaaccgtgggtgttttctaaatattaataggggggcttgattcaacaaagccacagacttaacgttgaaattttcttcaggaattttctagtaacccaggtctaaagtagctacagaaaggggaatattatgtgtgattatttttcttcttatgctatatccccaagtttttcagactcatttaagtaaaggctagagtgagtaaggaatagagccaaatgaggtaggtgtctgagccatgaagtataaatactgaaagatgtcacttttattcaggaaatagggggagattcaagtcgtatagattcctactcgaaaatcttgacacctgactttccaggatgcacattttcatacgtagaccagtttcctcttggtttcttcagttaagtcaaaacaacacgttcctctttccccatatattcatatatttttgctcgttagtgtatttcttgagctgttttcatgttgtttatttcctgtctgtgaaatggtgtttttttttttgttgttggtttttttttttttttttttaacttgggaccaccaagttgtaaagatgtatgtttttacctgacagttataccacaggtagactgtcaagttgagaagagtgaatcaataacttgtatttgttttaaaaattaaattaatccttgataagagttgctttttttttttaggagttagtccttgaccactagtttgatgccatctccattttgggtgacctgtttcaccagcaggcctgttactctccatgactaactgtgtaagtgcttaaaatggaataaattgcttttctacataa

SEQ ID NO: 285057 - DNA, 934 bp, Homo sapiens
  misc_feature (791)..(791): n is a, c, g, or t
  misc_feature (793)..(793): n is a, c, g, or t
agcgctcccattggctgatgttggcgcgaaggtgcgcgagtcagccctcgcgctgggggcgcaggaaacaatagaggccgcgcgcacagagcgagctcttgcagcctccccgcccctcccgcaacgctcgaccccaggattcccccggctcgcctgcccgccatggccgacaaggaagcagccttcgacgacgcagtggaagaacgagtgatcaacgaggaatacaaaatatggaaaaagaacaccccttttctttatgatttggtgatgacccatgctctggagtggcccagcctaactgcccagtggcttccagatgtaaccagaccagaagggaaagatttcagcattcatcgacttgtcctggggacacacacatcggatgaacaaaaccatcttgttatagccagtgtgcagctccctaatgatgatgctcagtttgatgcgtcacactacgacagtgagaaaggagaatttggaggttttggttcagttagtggaaaaattgaaatagaaatcaagatcaaccatgaaggagaagtaaacagggcccgttatatgccccagaacccttgtatcatcgcaacaaagactccttccagtgatgttcttgtctttgactatacaaaacatccttctaaaccagatccttctggagagtgcaacccagacttgcgtctccgtggacatcagaaggaaggctatgggctttcttggaacccaaatctcagtgggcacttacttagtgcttcagatgaccataccatctggcctgtgggcatcagtgccgntncaaagggagggaaagtgggagaatgtgacatttttaaggggattagggattattttgttccgggctttattcatagttttgttgggcagtggtgtgaccgaactatgattgggagacgttacaatttcccagcattattgc

SEQ ID NO: 285058 - DNA, 778 bp, Homo sapiens
actctttttgtggtccgtgtgtgtgttagtgtgcgtgctcgtcgtggtttattattttttcttgttgtgctattctctcggtttttttcgtcctttttttttttggtctgctggccctattttttctcttttgttgtggtttcgtcctcgttttcgctcttctgttttttttttttcctcctcttgctttttttttttgttgtgtttttcgccccctttttttcctccccccgtttttgtttcttttccccaatgtgtgcctctttgtcccgtttttcctctcttttcctctttttttatttcctctcccgcgctcctttcgggttatatatataattccccctctttgtggtggccccccttttttccacaaaatgggggtggggcgcggttggggcgcccccccgcggagagaattttttgtcgcgcgcgccccccccctttttttttttttttttttttttttttttttttgttgttggtttttttttttttttttttaacttgggaccaccaagttgtaaagatgtatgtttttacctgacagttataccacaggtagactgtcaagttgagaagagtgaatcaataacttgtatttgttttaaaaattaaattaatccttgataagagttgctttttttttttaggagttagtccttgaccactagtttgatgccatctccattttgggtgacctgtttcaccagcaggcctgttactctccatgactaactgtgtaagtgcttaaaatggaataaattgcttttctacataa

SEQ ID NO: 285059 - DNA, 436 bp, Homo sapiens
ttgctgatgatcagaaacttatgatgtgagtagaatccattcagagtttctaaatatcttgtctacgttttatgtttagtcaccatttcaaggtttttttcctttgtttttttttcactgaagttgggatactcgttcaaacaatacttccaaaccaagccactcagttgatgctcacactgctgaagtgaactgcctttctttcaatccttatagtgagttcattcttgccacaggatcagctgacaaggtcagtttcgtttattttaatagaaaacatgatttctctaggtttttttgaattgcagagatattttacttacagtattttttttttcttaaaaaattgattactcttgcttttctttttgtacatagactgttgccttgtgggatctgagaaatctgaaacttaagttgcattcctttgagtcac

SEQ ID NO: 285060 - DNA, 662 bp, Homo sapiens
cttgagcaggtttcaattttgtctctgaaagtaggaagctatcagtctccctacatgactcgttccaccctttgtggatacttctacctgtagaaaaaaaggttggcaaacttggtggcatggtgaggacaaagggcattttgaaagaaccagtgactgaggtcagagtggggagctggtgttagctgtgggattcactgcagcgtcctaccacaaaggcaaagaagatgaaaatgcagcgtgcagtgctgggcttgattcccaagtcgcagtcgggctcccgctatgggtaggaggctttacactcagcctgggtcagcaccggagcatccaggcacttcagctcgtctgggtagtcagctgtgaggatcaggaagagatcaaagaaagtagaaatgtgggtgaggccagagaaggagacaataatctgggatggaacattgaagaggaacactgcctctggagaggactccaaaacgtggttgagtttctgcaggatatgcaaaaaccagtcttccccctggtggaactgtgtggctcttcactcaggatgagtcttcatgcacaagccttgcagcatgcaccggccacttaccaccgttctcccattacttttccatctgccattactgaacaccagtctgtgctactgtctgggtgta

SEQ ID NO: 285061 - DNA, 452 bp, Homo sapiens
tttcaagacagcgtcttgctttatcgaacaggctgcagtgcagtggagtgatcttggctcactgcaacctctgcctcccgggtttaagtgactctctgcctcagcctaaatctcaccatgactgtagtcttagtgaaatgcaaatagtgacaatcttgatatatttctatttcgatatatttttactacaggtaaagtgtaatgcttctaaaataaagtctgacaattcagaaagagtgctcaactcaacacatgactagcagcaacatgcttttggtttctagtgcctatcatgctagaatcctcttcttcacattccagtgtgccaactggtggagggagtgcgatagcacacatgtgtgcctttcaagtacaggcacagcattcaacaagatgacaaaaaaacaaaagcctacgtaagtacatactaaggagattgttaggaatcactg

SEQ ID NO: 285062 - DNA, 895 bp, Homo sapiens
tttcaagacagcgtcttgctttatcgaacaggctgcagtgcagtggagtgatcttggctcactgcaacctctgcctcccgggtttaagtgactctctgcctcagcctaaatctcaccatgactgtagtcttagtgaaatgcaaatagtgacaatcttgatatatttctatttcgatatatttttactacaggtaaagtgtaatgcttctaaaataaagtctgacaattcagaaagagtgctcaactcaacacatgactagcagcaacatgcttttggtttctagtgcctatcatgctagaatcctcttcttcacattccagtgtgccaactggtggagggagtgcgatagcacacatgtgtgcctttcaagtacaggcacagcattcaacaagatgacaaaaaaacaaaagcctacaataattaccttccaagtgactatttccaaggatctgctgcgtctgaaaaattatagctaaaaagtgctaggcttatataccaaaaatgatgggtttacctcttttaaaactaaaacaaaaccatcatagtgtgtaccaagcacctcacctcatttaagaaaatgtcatttttcaccaaagtcacttgactgtactgaaaaccatgctcagatgaagagtccaagtaagaagtatggaggagtgaaactgccctctggaagagagagtctgaactcaaggacactgtctcaaaaactgtaaaacacaaacaaaaataacgcagctatttaagattccaaaggatggggttaagggagacacactgaatatcactcaaaacatcacctattcctttcctatataactaagaaatatttgtactgtcttaacaaaatttaaaagacctctgatgtaaagaaaataacctaaataaattaga

SEQ ID NO: 285063 - DNA, 3120 bp, Homo sapiens
gggccccgcaggctcggtgaatcgaacgttgagcagggcggtgggtggtgcggagtgccgagcggcctcacccccaaccgtcggcccagtcggacggttccgaggcgttgccgggagccgggcgcggctctgtgtggactcggagaaacgcggggcgtctgcctgagcccgcttttctacaagatgtggggatttttgaagcgccctgtagtggtgacggctgacatcaacttgagccttgtggccctgactgggatggggttactgagccggctgtggcgactcacctacccgcgggctgtggtttttgacgaagtatattatgggcagtacatctctttttacatgaaacaaatcttcttcttggatgacagtgggccgccatttggccacatggtgctggccttgggaggttatttaggaggattcgatggcaattttttgtggaacagaattggagcagaatacagtagcaacgtgcctgtgtggtccctgcgcctgctgccagcactcgcgggggccttgtcggtccccatggcctaccagatagtgttggagctccacttttctcattgtgccgccatgggagctgctctgttgatgcttatcgagaatgctctcatcactcagtcaaggctaatgcttttggaatcagtgttaatatttttcaatctattggccgtgttgtcctacctgaagttcttcaactgccaaaagcacagccctttttctctgagctggtggttctggctaacactgacaggggtcgcttgttcctgtgcagtgggcatcaagtacatgggtgtgttcacgtacgtgctcgtgctgggtgttgcagctgtccatgcctggcacctgcttggagaccagactttgtccaatgtaggtgctgatgtccagtgctgcatgaggccggcctgtatggggcagatgcggatgtcacagggggtctgtgtgttctgtcacttgctcgcccgagcagtggctttgctggtcatcccggtcgtcctgtacttactgttcttctacgtccacttgattctagtcttccgctctgggccccacgaccaaatcatgtccagtgccttccaggccagcttagagggaggactagctcggatcacccagggtcagccactggaggtggcctttgggtcccaggtcactctgaggaacgtctttgggaaacctgtgccctgctggcttcattcccaccaggacacctaccccatgatatatgagaacggccgaggcagctcccaccagcaacaggtgacctgttaccccttcaaagacgtcaataactggtggattgtaaaggatcccaggaggcaccagctggtggtgagcagccctccgagacctgtgaggcacggggacatggtgcagctggtccacggcatgaccacccgctccctgaacacgcatgatgttgcagcccccctgagcccccattcacaggaggtctcctgctacattgactataacatctccatgcccgcccagaacctctggagactggaaattgtgaacagaggatctgacacagacgtctggaagaccatcctctcagaggtccgctttgtgcacgtgaacacttccgctgtcttaaagctgagcggggctcacctccctgactgggggtatcggcaactggagatcgtcggggagaagctgtcccggggctaccacgggagcacggtgtggaacgtggaggagcaccgatacggcgcgagccaggagcagagggagcgggaacgggagctgcactcacctgcgcaggtggacgtcagcaggaacctcagcttcatggcgagattctcggagctgcagtggaggatgctggcgctgagaagtgatgactcggaacacaagtacagctccagcccactggagtgggtcaccctggacaccaatattgcctactggctgcaccccaggaccagcgctcagatccacctacttggaaacatagtgatctgggtttcgggcagcctcgctctggccatctacgccctgctgtccttgtggtacctgctccgacggcgaagaaatgtccatgacctccctcaggatgcctggctgcgctgggtgctggctggggcgctgtgtgccggtggctgggcagtgaactacctcccgttcttcctgatggagaagacactcttcctctaccactacctgcccgcactcaccttccaaatccttctgctccctgtggtcctgcagcacatcagcgaccacctgtgcaggtcccagctccagaggagcatcttcagcgccctggtggtggcctggtactcctccgcgtgccacgtgtccaacacgctgcgcccactcacctacggggacaagtcactctcgccacatgaactcaaggcccttcgctggaaagacagctgggacatcttgatccgaaaacactagaacaagagtgtggcaaagaacacccgtgctggggtcgggacgaggttgaagggtcttggtcaatgtacgtaatgagcagggtgggccccacgctgggaggacacgggctgggctgagcagggcctctagtggaacacatgggggtctcattgaaaagctctctgatgagcacctccttttgtgcaaagttaattttttctcgacaataaagatattccgtgtcttcacccctgaactaagacacagggagtatttcagaggccagcgtaggagtcatcgacaacgaaaagccgagaacccagggccagcagtggagcctcagcagaccagggcctggtccttgctaattgctgcagggtggagtttgatctggcagacccgatcctccttcatgaacacccagcaacctgagcaagtcccggccctgccctcagcgagcccggcaggcgtcccgggacagctcagtgttggagggccacctgaaccacgagccagggctggggcttgcatgtcattgtctatgacagcgtcaagactggcccttggcaccgtgctgtgtggaaaccctcccctctgagactccactgagacgtggctgagtgaaatcttcctcgtcagtggtcaaggtgtgtcatccatacagctccatgcctttgtcttttttaaatgtaattaaaaaaggaaccaactggc

SEQ ID NO: 285064 - DNA, 3054 bp, Homo sapiens
gggccccgcaggctcggtgaatcgaacgttgagcagggcggtgggtggtgcggagtgccgagcggcctcacccccaaccgtcggcccagtcggacggttccgaggcgttgccgggagccgggcgcggctctgtgtggactcggagaaacgcggggcgtctgcctgagcccgcttttctacaagatgtggggatttttgaagcgccctgtagtggtgacggctgacatcaacttgagccttgtggccctgactgggatggggttactgagccggctgtggcgactcacctacccgcgggctgtggtttttgacgaagtatattatgggcagtacatctctttttacatgaaacaaatcttcttcttggatgacagtgggccgccatttggccacatggtgctggccttgggaggttatttaggaggattcgatggcaattttttgtggaacagaattggagcagaatacagtagcaacgtgcctgtgtggtccctgcgcctgctgccagcactcgcgggggccttgtcggtccccatggcctaccagatagtgttggagctccacttttctcattgtgccgccatgggagctgctctgttgatgcttatcgagaatgctctcatcactcagtcaaggctaatgcttttggaatcagtgttaatatttttcaatctattggccgtgttgtcctacctgaagttcttcaactgccaaaagcacagccctttttctctgagctggtggttctggctaacactgacaggggtcgcttgttcctgtgcagtgggcatcaagtacatgggtgtgttcacgtacgtgctcgtgctgggtgttgcagctgtccatgcctggcacctgcttggagaccagactttgtccaatgtctgtgtgttctgtcacttgctcgcccgagcagtggctttgctggtcatcccggtcgtcctgtacttactgttcttctacgtccacttgattctagtcttccgctctgggccccacgaccaaatcatgtccagtgccttccaggccagcttagagggaggactagctcggatcacccagggtcagccactggaggtggcctttgggtcccaggtcactctgaggaacgtctttgggaaacctgtgccctgctggcttcattcccaccaggacacctaccccatgatatatgagaacggccgaggcagctcccaccagcaacaggtgacctgttaccccttcaaagacgtcaataactggtggattgtaaaggatcccaggaggcaccagctggtggtgagcagccctccgagacctgtgaggcacggggacatggtgcagctggtccacggcatgaccacccgctccctgaacacgcatgatgttgcagcccccctgagcccccattcacaggaggtctcctgctacattgactataacatctccatgcccgcccagaacctctggagactggaaattgtgaacagaggatctgacacagacgtctggaagaccatcctctcagaggtccgctttgtgcacgtgaacacttccgctgtcttaaagctgagcggggctcacctccctgactgggggtatcggcaactggagatcgtcggggagaagctgtcccggggctaccacgggagcacggtgtggaacgtggaggagcaccgatacggcgcgagccaggagcagagggagcgggaacgggagctgcactcacctgcgcaggtggacgtcagcaggaacctcagcttcatggcgagattctcggagctgcagtggaggatgctggcgctgagaagtgatgactcggaacacaagtacagctccagcccactggagtgggtcaccctggacaccaatattgcctactggctgcaccccaggaccagcgctcagatccacctacttggaaacatagtgatctgggtttcgggcagcctcgctctggccatctacgccctgctgtccttgtggtacctgctccgacggcgaagaaatgtccatgacctccctcaggatgcctggctgcgctgggtgctggctggggcgctgtgtgccggtggctgggcagtgaactacctcccgttcttcctgatggagaagacactcttcctctaccactacctgcccgcactcaccttccaaatccttctgctccctgtggtcctgcagcacatcagcgaccacctgtgcaggtcccagctccagaggagcatcttcagcgccctggtggtggcctggtactcctccgcgtgccacgtgtccaacacgctgcgcccactcacctacggggacaagtcactctcgccacatgaactcaaggcccttcgctggaaagacagctgggacatcttgatccgaaaacactagaacaagagtgtggcaaagaacacccgtgctggggtcgggacgaggttgaagggtcttggtcaatgtacgtaatgagcagggtgggccccacgctgggaggacacgggctgggctgagcagggcctctagtggaacacatgggggtctcattgaaaagctctctgatgagcacctccttttgtgcaaagttaattttttctcgacaataaagatattccgtgtcttcacccctgaactaagacacagggagtatttcagaggccagcgtaggagtcatcgacaacgaaaagccgagaacccagggccagcagtggagcctcagcagaccagggcctggtccttgctaattgctgcagggtggagtttgatctggcagacccgatcctccttcatgaacacccagcaacctgagcaagtcccggccctgccctcagcgagcccggcaggcgtcccgggacagctcagtgttggagggccacctgaaccacgagccagggctggggcttgcatgtcattgtctatgacagcgtcaagactggcccttggcaccgtgctgtgtggaaaccctcccctctgagactccactgagacgtggctgagtgaaatcttcctcgtcagtggtcaaggtgtgtcatccatacagctccatgcctttgtcttttttaaatgtaattaaaaaaggaaccaactggc

SEQ ID NO: 285065 - DNA, 2902 bp, Homo sapiens
gggccccgcaggctcggtgaatcgaacgttgagcagggcggtgggtggtgcggagtgccgagcggcctcacccccaaccgtcggcccagtcggacggttccgaggcgttgccgggagccgggcgcggctctgtgtggactcggagaaacgcggttttgacgaagtatattatgggcagtacatctctttttacatgaaacaaatcttcttcttggatgacagtgggccgccatttggccacatggtgctggccttgggaggttatttaggaggattcgatggcaattttttgtggaacagaattggagcagaatacagtagcaacgtgcctgtgtggtccctgcgcctgctgccagcactcgcgggggccttgtcggtccccatggcctaccagatagtgttggagctccacttttctcattgtgccgccatgggagctgctctgttgatgcttatcgagaatgctctcatcactcagtcaaggctaatgcttttggaatcagtgttaatatttttcaatctattggccgtgttgtcctacctgaagttcttcaactgccaaaagcacagccctttttctctgagctggtggttctggctaacactgacaggggtcgcttgttcctgtgcagtgggcatcaagtacatgggtgtgttcacgtacgtgctcgtgctgggtgttgcagctgtccatgcctggcacctgcttggagaccagactttgtccaatgtctgtgtgttctgtcacttgctcgcccgagcagtggctttgctggtcatcccggtcgtcctgtacttactgttcttctacgtccacttgattctagtcttccgctctgggccccacgaccaaatcatgtccagtgccttccaggccagcttagagggaggactagctcggatcacccagggtcagccactggaggtggcctttgggtcccaggtcactctgaggaacgtctttgggaaacctgtgccctgctggcttcattcccaccaggacacctaccccatgatatatgagaacggccgaggcagctcccaccagcaacaggtgacctgttaccccttcaaagacgtcaataactggtggattgtaaaggatcccaggaggcaccagctggtggtgagcagccctccgagacctgtgaggcacggggacatggtgcagctggtccacggcatgaccacccgctccctgaacacgcatgatgttgcagcccccctgagcccccattcacaggaggtctcctgctacattgactataacatctccatgcccgcccagaacctctggagactggaaattgtgaacagaggatctgacacagacgtctggaagaccatcctctcagaggtccgctttgtgcacgtgaacacttccgctgtcttaaagctgagcggggctcacctccctgactgggggtatcggcaactggagatcgtcggggagaagctgtcccggggctaccacgggagcacggtgtggaacgtggaggagcaccgatacggcgcgagccaggagcagagggagcgggaacgggagctgcactcacctgcgcaggtggacgtcagcaggaacctcagcttcatggcgagattctcggagctgcagtggaggatgctggcgctgagaagtgatgactcggaacacaagtacagctccagcccactggagtgggtcaccctggacaccaatattgcctactggctgcaccccaggaccagcgctcagatccacctacttggaaacatagtgatctgggtttcgggcagcctcgctctggccatctacgccctgctgtccttgtggtacctgctccgacggcgaagaaatgtccatgacctccctcaggatgcctggctgcgctgggtgctggctggggcgctgtgtgccggtggctgggcagtgaactacctcccgttcttcctgatggagaagacactcttcctctaccactacctgcccgcactcaccttccaaatccttctgctccctgtggtcctgcagcacatcagcgaccacctgtgcaggtcccagctccagaggagcatcttcagcgccctggtggtggcctggtactcctccgcgtgccacgtgtccaacacgctgcgcccactcacctacggggacaagtcactctcgccacatgaactcaaggcccttcgctggaaagacagctgggacatcttgatccgaaaacactagaacaagagtgtggcaaagaacacccgtgctggggtcgggacgaggttgaagggtcttggtcaatgtacgtaatgagcagggtgggccccacgctgggaggacacgggctgggctgagcagggcctctagtggaacacatgggggtctcattgaaaagctctctgatgagcacctccttttgtgcaaagttaattttttctcgacaataaagatattccgtgtcttcacccctgaactaagacacagggagtatttcagaggccagcgtaggagtcatcgacaacgaaaagccgagaacccagggccagcagtggagcctcagcagaccagggcctggtccttgctaattgctgcagggtggagtttgatctggcagacccgatcctccttcatgaacacccagcaacctgagcaagtcccggccctgccctcagcgagcccggcaggcgtcccgggacagctcagtgttggagggccacctgaaccacgagccagggctggggcttgcatgtcattgtctatgacagcgtcaagactggcccttggcaccgtgctgtgtggaaaccctcccctctgagactccactgagacgtggctgagtgaaatcttcctcgtcagtggtcaaggtgtgtcatccatacagctccatgcctttgtcttttttaaatgtaattaaaaaaggaaccaactggc

SEQ ID NO: 285066 - DNA, 3317 bp, Homo sapiens
gggccccgcaggctcggtgaatcgaacgttgagcagggcggtgggtggtgcggagtgccgagcggcctcacccccaaccgtcggcccagtcggacggttccgaggcgttgccgggagccgggcgcggctctgtgtggactcggagaaacgcggggcgtctgcctgagcccgcttttctacaagatgtggggatttttgaagcgccctgtagtggtgacggctgacatcaacttgagccttgtggccctgactgggatggggttactgagccggctgtggcgactcacctacccgcgggctgtggtttttgacgaagtatattatgggcagtacatctctttttacatgaaacaaatcttcttcttggatgacagtgggccgccatttggccacatggtgctggccttgggaggttatttaggaggattcgatggcaattttttgtggaacagaattggagcagaatacagtagcaacgtgcctgtgtggtccctgcgcctgctgccagcactcgcgggggccttgtcggtccccatggcctaccagatagtgttggagctccacttttctcattgtgccgccatgggagctgctctgttgatgcttatcgagaatgctctcatcactcagtcaaggctaatgcttttggaatcagtgttaatatttttcaatctattggccgtgttgtcctacctgaagttcttcaactgccaaaagcacagccctttttctctgagctggtggttctggctaacactgacaggggtcgcttgttcctgtgcagtgggcatcaagtacatgggtgtgttcacgtacgtgctcgtgctgggtgttgcagctgtccatgcctggcacctgcttggagaccagactttgtccaatgtaggtgctgatgtccagtgctgcatgaggccggcctgtatggggcagatgcggatgtcacagggggtacttggtgaaaagactccaatcctcaatgttttagaagcaggcaggcctgggcagcctcgcctcttggcctctgcaggtgcctctgtatgggaggccagagtttctgtcactaactttttctaagctcacaatgtctagaggtgggtgcgcttttccacgcagtggaacatgacttttctttgaatctctggcaggtctgtgtgttctgtcacttgctcgcccgagcagtggctttgctggtcatcccggtcgtcctgtacttactgttcttctacgtccacttgattctagtcttccgctctgggccccacgaccaaatcatgtccagtgccttccaggccagcttagagggaggactagctcggatcacccagggtcagccactggaggtggcctttgggtcccaggtcactctgaggaacgtctttgggaaacctgtgccctgctggcttcattcccaccaggacacctaccccatgatatatgagaacggccgaggcagctcccaccagcaacaggtgacctgttaccccttcaaagacgtcaataactggtggattgtaaaggatcccaggaggcaccagctggtggtgagcagccctccgagacctgtgaggcacggggacatggtgcagctggtccacggcatgaccacccgctccctgaacacgcatgatgttgcagcccccctgagcccccattcacaggaggtctcctgctacattgactataacatctccatgcccgcccagaacctctggagactggaaattgtgaacagaggatctgacacagacgtctggaagaccatcctctcagaggtccgctttgtgcacgtgaacacttccgctgtcttaaagctgagcggggctcacctccctgactgggggtatcggcaactggagatcgtcggggagaagctgtcccggggctaccacgggagcacggtgtggaacgtggaggagcaccgatacggcgcgagccaggagcagagggagcgggaacgggagctgcactcacctgcgcaggtggacgtcagcaggaacctcagcttcatggcgagattctcggagctgcagtggaggatgctggcgctgagaagtgatgactcggaacacaagtacagctccagcccactggagtgggtcaccctggacaccaatattgcctactggctgcaccccaggaccagcgctcagatccacctacttggaaacatagtgatctgggtttcgggcagcctcgctctggccatctacgccctgctgtccttgtggtacctgctccgacggcgaagaaatgtccatgacctccctcaggatgcctggctgcgctgggtgctggctggggcgctgtgtgccggtggctgggcagtgaactacctcccgttcttcctgatggagaagacactcttcctctaccactacctgcccgcactcaccttccaaatccttctgctccctgtggtcctgcagcacatcagcgaccacctgtgcaggtcccagctccagaggagcatcttcagcgccctggtggtggcctggtactcctccgcgtgccacgtgtccaacacgctgcgcccactcacctacggggacaagtcactctcgccacatgaactcaaggcccttcgctggaaagacagctgggacatcttgatccgaaaacactagaacaagagtgtggcaaagaacacccgtgctggggtcgggacgaggttgaagggtcttggtcaatgtacgtaatgagcagggtgggccccacgctgggaggacacgggctgggctgagcagggcctctagtggaacacatgggggtctcattgaaaagctctctgatgagcacctccttttgtgcaaagttaattttttctcgacaataaagatattccgtgtcttcacccctgaactaagacacagggagtatttcagaggccagcgtaggagtcatcgacaacgaaaagccgagaacccagggccagcagtggagcctcagcagaccagggcctggtccttgctaattgctgcagggtggagtttgatctggcagacccgatcctccttcatgaacacccagcaacctgagcaagtcccggccctgccctcagcgagcccggcaggcgtcccgggacagctcagtgttggagggccacctgaaccacgagccagggctggggcttgcatgtcattgtctatgacagcgtcaagactggcccttggcaccgtgctgtgtggaaaccctcccctctgagactccactgagacgtggctgagtgaaatcttcctcgtcagtggtcaaggtgtgtcatccatacagctccatgcctttgtcttttttaaatgtaattaaaaaaggaaccaactggc

SEQ ID NO: 285067 - DNA, 2795 bp, Homo sapiens
gggccccgcaggctcggtgaatcgaacgttgagcagggcggtgggtggtgcggagtgccgagcggcctcacccccaaccgtcggcccagtcggacggttccgaggcgttgccgggagccgggcgcggctctgtgtggactcggagaaacgcgggttatttaggaggattcgatggcaattttttgtggaacagaattggagcagaatacagtagcaacgtgcctgtgtggtccctgcgcctgctgccagcactcgcgggggccttgtcggtccccatggcctaccagatagtgttggagctccacttttctcattgtgccgccatgggagctgctctgttgatgcttatcgagaatgctctcatcactcagtcaaggctaatgcttttggaatcagtgttaatatttttcaatctattggccgtgttgtcctacctgaagttcttcaactgccaaaagcacagccctttttctctgagctggtggttctggctaacactgacaggggtcgcttgttcctgtgcagtgggcatcaagtacatgggtgtgttcacgtacgtgctcgtgctgggtgttgcagctgtccatgcctggcacctgcttggagaccagactttgtccaatgtctgtgtgttctgtcacttgctcgcccgagcagtggctttgctggtcatcccggtcgtcctgtacttactgttcttctacgtccacttgattctagtcttccgctctgggccccacgaccaaatcatgtccagtgccttccaggccagcttagagggaggactagctcggatcacccagggtcagccactggaggtggcctttgggtcccaggtcactctgaggaacgtctttgggaaacctgtgccctgctggcttcattcccaccaggacacctaccccatgatatatgagaacggccgaggcagctcccaccagcaacaggtgacctgttaccccttcaaagacgtcaataactggtggattgtaaaggatcccaggaggcaccagctggtggtgagcagccctccgagacctgtgaggcacggggacatggtgcagctggtccacggcatgaccacccgctccctgaacacgcatgatgttgcagcccccctgagcccccattcacaggaggtctcctgctacattgactataacatctccatgcccgcccagaacctctggagactggaaattgtgaacagaggatctgacacagacgtctggaagaccatcctctcagaggtccgctttgtgcacgtgaacacttccgctgtcttaaagctgagcggggctcacctccctgactgggggtatcggcaactggagatcgtcggggagaagctgtcccggggctaccacgggagcacggtgtggaacgtggaggagcaccgatacggcgcgagccaggagcagagggagcgggaacgggagctgcactcacctgcgcaggtggacgtcagcaggaacctcagcttcatggcgagattctcggagctgcagtggaggatgctggcgctgagaagtgatgactcggaacacaagtacagctccagcccactggagtgggtcaccctggacaccaatattgcctactggctgcaccccaggaccagcgctcagatccacctacttggaaacatagtgatctgggtttcgggcagcctcgctctggccatctacgccctgctgtccttgtggtacctgctccgacggcgaagaaatgtccatgacctccctcaggatgcctggctgcgctgggtgctggctggggcgctgtgtgccggtggctgggcagtgaactacctcccgttcttcctgatggagaagacactcttcctctaccactacctgcccgcactcaccttccaaatccttctgctccctgtggtcctgcagcacatcagcgaccacctgtgcaggtcccagctccagaggagcatcttcagcgccctggtggtggcctggtactcctccgcgtgccacgtgtccaacacgctgcgcccactcacctacggggacaagtcactctcgccacatgaactcaaggcccttcgctggaaagacagctgggacatcttgatccgaaaacactagaacaagagtgtggcaaagaacacccgtgctggggtcgggacgaggttgaagggtcttggtcaatgtacgtaatgagcagggtgggccccacgctgggaggacacgggctgggctgagcagggcctctagtggaacacatgggggtctcattgaaaagctctctgatgagcacctccttttgtgcaaagttaattttttctcgacaataaagatattccgtgtcttcacccctgaactaagacacagggagtatttcagaggccagcgtaggagtcatcgacaacgaaaagccgagaacccagggccagcagtggagcctcagcagaccagggcctggtccttgctaattgctgcagggtggagtttgatctggcagacccgatcctccttcatgaacacccagcaacctgagcaagtcccggccctgccctcagcgagcccggcaggcgtcccgggacagctcagtgttggagggccacctgaaccacgagccagggctggggcttgcatgtcattgtctatgacagcgtcaagactggcccttggcaccgtgctgtgtggaaaccctcccctctgagactccactgagacgtggctgagtgaaatcttcctcgtcagtggtcaaggtgtgtcatccatacagctccatgcctttgtcttttttaaatgtaattaaaaaaggaaccaactggc

SEQ ID NO: 285068 - DNA, 2968 bp, Homo sapiens
gggccccgcaggctcggtgaatcgaacgttgagcagggcggtgggtggtgcggagtgccgagcggcctcacccccaaccgtcggcccagtcggacggttccgaggcgttgccgggagccgggcgcggctctgtgtggactcggagaaacgcggttttgacgaagtatattatgggcagtacatctctttttacatgaaacaaatcttcttcttggatgacagtgggccgccatttggccacatggtgctggccttgggaggttatttaggaggattcgatggcaattttttgtggaacagaattggagcagaatacagtagcaacgtgcctgtgtggtccctgcgcctgctgccagcactcgcgggggccttgtcggtccccatggcctaccagatagtgttggagctccacttttctcattgtgccgccatgggagctgctctgttgatgcttatcgagaatgctctcatcactcagtcaaggctaatgcttttggaatcagtgttaatatttttcaatctattggccgtgttgtcctacctgaagttcttcaactgccaaaagcacagccctttttctctgagctggtggttctggctaacactgacaggggtcgcttgttcctgtgcagtgggcatcaagtacatgggtgtgttcacgtacgtgctcgtgctgggtgttgcagctgtccatgcctggcacctgcttggagaccagactttgtccaatgtaggtgctgatgtccagtgctgcatgaggccggcctgtatggggcagatgcggatgtcacagggggtctgtgtgttctgtcacttgctcgcccgagcagtggctttgctggtcatcccggtcgtcctgtacttactgttcttctacgtccacttgattctagtcttccgctctgggccccacgaccaaatcatgtccagtgccttccaggccagcttagagggaggactagctcggatcacccagggtcagccactggaggtggcctttgggtcccaggtcactctgaggaacgtctttgggaaacctgtgccctgctggcttcattcccaccaggacacctaccccatgatatatgagaacggccgaggcagctcccaccagcaacaggtgacctgttaccccttcaaagacgtcaataactggtggattgtaaaggatcccaggaggcaccagctggtggtgagcagccctccgagacctgtgaggcacggggacatggtgcagctggtccacggcatgaccacccgctccctgaacacgcatgatgttgcagcccccctgagcccccattcacaggaggtctcctgctacattgactataacatctccatgcccgcccagaacctctggagactggaaattgtgaacagaggatctgacacagacgtctggaagaccatcctctcagaggtccgctttgtgcacgtgaacacttccgctgtcttaaagctgagcggggctcacctccctgactgggggtatcggcaactggagatcgtcggggagaagctgtcccggggctaccacgggagcacggtgtggaacgtggaggagcaccgatacggcgcgagccaggagcagagggagcgggaacgggagctgcactcacctgcgcaggtggacgtcagcaggaacctcagcttcatggcgagattctcggagctgcagtggaggatgctggcgctgagaagtgatgactcggaacacaagtacagctccagcccactggagtgggtcaccctggacaccaatattgcctactggctgcaccccaggaccagcgctcagatccacctacttggaaacatagtgatctgggtttcgggcagcctcgctctggccatctacgccctgctgtccttgtggtacctgctccgacggcgaagaaatgtccatgacctccctcaggatgcctggctgcgctgggtgctggctggggcgctgtgtgccggtggctgggcagtgaactacctcccgttcttcctgatggagaagacactcttcctctaccactacctgcccgcactcaccttccaaatccttctgctccctgtggtcctgcagcacatcagcgaccacctgtgcaggtcccagctccagaggagcatcttcagcgccctggtggtggcctggtactcctccgcgtgccacgtgtccaacacgctgcgcccactcacctacggggacaagtcactctcgccacatgaactcaaggcccttcgctggaaagacagctgggacatcttgatccgaaaacactagaacaagagtgtggcaaagaacacccgtgctggggtcgggacgaggttgaagggtcttggtcaatgtacgtaatgagcagggtgggccccacgctgggaggacacgggctgggctgagcagggcctctagtggaacacatgggggtctcattgaaaagctctctgatgagcacctccttttgtgcaaagttaattttttctcgacaataaagatattccgtgtcttcacccctgaactaagacacagggagtatttcagaggccagcgtaggagtcatcgacaacgaaaagccgagaacccagggccagcagtggagcctcagcagaccagggcctggtccttgctaattgctgcagggtggagtttgatctggcagacccgatcctccttcatgaacacccagcaacctgagcaagtcccggccctgccctcagcgagcccggcaggcgtcccgggacagctcagtgttggagggccacctgaaccacgagccagggctggggcttgcatgtcattgtctatgacagcgtcaagactggcccttggcaccgtgctgtgtggaaaccctcccctctgagactccactgagacgtggctgagtgaaatcttcctcgtcagtggtcaaggtgtgtcatccatacagctccatgcctttgtcttttttaaatgtaattaaaaaaggaaccaactggc

SEQ ID NO: 285069 - DNA, 2861 bp, Homo sapiens
gggccccgcaggctcggtgaatcgaacgttgagcagggcggtgggtggtgcggagtgccgagcggcctcacccccaaccgtcggcccagtcggacggttccgaggcgttgccgggagccgggcgcggctctgtgtggactcggagaaacgcgggttatttaggaggattcgatggcaattttttgtggaacagaattggagcagaatacagtagcaacgtgcctgtgtggtccctgcgcctgctgccagcactcgcgggggccttgtcggtccccatggcctaccagatagtgttggagctccacttttctcattgtgccgccatgggagctgctctgttgatgcttatcgagaatgctctcatcactcagtcaaggctaatgcttttggaatcagtgttaatatttttcaatctattggccgtgttgtcctacctgaagttcttcaactgccaaaagcacagccctttttctctgagctggtggttctggctaacactgacaggggtcgcttgttcctgtgcagtgggcatcaagtacatgggtgtgttcacgtacgtgctcgtgctgggtgttgcagctgtccatgcctggcacctgcttggagaccagactttgtccaatgtaggtgctgatgtccagtgctgcatgaggccggcctgtatggggcagatgcggatgtcacagggggtctgtgtgttctgtcacttgctcgcccgagcagtggctttgctggtcatcccggtcgtcctgtacttactgttcttctacgtccacttgattctagtcttccgctctgggccccacgaccaaatcatgtccagtgccttccaggccagcttagagggaggactagctcggatcacccagggtcagccactggaggtggcctttgggtcccaggtcactctgaggaacgtctttgggaaacctgtgccctgctggcttcattcccaccaggacacctaccccatgatatatgagaacggccgaggcagctcccaccagcaacaggtgacctgttaccccttcaaagacgtcaataactggtggattgtaaaggatcccaggaggcaccagctggtggtgagcagccctccgagacctgtgaggcacggggacatggtgcagctggtccacggcatgaccacccgctccctgaacacgcatgatgttgcagcccccctgagcccccattcacaggaggtctcctgctacattgactataacatctccatgcccgcccagaacctctggagactggaaattgtgaacagaggatctgacacagacgtctggaagaccatcctctcagaggtccgctttgtgcacgtgaacacttccgctgtcttaaagctgagcggggctcacctccctgactgggggtatcggcaactggagatcgtcggggagaagctgtcccggggctaccacgggagcacggtgtggaacgtggaggagcaccgatacggcgcgagccaggagcagagggagcgggaacgggagctgcactcacctgcgcaggtggacgtcagcaggaacctcagcttcatggcgagattctcggagctgcagtggaggatgctggcgctgagaagtgatgactcggaacacaagtacagctccagcccactggagtgggtcaccctggacaccaatattgcctactggctgcaccccaggaccagcgctcagatccacctacttggaaacatagtgatctgggtttcgggcagcctcgctctggccatctacgccctgctgtccttgtggtacctgctccgacggcgaagaaatgtccatgacctccctcaggatgcctggctgcgctgggtgctggctggggcgctgtgtgccggtggctgggcagtgaactacctcccgttcttcctgatggagaagacactcttcctctaccactacctgcccgcactcaccttccaaatccttctgctccctgtggtcctgcagcacatcagcgaccacctgtgcaggtcccagctccagaggagcatcttcagcgccctggtggtggcctggtactcctccgcgtgccacgtgtccaacacgctgcgcccactcacctacggggacaagtcactctcgccacatgaactcaaggcccttcgctggaaagacagctgggacatcttgatccgaaaacactagaacaagagtgtggcaaagaacacccgtgctggggtcgggacgaggttgaagggtcttggtcaatgtacgtaatgagcagggtgggccccacgctgggaggacacgggctgggctgagcagggcctctagtggaacacatgggggtctcattgaaaagctctctgatgagcacctccttttgtgcaaagttaattttttctcgacaataaagatattccgtgtcttcacccctgaactaagacacagggagtatttcagaggccagcgtaggagtcatcgacaacgaaaagccgagaacccagggccagcagtggagcctcagcagaccagggcctggtccttgctaattgctgcagggtggagtttgatctggcagacccgatcctccttcatgaacacccagcaacctgagcaagtcccggccctgccctcagcgagcccggcaggcgtcccgggacagctcagtgttggagggccacctgaaccacgagccagggctggggcttgcatgtcattgtctatgacagcgtcaagactggcccttggcaccgtgctgtgtggaaaccctcccctctgagactccactgagacgtggctgagtgaaatcttcctcgtcagtggtcaaggtgtgtcatccatacagctccatgcctttgtcttttttaaatgtaattaaaaaaggaaccaactggc

SEQ ID NO: 285070 - DNA, 3728 bp, Homo sapiens
  misc_feature (3728)..(3728): n is a, c, g, or t
gggccccgcaggctcggtgaatcgaacgttgagcagggcggtgggtggtgcggagtgccgagcggcctcacccccaaccgtcggcccagtcggacggttccgaggcgttgccgggagccgggcgcggctctgtgtggactcggagaaacgcggggcgtctgcctgagcccgcttttctacaagatgtggggatttttgaagcgccctgtagtggtgacggctgacatcaacttgagccttgtggccctgactgggatggggttactgagccggctgtggcgactcacctacccgcgggctgtggtttttgacgaagtatattatgggcagtacatctctttttacatgaaacaaatcttcttcttggatgacagtgggccgccatttggccacatggtgctggccttgggaggttatttaggaggattcgatggcaattttttgtggaacagaattggagcagaatacagtagcaacgtgcctgtgtggtccctgcgcctgctgccagcactcgcgggggccttgtcggtccccatggcctaccagatagtgttggagctccacttttctcattgtgccgccatgggagctgctctgttgatgcttatcgagaatgctctcatcactcagtcaaggctaatgcttttggaatcagtgttaatatttttcaatctattggccgtgttgtcctacctgaagttcttcaactgccaaaagcacagccctttttctctgagctggtggttctggctaacactgacaggggtcgcttgttcctgtgcagtgggcatcaagtacatgggtgtgttcacgtacgtgctcgtgctgggtgttgcagctgtccatgcctggcacctgcttggagaccagactttgtccaatgtctgtgtgttctgtcacttgctcgcccgagcagtggctttgctggtcatcccggtcgtcctgtacttactgttcttctacgtccacttgattctagtcttccgctctgggccccacgaccaaatcatgtccagtgccttccaggccagcttagagggaggactagctcggatcacccagggtcagccactggaggtggcctttgggtcccaggtcactctgaggaacgtctttgggaaacctgtgccctgctggcttcattcccaccaggacacctaccccatgatatatgagaacggccgaggcagctcccaccagcaacaggtgacctgttaccccttcaaagacgtcaataactggtggattgtaaaggatcccaggaggcaccagctggtggtgagcagccctccgagacctgtgaggcacggggacatggtgcagctggtccacggcatgaccacccgctccctgaacacgcatgatgttgcagcccccctgagcccccattcacaggaggtctcctgctacattgactataacatctccatgcccgcccagaacctctggagactggaaattgtgaacagaggatctgacacagacgtctggaagaccatcctctcagaggtccgctttgtgcacgtgaacacttccgctgtcttaaagctgagcggggctcacctccctgactgggggtatcggcaactggagatcgtcggggagaagctgtcccggggctaccacgggagcacggtgtggaacgtggaggagcaccgatacggcgcgagccaggagcagagggagcgggaacgggagctgcactcacctgcgcaggtggacgtcagcaggaacctcagcttcatggcgagattctcggagctgcagtggaggatgctggcgctgagaagtgatgactcggaacacaagtacagctccagcccactggagtgggtcaccctggacaccaatattgcctactggctgcaccccaggaccagcgctcagatccacctacttggaaacatagtgatctgggtttcgggcagcctcgctctggccatctacgccctgctgtccttgtggtacctgctccgacggcgaagaaatgtccatgacctccctcaggatgcctggctgcgctgggtgctggctggggcgctgtgtgccggtggctgggcagtgaactacctcccgttcttcctgatggagaagacactcttcctctaccactacctgcccgcactcaccttccaaatccttctgctccctgtggtcctgcagcacatcagcgaccacctgtgcaggtcccagctccagaggagcatcttcagcgccctggtggtggcctggtactcctccgcgtgccacgtgtccaacacgctgcgcccactcacctacggggacaagtcactctcgccacatgaactcaaggcccttcgctggaaagacagctgggacatcttgatccgaaaacactagaacaagagtgtggcaaagaacacccgtgctggggtcgggacgaggttgaagggtcttggtcaatgtacgtaatgagcagggtgggccccacgctgggaggacacgggctgggctgagcagggcctctagtggaacacatgggggtctcattgaaaagctctctgatgagcacctccttttgtgcaaagttaattttttctcgacaataaagatattccgtgtcttcacccctgaactaagacacagggagtatttcagaggccagcgtaggagtcatcgacaacgaaaagccgagaacccagggccagcagtggagcctcagcagaccagggcctggtccttgctaattgctgcagggtggagtttgatctggcagacccgatcctccttcatgaacacccagcaacctgagcaagtcccggccctgccctcagcgagcccggcaggcgtcccgggacagctcagtgttggagggccacctgaaccacgagccagggctggggcttgcatgtcattgtctatgacagcgtcaagactggcccttggcaccgtgctgtgtggaaaccctcccctctgagactccactgagacgtggctgagtgaaatcttcctcgtcagtggtcaaggtgtgtcatccatacagctccatgcctttgtcttttttaaatgtaattaaaaaaggaaccaactggcaaaaaaaaaaaaaaaaaaaaaacaaaaaaaaaaaaaaaacaaaaaaagagggggggggggcaaaaaagtatatccccgagaggggcgccaattagcgtctacccagttttttgaccaggggggcccaaaagggagggaatataaacgaaagcacggagcgcgggtaaacacggcgcggacggggacaccagcgtgcccgggagaacactgggggagagggacccccaactcgcggggggggacaatagtgggcaccacccctgcagaatataagaccggaggaaaatcacacgacgggacaacgtcgcacccacgcgcaattcgcggcggcgaaaaatcggccccccggttatattgaaatgacgggggggcgccacagcagtctagctgacaacaagacaaaacaaagcagacgcagcgcggacaagcgaagggtggctaaggctgaacgtatgtagacggacgaggaggcagaggaggacggagtagtaacaacccgaccaccaccacacacaggtgacacagggagtaagaaacaagagacgacgatgagaccacgagaacgcacgaaagattaagaggaggtgcgagcctagcggacgcgaagaccagaacgactgactgaaggtcatccagccggcgggccgccaggccagctcgccctcgcgacccan

SEQ ID NO: 285071 - DNA, 1738 bp, Homo sapiens
gccttggcgaggaggagggtgcacttccccagcgaccctcggagcagcccggggtgctgtgggcattgggaaggaaggccagtaccagccccttatagcttccctcacttggggacttgtccctttgtctcaggctcaagaaattgtgaacagaggatctgacacagacgtctggaagaccatcctctcagaggtccgctttgtgcacgtgaacacttccgctgtcttaaagctgagcggggctcacctccctgactgggggtatcggcaactggagatcgtcggggagaagctgtcccggggctaccacgggagcacggtgtggaacgtggaggagcaccgatacggcgcgagccaggagcagagggagcgggaacgggagctgcactcacctgcgcaggtggacgtcagcaggaacctcagcttcatggcgagattctcggagctgcagtggaggatgctggcgctgagaagtgatgactcggaacacaagtacagctccagcccactggagtgggtcaccctggacaccaatattgcctactggctgcaccccaggaccagcgctcagatccacctacttggaaacatagtgatctgggtttcgggcagcctcgctctggccatctacgccctgctgtccttgtggtacctgctccgacggcgaagaaatgtccatgacctccctcaggatgcctggctgcgctgggtgctggctggggcgctgtgtgccggtggctgggcagtgaactacctcccgttcttcctgatggagaagacactcttcctctaccactacctgcccgcactcaccttccaaatccttctgctccctgtggtcctgcagcacatcagcgaccacctgtgcaggtcccagctccagaggagcatcttcagcgccctggtggtggcctggtactcctccgcgtgccacgtgtccaacacgctgcgcccactcacctacggggacaagtcactctcgccacatgaactcaaggcccttcgctggaaagacagctgggacatcttgatccgaaaacactagaacaagagtgtggcaaagaacacccgtgctggggtcgggacgaggttgaagggtcttggtcaatgtacgtaatgagcagggtgggccccacgctgggaggacacgggctgggctgagcagggcctctagtggaacacatgggggtctcattgaaaagctctctgatgagcacctccttttgtgcaaagttaattttttctcgacaataaagatattccgtgtcttcacccctgaactaagacacagggagtatttcagaggccagcgtaggagtcatcgacaacgaaaagccgagaacccagggccagcagtggagcctcagcagaccagggcctggtccttgctaattgctgcagggtggagtttgatctggcagacccgatcctccttcatgaacacccagcaacctgagcaagtcccggccctgccctcagcgagcccggcaggcgtcccgggacagctcagtgttggagggccacctgaaccacgagccagggctggggcttgcatgtcattgtctatgacagcgtcaagactggcccttggcaccgtgctgtgtggaaaccctcccctctgagactccactgagacgtggctgagtgaaatcttcctcgtcagtggtcaaggtgtgtcatccatacagctccatgcctttgtcttttttaaatgtaattaaaaaaggaaccaactggc

SEQ ID NO: 285072 - DNA, 1575 bp, Homo sapiens
tccaacccaagtggacacgggagccacggccttcccatcacgccctttactctcctgcggtgtcaccagctgagcggggctcacctccctgactgggggtatcggcaactggagatcgtcggggagaagctgtcccggggctaccacgggagcacggtgtggaacgtggaggagcaccgatacggcgcgagccaggagcagagggagcgggaacgggagctgcactcacctgcgcaggtggacgtcagcaggaacctcagcttcatggcgagattctcggagctgcagtggaggatgctggcgctgagaagtgatgactcggaacacaagtacagctccagcccactggagtgggtcaccctggacaccaatattgcctactggctgcaccccaggaccagcgctcagatccacctacttggaaacatagtgatctgggtttcgggcagcctcgctctggccatctacgccctgctgtccttgtggtacctgctccgacggcgaagaaatgtccatgacctccctcaggatgcctggctgcgctgggtgctggctggggcgctgtgtgccggtggctgggcagtgaactacctcccgttcttcctgatggagaagacactcttcctctaccactacctgcccgcactcaccttccaaatccttctgctccctgtggtcctgcagcacatcagcgaccacctgtgcaggtcccagctccagaggagcatcttcagcgccctggtggtggcctggtactcctccgcgtgccacgtgtccaacacgctgcgcccactcacctacggggacaagtcactctcgccacatgaactcaaggcccttcgctggaaagacagctgggacatcttgatccgaaaacactagaacaagagtgtggcaaagaacacccgtgctggggtcgggacgaggttgaagggtcttggtcaatgtacgtaatgagcagggtgggccccacgctgggaggacacgggctgggctgagcagggcctctagtggaacacatgggggtctcattgaaaagctctctgatgagcacctccttttgtgcaaagttaattttttctcgacaataaagatattccgtgtcttcacccctgaactaagacacagggagtatttcagaggccagcgtaggagtcatcgacaacgaaaagccgagaacccagggccagcagtggagcctcagcagaccagggcctggtccttgctaattgctgcagggtggagtttgatctggcagacccgatcctccttcatgaacacccagcaacctgagcaagtcccggccctgccctcagcgagcccggcaggcgtcccgggacagctcagtgttggagggccacctgaaccacgagccagggctggggcttgcatgtcattgtctatgacagcgtcaagactggcccttggcaccgtgctgtgtggaaaccctcccctctgagactccactgagacgtggctgagtgaaatcttcctcgtcagtggtcaaggtgtgtcatccatacagctccatgcctttgtcttttttaaatgtaattaaaaaaggaaccaactggc

SEQ ID NO: 285073 - DNA, 1563 bp, Homo sapiens
  misc_feature (18)..(18): n is a, c, g, or t
agagagagagagagaganagactcgtgccgcacgtgaacacttccgctgtcttaaagctgagcggggctcacctccctgactgggggtatcggcaactggagatcgtcggggagaagctgtcccggggctaccacgggagcacggtgtggaacgtggaggagcaccgatacggcgcgagccaggagcagagggagcgggaacgggagctgcactcacctgcgcaggtggacgtcagcaggaacctcagcttcatggcgagattctcggagctgcagtggaggatgctggcgctgagaagtgatgactcggaacacaagtacagctccagcccactggagtgggtcaccctggacaccaatattgcctactggctgcaccccaggaccagcgctcagatccacctacttggaaacatagtgatctgggtttcgggcagcctcgctctggccatctacgccctgctgtccttgtggtacctgctccgacggcgaagaaatgtccatgacctccctcaggatgcctggctgcgctgggtgctggctggggcgctgtgtgccggtggctgggcagtgaactacctcccgttcttcctgatggagaagacactcttcctctaccactacctgcccgcactcaccttccaaatccttctgctccctgtggtcctgcagcacatcagcgaccacctgtgcaggtcccagctccagaggagcatcttcagcgccctggtggtggcctggtactcctccgcgtgccacgtgtccaacacgctgcgcccactcacctacggggacaagtcactctcgccacatgaactcaaggcccttcgctggaaagacagctgggacatcttgatccgaaaacactagaacaagagtgtggcaaagaacacccgtgctggggtcgggacgaggttgaagggtcttggtcaatgtacgtaatgagcagggtgggccccacgctgggaggacacgggctgggctgagcagggcctctagtggaacacatgggggtctcattgaaaagctctctgatgagcacctccttttgtgcaaagttaattttttctcgacaataaagatattccgtgtcttcacccctgaactaagacacagggagtatttcagaggccagcgtaggagtcatcgacaacgaaaagccgagaacccagggccagcagtggagcctcagcagaccagggcctggtccttgctaattgctgcagggtggagtttgatctggcagacccgatcctccttcatgaacacccagcaacctgagcaagtcccggccctgccctcagcgagcccggcaggcgtcccgggacagctcagtgttggagggccacctgaaccacgagccagggctggggcttgcatgtcattgtctatgacagcgtcaagactggcccttggcaccgtgctgtgtggaaaccctcccctctgagactccactgagacgtggctgagtgaaatcttcctcgtcagtggtcaaggtgtgtcatccatacagctccatgcctttgtcttttttaaatgtaattaaaaaaggaaccaactggc

SEQ ID NO: 285074 - DNA, 3609 bp, Homo sapiens
gggccccgcaggctcggtgaatcgaacgttgagcagggcggtgggtggtgcggagtgccgagcggcctcacccccaaccgtcggcccagtcggacggttccgaggcgttgccgggagccgggcgcggctctgtgtggactcggagaaacgcggggcgtctgcctgagcccgcttttctacaagatgtggggatttttgaagcgccctgtagtggtgacggctgacatcaacttgagccttgtggccctgactgggatggggttactgagccggctgtggcgactcacctacccgcgggctgtggtttttgacgaagtatattatgggcagtacatctctttttacatgaaacaaatcttcttcttggatgacagtgggccgccatttggccacatggtgctggccttgggaggttatttaggaggattcgatggcaattttttgtggaacagaattggagcagaatacagtagcaacgtgcctgtgtggtccctgcgcctgctgccagcactcgcgggggccttgtcggtccccatggcctaccagatagtgttggagctccacttttctcattgtgccgccatgggagctgctctgttgatgcttatcgagaatgctctcatcactcagtcaaggctaatgcttttggaatcagtgttaatatttttcaatctattggccgtgttgtcctacctgaagttcttcaactgccaaaagcacagccctttttctctgagctggtggttctggctaacactgacaggggtcgcttgttcctgtgcagtgggcatcaagtacatgggtgtgttcacgtacgtgctcgtgctgggtgttgcagctgtccatgcctggcacctgcttggagaccagactttgtccaatgtctgtgtgttctgtcacttgctcgcccgagcagtggctttgctggtcatcccggtcgtcctgtacttactgttcttctacgtccacttgattctagtcttccgctctgggccccacgaccaaatcatgtccagtgccttccaggccagcttagagggaggactagctcggatcacccagggtcagccactggaggtggcctttgggtcccaggtcactctgaggaacgtctttgggaaacctgtgccctgctggcttcattcccaccaggacacctaccccatgatatatgagaacggccgaggcagctcccaccagcaacaggtgacctgttaccccttcaaagacgtcaataactggtggattgtaaaggatcccaggaggcaccagctggtggtgagcagccctccgagacctgtgaggcacggggacatggtgcagctggtccacggcatgaccacccgctccctgaacacgcatgatgttgcagcccccctgagcccccattcacaggaggtctcctgctacattgactataacatctccatgcccgcccagaacctctggagactggaaattgtgaacagaggatctgacacagacgtctggaagaccatcctctcagaggtccgctttgtgcacgtgaacacttccgctgtcttaaagctgagcggggctcacctccctgactgggggtatcggcaactggagatcgtcggggagaagctgtcccggggctaccacgggagcacggtgtggaacgtggaggagcaccgatacggcgcgagccaggagcagagggagcgggaacgggagctgcactcacctgcgcaggtggacgtcagcaggaacctcagcttcatggcgagattctcggagctgcagtggaggatgctggcgctgagaagtgatgactcggaacacaagtacagctccagcccactggagtgggtcaccctggacaccaatattgcctactggctgcaccccaggaccagcgctcagatccacctacttggaaacatagtgatctgggtttcgggcagcctcgctctggccatctacgccctgctgtccttgtggtacctgctccgacggcgaagaaatgtccatgacctccctcaggatgcctggctgcgctgggtgctggctggggcgctgtgtgccggtggctgggcagtgaactacctcccgttcttcctgatggagaagacactcttcctctaccactacctgcccgcactcaccttccaaatccttctgctccctgtggtcctgcagcacatcagcgaccacctgtgcaggtcccagctccagaggagcatcttcagcgccctggtggtggcctggtactcctccgcgtgccacgtgtccaacacgctgcgcccactcacctacggggacaagtcactctcgccacatgaactcaaggcccttcgctggaaagacagctgggacatcttgatccgaaaacactagaacaagagtgtggcaaagaacacccgtgctggggtcgggacgaggttgaagggtcttggtcaatgtacgtaatgagcagggtgggccccacgctgggaggacacgggctgggctgagcagggcctctagtggaacacatgggggtctcattgaaaagctctctgatgagcacctccttttgtgcaaagttaattttttctcgacaataaagatattccgtgtcttcacccctgaactaagacacagggagtatttcagaggccagcgtaggagtcatcgacaacgaaaagccgagaacccagggccagcagtggagcctcagcagaccagggcctggtccttgctaattgctgcagggtggagtttgatctggcagacccgatcctccttcatgaacacccagcaacctgagcaagtcccggccctgccctcagcgagcccggcaggcgtcccgggacagctcagtgttggagggccacctgaaccacgagccagggctggggcttgcatgtcattgtctatgacagcgtcaagactggcccttggcaccgtgctgtgtggaaaccctcccctctgagactccactgagacgtggctgagtgaaatcttcctcgtcagtggtcaaggtgtgtcatccatacagctccatgcctttgtcttttttaaatgtaattaaaaaaggaaccaactggcgaaaaaaaaaaacagcacacacacaaaaacaggggagcggacacgccatcaaaaaagtcacccatcaagggagccacaggacatacacgacatacaccgggcacgcgtagtgacccacaggagcccaaaaacaggagaccgtacagatcacgcaaggcgaacggtggacgcgcgagagagatgctactacacacaccgtcaggtggacctcgattggtgcgaaaaagcacgtgagaatcaagtgggggaaaattcatgtggacagcgcgggaaacctgtataacatgcgatgagtggagtgatgaccatgaagtgccggaccaacaggtacccaacagcaagaaattctacaaacggcgcccgacaagggcacaagccaccacaccacgcacaggacgacgcagggaacacacacgggggcagaaaaccgaccaaccggcgaggacggagcggcgcagaggctaaaagaacagtgcggcgcgcccccagcgcagcgacgagcaagagaccaccaagagcgacctcaaaccccagggccccagcccgcgagacacg

SEQ ID NO: 285075 - DNA, 3674 bp, Homo sapiens
  misc_feature (3674)..(3674): n is a, c, g, or t
gggccccgcaggctcggtgaatcgaacgttgagcagggcggtgggtggtgcggagtgccgagcggcctcacccccaaccgtcggcccagtcggacggttccgaggcgttgccgggagccgggcgcggctctgtgtggactcggagaaacgcggggcgtctgcctgagcccgcttttctacaagatgtggggatttttgaagcgccctgtagtggtgacggctgacatcaacttgagccttgtggccctgactgggatggggttactgagccggctgtggcgactcacctacccgcgggctgtggtttttgacgaagtatattatgggcagtacatctctttttacatgaaacaaatcttcttcttggatgacagtgggccgccatttggccacatggtgctggccttgggaggttatttaggaggattcgatggcaattttttgtggaacagaattggagcagaatacagtagcaacgtgcctgtgtggtccctgcgcctgctgccagcactcgcgggggccttgtcggtccccatggcctaccagatagtgttggagctccacttttctcattgtgccgccatgggagctgctctgttgatgcttatcgagaatgctctcatcactcagtcaaggctaatgcttttggaatcagtgttaatatttttcaatctattggccgtgttgtcctacctgaagttcttcaactgccaaaagcacagccctttttctctgagctggtggttctggctaacactgacaggggtcgcttgttcctgtgcagtgggcatcaagtacatgggtgtgttcacgtacgtgctcgtgctgggtgttgcagctgtccatgcctggcacctgcttggagaccagactttgtccaatgtctgtgtgttctgtcacttgctcgcccgagcagtggctttgctggtcatcccggtcgtcctgtacttactgttcttctacgtccacttgattctagtcttccgctctgggccccacgaccaaatcatgtccagtgccttccaggccagcttagagggaggactagctcggatcacccagggtcagccactggaggtggcctttgggtcccaggtcactctgaggaacgtctttgggaaacctgtgccctgctggcttcattcccaccaggacacctaccccatgatatatgagaacggccgaggcagctcccaccagcaacaggtgacctgttaccccttcaaagacgtcaataactggtggattgtaaaggatcccaggaggcaccagctggtggtgagcagccctccgagacctgtgaggcacggggacatggtgcagctggtccacggcatgaccacccgctccctgaacacgcatgatgttgcagcccccctgagcccccattcacaggaggtctcctgctacattgactataacatctccatgcccgcccagaacctctggagactggaaattgtgaacagaggatctgacacagacgtctggaagaccatcctctcagaggtccgctttgtgcacgtgaacacttccgctgtcttaaagctgagcggggctcacctccctgactgggggtatcggcaactggagatcgtcggggagaagctgtcccggggctaccacgggagcacggtgtggaacgtggaggagcaccgatacggcgcgagccaggagcagagggagcgggaacgggagctgcactcacctgcgcaggtggacgtcagcaggaacctcagcttcatggcgagattctcggagctgcagtggaggatgctggcgctgagaagtgatgactcggaacacaagtacagctccagcccactggagtgggtcaccctggacaccaatattgcctactggctgcaccccaggaccagcgctcagatccacctacttggaaacatagtgatctgggtttcgggcagcctcgctctggccatctacgccctgctgtccttgtggtacctgctccgacggcgaagaaatgtccatgacctccctcaggatgcctggctgcgctgggtgctggctggggcgctgtgtgccggtggctgggcagtgaactacctcccgttcttcctgatggagaagacactcttcctctaccactacctgcccgcactcaccttccaaatccttctgctccctgtggtcctgcagcacatcagcgaccacctgtgcaggtcccagctccagaggagcatcttcagcgccctggtggtggcctggtactcctccgcgtgccacgtgtccaacacgctgcgcccactcacctacggggacaagtcactctcgccacatgaactcaaggcccttcgctggaaagacagctgggacatcttgatccgaaaacactagaacaagagtgtggcaaagaacacccgtgctggggtcgggacgaggttgaagggtcttggtcaatgtacgtaatgagcagggtgggccccacgctgggaggacacgggctgggctgagcagggcctctagtggaacacatgggggtctcattgaaaagctctctgatgagcacctccttttgtgcaaagttaattttttctcgacaataaagatattccgtgtcttcacccctgaactaagacacagggagtatttcagaggccagcgtaggagtcatcgacaacccttgctaattgctgcagggtggagtttgatctggcagacccgatcctccttcatgaacacccagcaacctgagcaagtcccggccctgccctcagcgagcccggcaggcgtcccgggacagctcagtgttggagggccacctgaaccacgagccagggctggggcttgcatgtcattgtctatgacagcgtcaagactggcccttggcaccgtgctgtgtggaaaccctcccctctgagactccactgagacgtggctgagtgaaatcttcctcgtcagtggtcaaggtgtgtcatccatacagctccatgcctttgtcttttttaaatgtaattaaaaaaggaaccaactggcaaaaaaaaaaaaaaaaaaaaaacaaaaaaaaaaaaaaaacaaaaaaagagggggggggggcaaaaaagtatatccccgagaggggcgccaattagcgtctacccagttttttgaccaggggggcccaaaagggagggaatataaacgaaagcacggagcgcgggtaaacacggcgcggacggggacaccagcgtgcccgggagaacactgggggagagggacccccaactcgcggggggggacaatagtgggcaccacccctgcagaatataagaccggaggaaaatcacacgacgggacaacgtcgcacccacgcgcaattcgcggcggcgaaaaatcggccccccggttatattgaaatgacgggggggcgccacagcagtctagctgacaacaagacaaaacaaagcagacgcagcgcggacaagcgaagggtggctaaggctgaacgtatgtagacggacgaggaggcagaggaggacggagtagtaacaacccgaccaccaccacacacaggtgacacagggagtaagaaacaagagacgacgatgagaccacgagaacgcacgaaagattaagaggaggtgcgagcctagcggacgcgaagaccagaacgactgactgaaggtcatccagccggcgggccgccaggccagctcgccctcgcgacccan

SEQ ID NO: 285076 - DNA, 2595 bp, Homo sapiens
gggccccgcaggctcggtgaatcgaacgttgagcagggcggtgggtggtgcggagtgccgagcggcctcacccccaaccgtcggcccagtcggacggttccgaggcgttgccgggagccgggcgcggctctgtgtggactcggagaaacgcggggcgtctgcctgagcccgcttttctacaagatgtggggatttttgaagcgccctgtagtggtgacggctgacatcaacttgagccttgtggccctgactgggatggggttactgagccggctgtggcgactcacctacccgcgggctgtggtttttgacgaagtatattatgggcagtacatctctttttacatgaaacaaatcttcttcttggatgacagtgggccgccatttggccacatggtgctggccttgggaggttatttaggaggattcgatggcaattttttgtggaacagaattggagcagaatacagtagcaacgtgcctgtgtggtccctgcgcctgctgccagcactcgcgggggccttgtcggtccccatggcctaccagatagtgttggagctccacttttctcattgtgccgccatgggagctgctctgttgatgcttatcgagaatgctctcatcactcagtcaaggctaatgcttttggaatcagtgttaatatttttcaatctattggccgtgttgtcctacctgaagttcttcaactgccaaaagcacagccctttttctctgagctggtggttctggctaacactgacaggggtcgcttgttcctgtgcagtgggcatcaagtacatgggtgtgttcacgtacgtgctcgtgctgggtgttgcagctgtccatgcctggcacctgcttggagaccagactttgtccaatgtctgtgtgttctgtcacttgctcgcccgagcagtggctttgctggtcatcccggtcgtcctgtacttactgttcttctacgtccacttgattctagtcttccgctctgggccccacgaccaaatcatgtccagtgccttccaggccagcttagagggaggactagctcggatcacccagggtcagccactggaggtggcctttgggtcccaggtcactctgaggaacgtctttgggaaacctgtgccctgctggcttcattcccaccaggacacctaccccatgatatatgagaacggccgaggcagctcccaccagcaacaggtgacctgttaccccttcaaagacgtcaataactggtggattgtaaaggatcccaggaggcaccagctggtggtgagcagccctccgagacctgtgaggcacggggacatggtgcagctggtccacggcatgaccacccgctccctgaacacgcatgatgttgcagcccccctgagcccccattcacaggaggtctcctgctacattgactataacatctccatgcccgcccagaacctctggagactggaaattgtgaacagaggatctgacacagacgtctggaagaccatcctctcagaggtccgctttgtgcacgtgaacacttccgctgtcttaaagctgagcggggctcacctccctgactgggggtatcggcaactggagatcgtcggggagaagctgtcccggggctaccacgggagcacggtgtggaacgtggaggagcaccgatacggcgcgagccaggagcagagggagcgggaacgggagctgcactcacctgcgcaggtggacgtcagcaggaacctcagcttcatggcgagattctcggagctgcagtggaggatgctggcgctgagaagtgatgactcggaacacaagtacagctccagcccactggagtgggtcaccctggacaccaatattgcctactggctgcaccccaggaccagcgctcagatccacctacttggaaacatagtgatctgggtttcgggcagcctcgctctggccatctacgccctgctgtccttgtggtacctgctccgacggcgaagaaatgtccatgacctccctcaggatgcctggctgcgctgggtgctggctggggcgctgtgtgccggtggctgggcagtgaactacctcccgttcttcctgatggagaagacactcttcctctaccactacctgcccgcactcaccttccaaatccttctgctccctgtggtcctgcagcacatcagcgaccacctgtgcaggtcccagctccagaggagcatcttcagcgccctggtggtggcctggtactcctccgcgtgccacgtgtccaacacgctgcgcccactcacctacggggacaagtcactctcgccacatgaactcaaggcccttcgctggaaagacagctgggacatcttgatccgaaaacactagaacaagagtgtggcaaagaacacccgtgctggggtcgggacgaggttgaagggtcttggtcaatgtacgtaatgagcagggtgggccccacgctgggaggacacgggctgggctgagcagggcctctagtggaacacatgggggtctcattgaaaagctctctgatgagcacctccttttgtgcaaagttaattttttctcgacaataaagatattccgtgtcttcacccctga

SEQ ID NO: 285077 - DNA, 2539 bp, Homo sapiens
  misc_feature (2539)..(2539): n is a, c, g, or t
gggccccgcaggctcggtgaatcgaacgttgagcagggcggtgggtggtgcggagtgccgagcggcctcacccccaaccgtcggcccagtcggacggttccgaggcgttgccgggagccgggcgcggctctgtgtggactcggagaaacgcggggcgtctgcctgagcccgcttttctacaagatgtggggatttttgaagcgccctgtagtggtgacggctgacatcaacttgagccttgtggccctgactgggatggggttactgagccggctgtggcgactcacctacccgcgggctgtggtttttgacgaagtatattatgggcagtacatctctttttacatgaaacaaatcttcttcttggatgacagtgggccgccatttggccacatggtgctggccttgggaggttatttaggaggattcgatggcaattttttgtggaacagaattggagcagaatacagtagcaacgtgcctgtgtggtccctgcgcctgctgccagcactcgcgggggccttgtcggtccccatggcctaccagatagtgttggagctccacttttctcattgtgccgccatgggagctgctctgttgatgcttatcgagaatgctctcatcactcagtcaaggctaatgcttttggaatcagtgttaatatttttcaatctattggccgtgttgtcctacctgaagttcttcaactgccaaaagcacagccctttttctctgagctggtggttctggctaacactgacaggggtcgcttgttcctgtgcagtgggcatcaagtacatgggtgtgttcacgtacgtgctcgtgctgggtgttgcagctgtccatgcctggcacctgcttggagaccagactttgtccaatgtctgtgtgttctgtcacttgctcgcccgagcagtggctttgctggtcatcccggtcgtcctgtacttactgttcttctacgtccacttgattctagtcttccgctctgggccccacgaccaaatcatgtccagtgccttccaggccagcttagagggaggactagctcggatcacccagggtcagccactggaggtggcctttgggtcccaggtcactctgaggaacgtctttgggaaacctgtgccctgctggcttcattcccaccaggacacctaccccatgatatatgagaacggccgaggcagctcccaccagcaacaggtgacctgttaccccttcaaagacgtcaataactggtggattgtaaaggatcccaggaggcaccagctggtggtgagcagccctccgagacctgtgaggcacggggacatggtgcagctggtccacggcatgaccacccgctccctgaacacgcatgatgttgcagcccccctgagcccccattcacaggaggtctcctgctacattgactataacatctccatgcccgcccagaacctctggagactggaaattgtgaacagaggatctgacacagacgtctggaagaccatcctctcagaggtccgctttgtgcacgtgaacacttccgctgtcttaaagacccgatcctccttcatgaacacccagcaacctgagcaagtcccggccctgccctcagcgagcccggcaggcgtcccgggacagctcagtgttggagggccacctgaaccacgagccagggctggggcttgcatgtcattgtctatgacagcgtcaagactggcccttggcaccgtgctgtgtggaaaccctcccctctgagactccactgagacgtggctgagtgaaatcttcctcgtcagtggtcaaggtgtgtcatccatacagctccatgcctttgtcttttttaaatgtaattaaaaaaggaaccaactggcaaaaaaaaaaaaaaaaaaaaaacaaaaaaaaaaaaaaaacaaaaaaagagggggggggggcaaaaaagtatatccccgagaggggcgccaattagcgtctacccagttttttgaccaggggggcccaaaagggagggaatataaacgaaagcacggagcgcgggtaaacacggcgcggacggggacaccagcgtgcccgggagaacactgggggagagggacccccaactcgcggggggggacaatagtgggcaccacccctgcagaatataagaccggaggaaaatcacacgacgggacaacgtcgcacccacgcgcaattcgcggcggcgaaaaatcggccccccggttatattgaaatgacgggggggcgccacagcagtctagctgacaacaagacaaaacaaagcagacgcagcgcggacaagcgaagggtggctaaggctgaacgtatgtagacggacgaggaggcagaggaggacggagtagtaacaacccgaccaccaccacacacaggtgacacagggagtaagaaacaagagacgacgatgagaccacgagaacgcacgaaagattaagaggaggtgcgagcctagcggacgcgaagaccagaacgactgactgaaggtcatccagccggcgggccgccaggccagctcgccctcgcgacccan

SEQ ID NO: 285078 - DNA, 1209 bp, Homo sapiens
gggccccgcaggctcggtgaatcgaacgttgagcagggcggtgggtggtgcggagtgccgagcggcctcacccccaaccgtcggcccagtcggacggttccgaggcgttgccgggagccgggcgcggctctgtgtggactcggagaaacgcggggcgtctgcctgagcccgcttttctacaagatgtggggatttttgaagcgccctgtagtggtgacggctgacatcaacttgagccttgtggccctgactgggatggggttactgagccggctgtggcgactcacctacccgcgggctgtggtttttgacgaagtatattatgggcagtacatctctttttacatgaaacaaatcttcttcttggatgacagtgggccgccatttggccacatggtgctggccttgggaggttatttaggaggattcgatggcaattttttgtggaacagaattggagcagaatacagtagcaacgtgcctgtgtggtccctgcgcctgctgccagcactcgcgggggccttgtcggtccccatggcctaccagatagtgttggagctccacttttctcattgtgccgccatgggagctgctctgttgatgcttatcggtaagacctgcgcccctgcctgctcttgctgtcatgcagggaagaactgaccctttggcccggaagatcacatgggcttggtgggcgagctgcaccagaaagtgcatctggttcatccaaatttgacgctgcaagtcacccgctcccaggctgaccccgtggttatgggattgctgaattgtgggatcagactcttatcagcagtcggggtatggcagtagaaaactgcccagatgctgctgcaaagtccatgcacacgtgggcacctccatctccaaccaatcttgtgaccaaatgataacttccccttgttccaccacctcccaggccttggccaattgagatggactcgtgagtcagtggatcctcttcagagagggtcttccagctcacgtttatgaacagatgaaattaaagcagatgaaaagttagattaggctgggcgcagtggctcacacctataatcccaaagtgtggggattacaggtgtgagcctctgcgcctagtgctagatatcttttggtcctctaatattttgggggttggcccttggcttgtgacttcataaatacatcttcatttttctataatttaaacta

SEQ ID NO: 285079 - DNA, 216 bp, Homo sapiens
aaatcttcttcttggatgacagtgggccgccatttggccacatggtgctggccttgggaggtaggagtcatcaggagagtagcccctacccttcaggacctcaaatacatttaaaacttatcagtgcatttcttacaggcagaaaccaggtcttattattgatgcatcttgtttattgcttgccacagtactctagaaatatttgctgaatgggat

SEQ ID NO: 285080 - DNA, 289 bp, Homo sapiens
ctacaagatgtggggatttttgaagcgccctgtagtggtgacggctgacatcaacttgagccttgtggccctgactgggatggggttactgagccggctgtggcgactcacctacccgcgggctgtggtgtaagctaaatgactccattcccagggtgaatctagaattgtactttgtgacaggaggcgcccttactgaatagcataaatgggagagtgaaatcctggcttcttggtgataggtgtttttggcagtgagaggagagaccagtctgtccccaggacagcc

SEQ ID NO: 285081 - DNA, 344 bp, Homo sapiens
atgttaactccatttctgtcatgtctttgcagcatcaagtacatgggtgtgttcacgtacgtgctcgtgctgggtgttgcagctgtccatgcctggcacctgcttggagaccagactttgtccaatgtaggtgctgatgtccagtgctgcatgaggccggcctgtatggggcagatgcggatgtcacagggggtacttggtgaaaagactccaatcctcaatgttttagaagcaggcaggcctgggcagcctcgcctcttggcctctgcaggtgcctctgtatgggaggccagagtttctgtcactaactttttctaagctcacaatgtctagaggtgggtgcg

SEQ ID NO: 285082 - DNA, 307 bp, Homo sapiens
ttgtatcgcttctgaagtaatgccttttttcatgagtgtttttcatcctcatacgttttcccttgctaccttaaaattgacatgtgtttcctctttgaaacagagaatgctctcatcactcagtcaaggctaatgcttttggaatcagtgttaatatttttcaatctattggccgtgttgtcctacctgaagttcttcaactgccaaaagcacaggtatggaaaatggagtgtcttcctagttaacgagaacagagattctgggtggtttgttgatctgagatggtccagtacctttttttgtttcg

SEQ ID NO: 285083 - DNA, 442 bp, Homo sapiens
agctggaactacagaggcatgcaccattgcacctggctaatttattttttatttttatcttttggtagagatggggtctccctatgttgcccaggctggttaggaactcctggctcaagctatactcttgtctcagccttccagactactaagattaggccgggcgcggtggctcacacctgtaatcccggcactttgggaggccgagggggtggatcacttgaggtcaggagctcgagagcagcctggccgacatgatgaaaccccgtctctactaaaaatgtaaaatattagccagttgtcgtggtgcgcacctgtagtcccagctacttgggaggctgaggcagaagaatcacttgaacccgggaggtggagggtgcagtgagatgagatagcgccactgcactctagcctgggcgacagagcaagattccatctcaaa

SEQ ID NO: 285084 - DNA, 1506 bp, Homo sapiens
gatgcttctgagtaagcaaagagaatttctaaatagctaaaagacagaaacattcctaaagtagacagtttggaatggctcaaaagaaaatgtgcagcttgcgtgaccaccccaaaagattgtcccacctaggcagctgaagaacaacaacttagccttggcaacaaagcaagatcccgtccttacaaaacaaacaaacaaacaaaccaaaaaaactaattggccaggtgtgttggtgcatgcctacagtcccagctacttgggaggctgaggcaagaggatcacttgaacctagggagttcgaggctacagtgccctatgatggcaccactgcattgaagtatgggtgacaagagcaagaccctgtccaaaaaaaaaaaaacgaagaacaacaacttacaacttacctttctacttctgaggagactgggagtcacagagtccctgccacaaggtggaggggtaacagatttgattggaagcagtgagttataaatggtgctgtgtcctctagccctctaaccaacacatgactgtacagctggcctctctgatactaaattttccccatgtgctaaagatcgtacaagaagagggttgcaaaatgaagagaatagattaattattatagttaattatatttcttggaaaatcaaccactggtgagacaccaaaacccagagaaactgaggaagtggttatatttgcatatgcatagaaatacacatacatgtttgcagataaatagaattttgtctaatatggtatgtactaaattgttaacaatagcttcctctggagagtggaacttagtgtcagaaggaacatctatcttgtttttaacactatacaacaaacatgttttattattttaatatttttaaagtggttattaaagagaccaatgactagtttgtgcaaaataaaaagaagccaggaagattctataatattaatagatcagatttgaggtgacacaagcctcaaacagaattaattcatccatgatgattgatgaagaaacttccctatggaaagaaaatatggattccattcaaagcactttattttggttatttagaatattaaaatatacatatcctctagctgtcttagaattctgattgattacttatgaaaacattttctccttctatggtacaatgttaacaataatacttatgaactaggctgctgtttgaagatagatagacagatgtgtgtatgtatctagaaagttatagttacatatagagtgtgtgtgtgtgtgtgtgtgtgtgtgtgtgtgtgtattcctttaatcctgtcatcagctctagaaagtataagttatcatctccagtttatagttgaggcacaaaaaggttaaatgagtagcccaaatcaaaaaagactatagccaggattcaagtccaaagagccccagcccaaagcttgtactcttggccactcttgtatatacttcttgagaaaaataaatgtattaaaaaggacaccaaccatagc

SEQ ID NO: 285085 - DNA, 381 bp, Homo sapiens
ccaccccctaaattgctgatcgagtaggtctgtgggccaaagaattttcattcctaataggttcctaggtaatggtgctggtctcgctttgagaaccactaatgtttatacttcagatgagccaaggttaatcaccagacccagatattgtatcttttttttttttttttttagttcaagggtatatgtgcaggatgtacaggtttgttacataggtaaacgtgctatagtggtttgctgcacagatcatttcatcacctaggtattaagcccagcatccattagctattcctgatgctctctctcctcccaccctcttatcccatactttaaaaatgacttagtctttttaaacaataagcacataccttatggacccat

SEQ ID NO: 285086 - DNA, 1287 bp, Homo sapiens
cgcggctcgctagaaggagtgtggtccaccggaggactccctacattcttcctccattacctcactgcctccggtggctgctgggataccggaggactcgggtcccggctcgactcagtcctccagccgcccggggaatacctctagttcttcccggccgccgccgccgccgccgccgccgccgccccgccgcttcctcctccgcctgccggcctccttcgccccgtcccgtccgcgcagcgcgtccggcccgcccgcaggccagcttctctcgggagcccccacccaggcgcatggctccatgaagcaagaggaggaggcagagcgcgagaggtcccgtccgccccagccgcgtctgggccaggataaaagcaaaaccatattcctgctgctgtcagttatgatgtactgagaaaacttcagagacctaaactttttccagagaagagaagctttactggtgttccagccctaagaaacctttgttcaagaaaacggcagatgctctgttgaatccactggagattgtcctgatactaaggacaagtatcaaccatctttcctgtgaaaaattccctctcgtactttagttctgtggatccaaaatttatagcattcttctaccaccacaggggctcatatgacattaacagacaagacacttttcagaaagacaggcaacgtgttggaccttccggagcttctcagaagacagagggttttcttttgaggatttaaacctcagacacagggagctgacctattcaccttagaatcctctggggcacccattacagtgtctgtaccaaggaggcaacaaagaacggcggaacagactggagcagaaggaccacccagcagagccaagccaaatcactgaccctcagaggcctgatgtgaatgcttatggcttcagtccattggattctgcagtaatctgccgatctacagtattaccacagtaaataaccgatagacctgaaaacgaatgcatgccttgtgccaaaattgcaggaaacctcaccaggagaaacaattttatatgagggaatgtactctctcctttgcattttccctcaaatctatatttttagcccctcacttgtctctacagagcctcagttgcttaatctaattgctgactgaacatctccaggaaactgtgtgtacgtgtttgtattcatagtatatttatttattatctgtttacttccatgggatatagtctccataagagagtagtcatcattgtatttgttgatgcttaataaataatcattgaatggg

SEQ ID NO: 285087 - DNA, 2114 bp, Homo sapiens
cgcggctcgctagaaggagtgtggtccaccggaggactccctacattcttcctccattacctcactgcctccggtggctgctgggataccggaggactcgggtcccggctcgactcagtcctccagccgcccggggaatacctctagttcttcccggccgccgccgccgccgccgccgccgccgccccgccgcttcctcctccgcctgccggcctccttcgccccgtcccgtccgcgcagcgcgtccggcccgcccgcaggccagcttctctcgggagcccccacccaggcgcatggctccatgaagcaagaggaggaggcagagcgcgagaggtcccgtccgccccagccgcgtctgggccaggataaaagcaaaaccatattcctgctgctgtcagttatgatgtactgagaaaacttcagagacctaaactttttccagagaagagaagctttactggtgttccagccctaagaaacctttgttcaagaaaacggcagatgctctgttgaatccactggagattgtcctgatactaaggacaagtatcaaccatctttcctgtgaaaaattccctctcgtactttagttctgtggatccaaaatttatagcattcttctaccaccacaggggctcatatgacattaacagacaagacacttttcagaaagacaggttgttcttttgggccacatctaagaaatctttgtctagccaaaagccacaaataatttctcattttttggcttctggaagatgtacagttaaatgttatatttgggactgttatctaatttgattaaattgcactctacaatatgatatttgaattgatgaaaaattagtaaatgttaatattttttaaagtagccaaatcttgcaatttatatataatagagaagactagaaaatcccccatatttatttcctcttacttcgtactactaaaatttgtatttaggcatttggtttctcagataaacattacattccccagtatatggttctatctggcttggtgacgacatgttgaacattaagatgtgagcagaagtaatacatacacactctttttcatgtctttaattgaatgggatattggcccattttttcttccagtttattacactgaatattgacatgttattttccaatattgagacaatcaatgacaagactttaagagtaacaatgtaaaaatacagaagttgtctgagtttatcaacaatcccctggattagaaccccctaccagttctaggtcatctaatatatagacattgtgttcagtagaaataaatatatatattttttattatgctttaagttctaggatacatgtgcacaacatgcaggtttgttacattggtatacacgtgccatgttggtttgctgcacccattaactcatcatttacattaggtatttctcctaatgctatccctccccctgcccccaccccccgacaggccctggggtgtgattttccccaccctgtgtccaagtgttctcattgctcaattcccacctatgggaatacatttttaaatcatttttgaaggtgttattacattctgattgaacattttcagaaagaataaatcatttaatacaagaagtgggccacttcatgtaacaaaacaaaccaccactacagcaacaacaacaaaaaacacaaatgaatgtgactttagctttgcaacatcgtgacagactagcaagttaatgacatttgttatgccatagaaaatatttgttgaattgccactctaatgactttatatcagccaactcattatcaacactagaaaagatgattaaaaaatacttcagtacgttcacgtgttggcttgttaacatttttaagagtctataagagaaaaatgcatccaatctcgacaaaaatatttttcaagtatcttgtaggtacgtacaactaactaccttgtgaacaaaagtcactatataattatataatttctgacacttaaaaaagattattgtgcaaaagaagatatatgttctaataccaaatccacatataaaataattgacttatttaaataatttaagatgctcttttatatatttatattaaaaactttacagagaa

SEQ ID NO: 285088 - DNA, 970 bp, Homo sapiens
gccatcactttttccttgatactacgaaccatcctgtcatgtgtttgtaccatatcagtagtgaaactgacagtgctctgataggggtatactcttttatcccaatctatatcccaatacccaatagcccagtattcttagaatccagttgtattcatactctcctggatcatttctgttcctttgtaatatagtccctttcttcccttacagctcatatgacattaacagacaagacacttttcagaaagacaggtaagtcatttgttaaaatctcactactgttgtttaacagaaacatatatatgcatgtatatgtgtgtactgtatggaaaaagtggaattagagtttatctagaaaagaaaaaattacctcatctaagtgcagaaatgaataatacttaaaccataccatacaattctctatcatatttccacagataagtcaaaaatttaaaaaatcttattgttcatgcataaatgcagaaaacaatacctctagtatatgtttgtgttctattgtactttcacagaaggtgtttgatacttaatactgtgtttattaagaaaaatctttgcaatggttatggaattaaaatttcatgtaaaaatgattatgtagatcaagaaaagttgcaattttctggattcctgatattttaaataaaagtagtttccaaaggtgatttttttattattttaatttttaatggaaattttcacaatataaccatcctacataattttatttttcaactattatttttgtcgactcattatttattaagaaacaatgatttttagatactaatttataattcttatgttataattaaaaatcagagttcgttgaataaaatatctgatttatgactccttaagtcaacattaaattattttattgctatatcatgttttttgatgttcataactctaggtttatatagtaatttcactccactttcttttt

SEQ ID NO: 285089 - DNA, 1746 bp, Homo sapiens
catctcatttaatttgtatttctctaatggctaaagatattgaacatcttttgatgtgattatttgctgtctctgaatttcctctggcaaagtatgtgttcaagtatattcttttccttattgtttattgttggtctgtaattttccttataattgagtttacatattttggatacacattctttatcagatataatttggaaatgtctattcctagtttgaagcatatagggtagaaatatagaattttttgtttttatgaagtcatatctattgttgttgtaactggtttttttgtttgttctctaggttgttcttttgggccacatctaagaaatctttgtctagccaaaagccacaaataatttctcattttttggcttctggaagatgtacagttaaatgttatatttgggactgttatctaatttgattaaattgcactctacaatatgatatttgaattgatgaaaaattagtaaatgttaatattttttaaagtagccaaatcttgcaatttatatataatagagaagactagaaaatcccccatatttatttcctcttacttcgtactactaaaatttgtatttaggcatttggtttctcagataaacattacattccccagtatatggttctatctggcttggtgacgacatgttgaacattaagatgtgagcagaagtaatacatacacactctttttcatgtctttaattgaatgggatattggcccattttttcttccagtttattacactgaatattgacatgttattttccaatattgagacaatcaatgacaagactttaagagtaacaatgtaaaaatacagaagttgtctgagtttatcaacaatcccctggattagaaccccctaccagttctaggtcatctaatatatagacattgtgttcagtagaaataaatatatatattttttattatgctttaagttctaggatacatgtgcacaacatgcaggtttgttacattggtatacacgtgccatgttggtttgctgcacccattaactcatcatttacattaggtatttctcctaatgctatccctccccctgcccccaccccccgacaggccctggggtgtgattttccccaccctgtgtccaagtgttctcattgctcaattcccacctatgggaatacatttttaaatcatttttgaaggtgttattacattctgattgaacattttcagaaagaataaatcatttaatacaagaagtgggccacttcatgtaacaaaacaaaccaccactacagcaacaacaacaaaaaacacaaatgaatgtgactttagctttgcaacatcgtgacagactagcaagttaatgacatttgttatgccatagaaaatatttgttgaattgccactctaatgactttatatcagccaactcattatcaacactagaaaagatgattaaaaaatacttcagtacgttcacgtgttggcttgttaacatttttaagagtctataagagaaaaatgcatccaatctcgacaaaaatatttttcaagtatcttgtaggtacgtacaactaactaccttgtgaacaaaagtcactatataattatataatttctgacacttaaaaaagattattgtgcaaaagaagatatatgttctaataccaaatccacatataaaataattgacttatttaaataatttaagatgctcttttatatatttatattaaaaactttacagagaa

SEQ ID NO: 285090 - DNA, 1043 bp, Homo sapiens
cgcggctcgctagaaggagtgtggtccaccggaggactccctacattcttcctccattacctcactgcctccggtggctgctgggataccggaggactcgggtcccggctcgactcagtcctccagccgcccggggaatacctctagttcttcccggccgccgccgccgccgccgccgccgccgccccgccgcttcctcctccgcctgccggcctccttcgccccgtcccgtccgcgcagcgcgtccggcccgcccgcaggccagcttctctcgggagcccccacccaggcgcatggctccatgaagcaagaggaggaggcagagcgcgagaggtcccgtccgccccagccgcgtctgggccaggataaaagcaaaaccatattcctgctgctgtcagttatgatgtactgagaaaacttcagagacctaaactttttccagagaagagaagctttactggtgttccagccctaagaaacctttgttcaagaaaacggcagatgctctgttgaatccactggagattgtcctgatactaaggacaagtatcaaccatctttcctgtgaaaaattccctctcgtactttagttctgtggatccaaaatttatagcattcttctaccaccacaggggctcatatgacattaacagacaagacacttttcagaaagacaggcaacgtgttggaccttccggagcttctcagaagacagagggttttcttttgagatccctcccgtagctgtcatacagagtgcgatttatgacttgtaagttgtgctatggagcttgacaaccaaaccttcaatacatttatgaagagagcactaccgagactttatacaatggaataaaataacaaaatgtgctgacagcattcttccactcaaagagaaaaagtacttcaactcggccgggcacggtggctcacgcctgcacgcctgtaatctcagcactttgggaagccgagacgagcggatcacgaggtcaggagatcgagaccatcctggctaacacggtgaaaccgtgtctctactaaaa

SEQ ID NO: 285091 - DNA, 1201 bp, Homo sapiens
cgcggctcgctagaaggagtgtggtccaccggaggactccctacattcttcctccattacctcactgcctccggtggctgctgggataccggaggactcgggtcccggctcgactcagtcctccagccgcccggggaatacctctagttcttcccggccgccgccgccgccgccgccgccgccgccccgccgcttcctcctccgcctgccggcctccttcgccccgtcccgtccgcgcagcgcgtccggcccgcccgcaggccagcttctctcgggagcccccacccaggcgcatggctccatgaagcaagaggaggaggcagagcgcgagaggtcccgtccgccccagccgcgtctgggccaggataaaagcaaaaccatattcctgctgctgtcagttatgatgtactgagaaaacttcagagacctaaactttttccagagaagagaagctttactggtgttccagccctaagaaacctttgttcaagaaaacggcagatgctctgttgaatccactggagattgtcctgatactaaggacaagtatcaaccatctttcctgtgaaaaattccctctcgtactttagttctgtggatccaaaatttatagcattcttctaccaccacaggggctcatatgacattaacagacaagacacttttcagaaagacagatttttaaaattttcctcacaaaaggaaggaaggaacggaaggaaccgcaaggaaggcaggcaggcaggcacggcctgtccctccacctatgaggttggctttgtgatgtgttcaccatggtggccagggacatatcagctccagtgagccgagaatggaggacatggtgcttcttcaaggcacaatgaccactcacccctggatggagccgggaggaccattattcttaggtggcagaaattcaagttcgagggtgaagatgagttgaccgaaaagtggcttgtgtgttgacccagtgttgacccttccatcagataactttgtgccgtgtgcttgggtccacccctgagttgaaactgttcttccattagcctggtgcgttcactgtgggaacgcgcgtcagagagggggattttgcgaaccacaagtgcgacattgcgctcttccatgttcacggcgttgggcaaacggcgcgtgagtccagacgcgctttacagattgtataaaacaggctgcgacgtta

SEQ ID NO: 285092 - DNA, 3115 bp, Homo sapiens
cgcggctcgctagaaggagtgtggtccaccggaggactccctacattcttcctccattacctcactgcctccggtggctgctgggataccggaggactcgggtcccggctcgactcagtcctccagccgcccggggaatacctctagttcttcccggccgccgccgccgccgccgccgccgccgccccgccgcttcctcctccgcctgccggcctccttcgccccgtcccgtccgcgcagcgcgtccggcccgcccgcaggccagcttctctcgggagcccccacccaggcgcatggctccatgaagcaagaggaggaggcagagcgcgagaggtcccgtccgccccagccgcgtctgggccaggataaaagcaaaaccatattcctgctgctgtcagttatgatgtactgagaaaacttcagagacctaaactttttccagagaagagaagctttactggtgttccagccctaagaaacctttgttcaagaaaacggcagatgctctgttgaatccactggagattgtcctgatactaaggacaagtatcaaccatctttcctgtgaaaaattccctctcgtactttagttctgtggatccaaaatttatagcattcttctaccaccacaggggctcatatgacattaacagacaagacacttttcagaaagacaggcaacgtgttggaccttccggagcttctcagaagacagagggttttcttttgaggtaaatttgatagtacattttgatagtacgggaggcgatacggcatggtgacagaaaagcgccggcttggttagcaggaccacctggcagggctgcaggctgtgccacttaccaggcaggggaccttgggccagctgcttggcctcactcaccctgtttctcagctgcaattgggatgaacagactgcctgcttcggggttgcctaaaactcacattggttaatgatgtgaaatgcttagcgcagtgcctggcatagagagaattctcattagatgatacctcagctgggctttaggagctacagaagaagctgcatctccatgagctcagcgtgtttctagctttcctttttgttttctattcaacctttcacccaactcagcttctcaatccctaaatgacaaaggtttgggaaggaagacttggaccgaggcttgcatttgtttctgagaattaaacgttatgttttcttcaatctaaataggtttgcttgtacagccttgttgaatggtttttttttttttctccatgataaatgactctcaacttcttttccctcatctaattgcttatctacatacaatgcctggaaggaaataaatgtaatggcccgtagcaactggccttcaggtatcaagtttaagtccctttaagcagaacagcaaattgagcacagaatgaactggtttcatggtagcgtactgcaattagatgcaagaatagggaaagcagggtgcttcaagtggtgacacaattagtatagcactgagggacttctctttccacttcttcaactccgcctgcattccgctggctgaagagttgatgacatccctgaaaaatcttccctctcttgtttctctgatgccacctctgtgttctccgcctcactggccacacttcctttacctcccaaacttttaactctgagtgtcccaaacttgtctcatcacctacccctgctgcccagctccccagcctgttccccttctgacacgggcactctccttctgctctcttgggagagaaacaatgaaggcctatttggcacttttatttctattcaaggaaccagactgtgaacaagtttaccagttagtcctttggactgtgtcttgaattcatccctcttctccattctcaccagcaccatcatcatgatggctaatatttcctgagcacctttcattcaggcatgatgccaggtgcaccaacttacttaatcctcatagccaccacctgagcaagctcctgttttataaatggaccagttcttgttgctgttgtacaagttattttctttctataacgtcctccttgtcctccttccacattcttaaagaaactttcccttcctttaaagtactcagggagccctgcattgcttcttgaagccttctccagcttcatcatctcacagtggtctctcttttcactaaatgtccaatatgctgcacataagtaccccaaagttagcacagaattgttccatggctgtcatatatgttaaaaatcattaaaagttcattttttctcccattatgggaaggatacatgctcctactagtaaatttagttggtagaaaaaaattatcactatctagactgctttccctttagtctttatgcatagctttctgtctgcctatttttactttgtgtttgtaacttactattataaaatatgcatctctatgttcattgtcaacattatttacaataacatggagtggatttacatgtattctctatatttggattaaaggagatagagtatgtgaaattaaatgggagaagtatctgatacataacaggcaatacaaatattatcacatagcgtcaatttatttgtgaatattgaaagctccaaaaaagaaaaaaagtttttttttaattcccgtaattacttattgcagtattgtgttcatacaaactgctcagtcattttggagaaataacaatttttttcctcatcatgaagtaaggtatgctcactgcaaaaaaaatctagaaaataaagaggaacatgctaaagaaaagaatactcccatataatctctgtcttcataaataatcttttgtaacgcttatacactgctggtgggaatgtaaattagttcagccattgtgaaaagtagcgtagcaattccttgaaaaacttaaaatagaattaccgttcaacccagcaatcccattattgggcatatacccagtggaatgtaaatcatcctgccataaaaacacatgcacatgtatgttcattgcagcactattcacaatagcaaagacatggaatcaacctatatgcccatcaatagtagactgaataaagaaaatatggtacatattcaccacagaatactaagcagccataaaaaagaaa

SEQ ID NO: 285093 - DNA, 2880 bp, Homo sapiens
cgcggctcgctagaaggagtgtggtccaccggaggactccctacattcttcctccattacctcactgcctccggtggctgctgggataccggaggactcgggtcccggctcgactcagtcctccagccgcccggggaatacctctagttcttcccggccgccgccgccgccgccgccgccgccgccccgccgcttcctcctccgcctgccggcctccttcgccccgtcccgtccgcgcagcgcgtccggcccgcccgcaggccagcttctctcgggagcccccacccaggcgcatggctccatgaagcaagaggaggaggcagagcgcgagaggtcccgtccgccccagccgcgtctgggccaggataaaagcaaaaccatattcctgctgctgtcagttatgatgtactgagaaaacttcagagacctaaactttttccagagaagagaagctttactggtgttccagccctaagaaacctttgttcaagaaaacggcagatgctctgttgaatccactggagattgtcctgatactaaggacaagtatcaaccatctttcctgtgaaaaattccctctcgtactttagttctgtggatccaaaatttatagcattcttctaccaccacaggggctcatatgacattaacagacaagacacttttcagaaagacaggcaacgtgttggaccttccggagcttctcagaagacagagggttttcttttgaggtaaatttgatagtacattttgatagtacgggaggcgatacggcatggtgacagaaaagcgccggcttggttagcaggaccacctggcagggctgcaggctgtgccacttaccaggcaggggaccttgggccagctgcttggcctcactcaccctgtttctcagctgcaattgggatgaacagactgcctgcttcggggttgcctaaaactcacattggttaatgatgtgaaatgcttagcgcagtgcctggcatagagagaattctcattagatgatacctcagctgggctttaggagctacagaagaagctgcatctccatgagctcagcgtgtttctagctttcctttttgttttctattcaacctttcacccaactcagcttctcaatccctaaatgacaaaggtttgggaaggaagacttggaccgaggcttgcatttgtttctgagaattaaacgttatgttttcttcaatctaaataggtttgcttgtacagccttgttgaatggtttttttttttttctccatgataaatgactctcaacttcttttccctcatctaattgcttatctacatacaatgcctggaaggaaataaatgtaatggcccgtagcaactggccttcaggtatcaagtttaagtccctttaagcagaacagcaaattgagcacagaatgaactggtttcatggtagcgtactgcaattagatgcaagaatagggaaagcagggtgcttcaagtggtgacacaattagtatagcactgagggacttctctttccacttcttcaactccgcctgcattccgctggctgaagagttgatgacatccctgaaaaatcttccctctcttgtttctctgatgccacctctgtgttctccgcctcactggccacacttcctttacctcccaaacttttaactctgagtgtcccaaacttgtctcatcacctacccctgctgcccagctccccagcctgttccccttctgacacgggcactctccttctgctctcttgggagagaaacaatgaaggcctatttggcacttttatttctattcaaggaaccagactgtgaacaagtttaccagttagtcctttggactgtgtcttgaattcatccctcttctccattctcaccagcaccatcatcatgatggctaatatttcctgagcacctttcattcaggcatgatgccaggtgcaccaacttacttaatcctcatagccaccacctgagcaagctcctgttttataaatggaccagttcttgttgctgttgtacaagttattttctttctataacgtcctccttgtcctccttccacattcttaaagaaactttcccttcctttaaagtactcagggagccctgcattgcttcttgaagccttctccagcttcatcatctcacagtggtctctcttttcactaaatgtccaatatgctgcacataagtaccccaaagttagcacagaattgttccatggctgtcatatatgttaaaaatcattaaaagttcattttttctcccattatgggaaggatacatgctcctactagtaaatttagttggtagaaaaaaattatcactatctagactgctttccctttagtctttatgcatagctttctgtctgcctatttttactttgtgtttgtaacttactattataaaatatgcatctctatgttcattgtcaacattatttacaataacatggagtggatttacatgtattctctatatttggattaaaggagatagagtatgtgaaattaaatgggagaagtatctgatacataacaggcaatacaaatattatcacatagcgtcaatttatttgtgaatattgaaagctccaaaaaagaaaaaaagtttttttttaattcccgtaattacttattgcagtattgtgttcatacaaactgctcagtcattttggagaaataacaatttttttcctcatcatgaagtaaggtatgctcccggccacaaactctgacaccaagaggaactgtcttagaaagattctcccatatatcttgtttcgtaatatctagtacgctttaactgtttgtgaagtactgttccctgttaattggctccattcggtacatagagaaccccacttagggttccg

SEQ ID NO: 285094 - DNA, 3031 bp, Homo sapiens
cgcggctcgctagaaggagtgtggtccaccggaggactccctacattcttcctccattacctcactgcctccggtggctgctgggataccggaggactcgggtcccggctcgactcagtcctccagccgcccggggaatacctctagttcttcccggccgccgccgccgccgccgccgccgccgccccgccgcttcctcctccgcctgccggcctccttcgccccgtcccgtccgcgcagcgcgtccggcccgcccgcaggccagcttctctcgggagcccccacccaggcgcatggctccatgaagcaagaggaggaggcagagcgcgagaggtcccgtccgccccagccgcgtctgggccaggataaaagcaaaaccatattcctgctgctgtcagttatgatgtactgagaaaacttcagagacctaaactttttccagagaagagaagctttactggtgttccagccctaagaaacctttgttcaagaaaacggcagatgctctgttgaatccactggagattgtcctgatactaaggacaagtatgctcatatgacattaacagacaagacacttttcagaaagacaggcaacgtgttggaccttccggagcttctcagaagacagagggttttcttttgaggtaaatttgatagtacattttgatagtacgggaggcgatacggcatggtgacagaaaagcgccggcttggttagcaggaccacctggcagggctgcaggctgtgccacttaccaggcaggggaccttgggccagctgcttggcctcactcaccctgtttctcagctgcaattgggatgaacagactgcctgcttcggggttgcctaaaactcacattggttaatgatgtgaaatgcttagcgcagtgcctggcatagagagaattctcattagatgatacctcagctgggctttaggagctacagaagaagctgcatctccatgagctcagcgtgtttctagctttcctttttgttttctattcaacctttcacccaactcagcttctcaatccctaaatgacaaaggtttgggaaggaagacttggaccgaggcttgcatttgtttctgagaattaaacgttatgttttcttcaatctaaataggtttgcttgtacagccttgttgaatggtttttttttttttctccatgataaatgactctcaacttcttttccctcatctaattgcttatctacatacaatgcctggaaggaaataaatgtaatggcccgtagcaactggccttcaggtatcaagtttaagtccctttaagcagaacagcaaattgagcacagaatgaactggtttcatggtagcgtactgcaattagatgcaagaatagggaaagcagggtgcttcaagtggtgacacaattagtatagcactgagggacttctctttccacttcttcaactccgcctgcattccgctggctgaagagttgatgacatccctgaaaaatcttccctctcttgtttctctgatgccacctctgtgttctccgcctcactggccacacttcctttacctcccaaacttttaactctgagtgtcccaaacttgtctcatcacctacccctgctgcccagctccccagcctgttccccttctgacacgggcactctccttctgctctcttgggagagaaacaatgaaggcctatttggcacttttatttctattcaaggaaccagactgtgaacaagtttaccagttagtcctttggactgtgtcttgaattcatccctcttctccattctcaccagcaccatcatcatgatggctaatatttcctgagcacctttcattcaggcatgatgccaggtgcaccaacttacttaatcctcatagccaccacctgagcaagctcctgttttataaatggaccagttcttgttgctgttgtacaagttattttctttctataacgtcctccttgtcctccttccacattcttaaagaaactttcccttcctttaaagtactcagggagccctgcattgcttcttgaagccttctccagcttcatcatctcacagtggtctctcttttcactaaatgtccaatatgctgcacataagtaccccaaagttagcacagaattgttccatggctgtcatatatgttaaaaatcattaaaagttcattttttctcccattatgggaaggatacatgctcctactagtaaatttagttggtagaaaaaaattatcactatctagactgctttccctttagtctttatgcatagctttctgtctgcctatttttactttgtgtttgtaacttactattataaaatatgcatctctatgttcattgtcaacattatttacaataacatggagtggatttacatgtattctctatatttggattaaaggagatagagtatgtgaaattaaatgggagaagtatctgatacataacaggcaatacaaatattatcacatagcgtcaatttatttgtgaatattgaaagctccaaaaaagaaaaaaagtttttttttaattcccgtaattacttattgcagtattgtgttcatacaaactgctcagtcattttggagaaataacaatttttttcctcatcatgaagtaaggtatgctcactgcaaaaaaaatctagaaaataaagaggaacatgctaaagaaaagaatactcccatataatctctgtcttcataaataatcttttgtaacgcttatacactgctggtgggaatgtaaattagttcagccattgtgaaaagtagcgtagcaattccttgaaaaacttaaaatagaattaccgttcaacccagcaatcccattattgggcatatacccagtggaatgtaaatcatcctgccataaaaacacatgcacatgtatgttcattgcagcactattcacaatagcaaagacatggaatcaacctatatgcccatcaatagtagactgaataaagaaaatatggtacatattcaccacagaatactaagcagccataaaaaagaaa

SEQ ID NO: 285095 - DNA, 1392 bp, Homo sapiens
cgcggctcgctagaaggagtgtggtccaccggaggactccctacattcttcctccattacctcactgcctccggtggctgctgggataccggaggactcgggtcccggctcgactcagtcctccagccgcccggggaatacctctagttcttcccggccgccgccgccgccgccgccgccgccgccccgccgcttcctcctccgcctgccggcctccttcgccccgtcccgtccgcgcagcgcgtccggcccgcccgcaggccagcttctctcgggagcccccacccaggcgcatggctccatgaagcaagaggaggaggcagagcgcgagaggtcccgtccgccccagccgcgtctgggccaggataaaagcaaaaccatattcctgctgctgtcagttatgatgtactgagaaaacttcagagacctaaactttttccagagaagagaagctttactggtgttccagccctaagaaacctttgttcaagaaaacggcagatgctctgttgaatccactggagattgtcctgatactaaggacaagtatcaaccatctttcctgtgaaaaattccctctcgtactttagttctgtggatccaaaatttatagcattcttctaccaccacaggggctcatatgacattaacagacaagacacttttcagaaagacaggtaagtcatttgttaaaatctcactactgttgtttaacagaaacatatatatgcatgtatatgtgtgtactgtatggaaaaagtggaattagagtttatctagaaaagaaaaaattacctcatctaagtgcagaaatgaataatacttaaaccataccatacaattctctatcatatttccacagataagtcaaaaatttaaaaaatcttattgttcatgcataaatgcagaaaacaatacctctagtatatgtttgtgttctattgtactttcacagaaggtgtttgatacttaatactgtgtttattaagaaaaatctttgcaatggttatggaattaaaatttcatgtaaaaatgattatgtagatcaagaaaagttgcaattttctggattcctgatattttaaataaaagtagtttccaaaggtgatttttttattattttaatttttaatggaaattttcacaatataaccatcctacataattttatttttcaactattatttttgtcgactcattatttattaagaaacaatgatttttagatactaatttataattcttatgttataattaaaaatcagagttcgttgaataaaatatctgatttatgactccttaagtcaacattaaattattttattgctatatcatgttttttgatgttcataactctaggtttatatagtaatttcactccactttcttttt

SEQ ID NO: 285096 - DNA, 1283 bp, Homo sapiens
cgcggctcgctagaaggagtgtggtccaccggaggactccctacattcttcctccattacctcactgcctccggtggctgctgggataccggaggactcgggtcccggctcgactcagtcctccagccgcccggggaatacctctagttcttcccggccgccgccgccgccgccgccgccgccgccccgccgcttcctcctccgcctgccggcctccttcgccccgtcccgtccgcgcagcgcgtccggcccgcccgcaggccagcttctctcgggagcccccacccaggcgcatggctccatgaagcaagaggaggaggcagagcgcgagaggtcccgtccgccccagccgcgtctgggccaggataaaagcaaaaccatattcctgctgctgtcagttatgatgtactgagaaaacttcagagacctaaactttttccagagaagagaagctttactggtgttccagccctaagaaacctttgttcaagaaaacggcagatgctctgttgaatccactggagattgtcctgatactaaggacaagtatcaaccatctttcctgtgaaaaattccctctcgtactttagttctgtggatccaaaatttatagcattcttctaccaccacaggggctcatatgacattaacagacaagacacttttcagaaagacaggcaacgtgttggaccttccggagcttctcagaagacagagggttttcttttgagatccctcccgtagctgtcatacagagtgcgatttatgacttgtaagttgtgctatggagcttgacaagtaagtttgatttcatttaatattttctttaaaccatcttagatcttctctttgacaagtatttcatctgttagtgttctcaaaatgtaaaatgggtaacttaatgagaacaaaaattgtaccctaagacatatttgcactatctacatatttgcaattaaatcttaacagatttaattgtaatagaatctaatggttttcctcttgaatttttttagacaccagaaattttcattactaataaataatgtttagcttcctagtcacaaaccaaacagaaagcaaatttcatcagagtttagaatggttaaaaccaacatagctgcaatatttttagttttgctttaaaattttttgaatcaatcagtaaatcaatcagagttgaccattatgtaatccacagaccttgaaataacagagatatatttctccgcagatcaatatctatatatgtttttaagatgagtagaattccctgaagatca

SEQ ID NO: 285097 - DNA, 945 bp, Homo sapiens
cgcggctcgctagaaggagtgtggtccaccggaggactccctacattcttcctccattacctcactgcctccggtggctgctgggataccggaggactcgggtcccggctcgactcagtcctccagccgcccggggaatacctctagttcttcccggccgccgccgccgccgccgccgccgccgccccgccgcttcctcctccgcctgccggcctccttcgccccgtcccgtccgcgcagcgcgtccggcccgcccgcaggccagcttctctcgggagcccccacccaggcgcatggctccatgaagcaagaggaggaggcagagcgcgagaggtcccgtccgccccagccgcgtctgggccaggataaaagcaaaaccatattcctgctgctgtcagttatgatgtactgagaaaacttcagagacctaaactttttccagagaagagaagctttactggtgttccagccctaagaaacctttgttcaagaaaacggcagatgctctgttgaatccactggagattgtcctgatactaaggacaagtatcaaccatctttcctgtgaaaaattccctctcgtactttagttctgtggatccaaaatttatagcattcttctaccaccacaggggctcatatgacattaacagacaagacacttttcagaaagacaggcaacgtgttggaccttccggagcttctcagaagacagagggttttcttttgagatccctcccgtagctgtcatacagagtgcgatttatgacttgtaagttgtgctatggagcttgacaaaaaaagtacttcaactcggccgggcacggtggctcacgcctgcacgcctgtaatctcagcactttgggaagccgagacgagcggatcacgaggtcaggagatcgagaccatcctggctaacacggtgaaaccgtgtctctactaaaa

SEQ ID NO: 285098 - DNA, 970 bp, Homo sapiens
cgcggctcgctagaaggagtgtggtccaccggaggactccctacattcttcctccattacctcactgcctccggtggctgctgggataccggaggactcgggtcccggctcgactcagtcctccagccgcccggggaatacctctagttcttcccggccgccgccgccgccgccgccgccgccgccccgccgcttcctcctccgcctgccggcctccttcgccccgtcccgtccgcgcagcgcgtccggcccgcccgcaggccagcttctctcgggagcccccacccaggcgcatggctccatgaagcaagaggaggaggcagagcgcgagaggtcccgtccgccccagccgcgtctgggccaggataaaagcaaaaccatattcctgctgctgtcagttatgatgtactgagaaaacttcagagacctaaactttttccagagaagagaagctttactggtgttccagccctaagaaacctttgttcaagaaaacggcagatgctctgttgaatccactggagattgtcctgatactaaggacaagtatcaaccatctttcctgtgaaaaattccctctcgtactttagttctgtggatccaaaatttatagcattcttctaccaccacaggggctcatatgacattaacagacaagacacttttcagaaagacagccgggtgcggtggctggagcctgtaatccaagcactttgggaggccgaggtgggtggatcacctgagatctggagttcgagaccagcctggccaacaaggtgaaaccccacctctattaaaaatacaaaaattagctgggtgtggtggcacacacctgtactcccagctacttgagaggttgaggcaggagaatcgcttgaactcgggagacggaggttgcagtgagccaatattgcgccattgcactccagcctgggcaacaagagcgaaattccatctcaaaaaataaaaa

SEQ ID NO: 285099 - DNA, 3626 bp, Homo sapiens
cccgtggagaaggacgggacggagccggggcagccagaagaggtgggaaaagcggaggaggacgcccaggaggaggcggcggcggcggccgggaagtgaaaggtctcgcaaagttcagcggcggctgcgggcgccgagccccgggctagcggcagacgagcccgcagggccgctccgcggggcagcgcagccaggccggctatggtcccggggctcccgccgccccccaggtgcccgggacccgccaggccggtgcgcgagggtcaccccacctccccgcgcggtcccggcccctggctcccagctgccggcgaccgctgaccgagcccggcgccccaggaggaggaagaaaccagggccccgttccctcccgaggacggcggcgcttcatcccgcagcccagaggtctcggctccctccggcacccgcccggcccggctgctcccggctcctcccggccatggggagctgcgcgcggctgctgctgctctggggctgcacggtggtggccgcaggactgagtggagtagctggagtgagttcccgctgtgaaaaagcctgcaaccctcggatgggaaatttggctttggggcgaaaactctgggcagacaccacctgcggtcagaatgctaccgaactgtactgcttctacagtgagaacacggatctgacttgtcggcagcccaaatgtgacaagtgcaatgctgcctatcctcacctggctcacctgccatctgccatggcagactcatccttccggtttcctcgcacatggtggcagtctgcggaggatgtgcacagagaaaagatccagttagacctggaagctgaattctacttcactcacctaattgtgatgttcaagtcccccaggccggctgccatggtgctggaccgctcccaggactttgggaaaacatggaagccttataagtactttgcgactaactgctccgctacatttggcctggaagatgatgttgtcaagaagggcgctatttgtacttctaaatactccagtccttttccatgcactggaggagaggttattttcaaagctttgtcaccaccatacgatacagagaacccttacagtgccaaagttcaggagcagctgaagatcaccaaccttcgcgtgcagctgctgaaacgacagtcttgtccctgtcagagaaatgacctgaacgaagagcctcaacattttacacactatgcaatctatgatttcattgtcaagggcagctgcttctgcaatggccacgctgatcaatgcatacctgttcatggcttcagacctgtcaaggccccaggaacattccacatggtccatgggaagtgtatgtgtaagcacaacacagcaggcagccactgccagcactgtgccccgttatacaatgaccggccatgggaggcagctgatggcaaaacgggggctcccaacgagtgcagaacctgcaagtgtaatgggcatgctgatacctgtcacttcgacgttaatgtgtgggaggcatcagggaatcgtagtggtggtgtctgtgatgactgtcagcacaacacagaaggacagtattgccagaggtgcaagccaggcttctatcgtgacctgcggagacccttctcagctccagatgcttgcaaaccgtgttcctgccatccagtaggatcagctgtccttcctgccaactcagtgaccttctgcgaccccagcaatggtgactgcccttgcaagcctggggtggcagggcgacgttgtgacaggtgcatggtgggatactggggcttcggagactatggctgtcgaccatgtgactgtgcggggagctgtgaccctatcaccggagactgcatcagcagccacacagacatagactggtatcatgaagttcctgacttccgtcccgtgcacaataagagcgaaccagcctgggagtgggaggatgcgcaggggttttctgcacttctacactcaggtaaatgcgaatgtaaggaacagacattaggaaatgccaaggcattctgtggaatgaaatattcatatgtgctaaaaataaagattttatcagctcatgataaaggtactcatgttgaggtcaatgtgaagattaaaaaggtcttaaaatctaccaaactgaagattttccgaggaaagcgaacattatatccagaatcatggacggacagaggatgcacttgtccaatcctcaatcctggtttggaataccttgtagcaggacatgaggatataagaacaggcaaactaattgtgaatatgaaaagctttgtccagcactggaaaccttctcttggaagaaaagtcatggatattttaaaaagagagtgcaagtagcattaagatggatagcacataatggcacttgtctatgtacaaaacacaaactttagagcaagaagacctcagacaggaaactggaattttttaaagtgccaaaacatatagaaatgtttgaatgcatgggtcttatctaacttatctcttctggacccatgtttaaatacagttttatttcatgaagagaaatgaaaacccctacactgatatctgttttctatgggactgattctgaaattcttaactattaagaatattttaatagcagcatgacatttagcagtaatccattaagggcagtacctctaacaaggacgccttccagcttcagcgatgttacttacgtttgatgctacttaaagtaatgaatgacgttttaaggaatccctaaccctactatcagaaaaggtgtttgttaaagagccttctcttgtgtgttacgcatgaactttggtctgtaggtgttaaatggaacctctccatgtgtatatagtatttccttgtataaagcactttactacctaccacttgtgttgtgaacgtttggtgactgctgttgaaagaaggaaaagggtgtgtgagaaagcctactgaagcagcagcactgccactacatgtggacaaaagtgaccatataaaagaagttgtgctatttaactctgaatacttggagaaactaggtgaagatgcaaccagaaaggagaatatgtatgcgtgaagtctcagctttgagctggaggctagattccaagatgacagccatgatgaaactttttaaaaaactaaaccagaagagactttaaaataagagaaagaaatcataaatgtagacatatgcttggctaaaggggaaatggactttaaattttaaagagctcatttgcaatgcacttgtatacacttcaaaaattattgtagacacagaatttgttatatttttgtgcttagtatttaaacctgaacattgaaacagttttcctccttgtctttcttaacagtaatagtcattatatttacctgttttttaacacaatgtatgtgatagtcaaaaaatcacagtttttcattattattcatcttctgtacccacgcataaccactatacatagtttcttttgtacttgaatatacaaaacatgaacacagtgccatatgaataatttcacatacagaacctttttttctctgaagtcctgtggacttgcaaatatatatatatattgctttgttaatttgtttttatatttcatatatgtaataaaggaatatgatctga

SEQ ID NO: 285100 - DNA, 406 bp, Homo sapiens
cgatgagtaaattttggcacactaaggggtattttaacacatttttgtttgttttctgatgattagagtaatatatgtagttggtatagaaaatttggaaaatgcaaaacatcatagtaaaaaaaaaaaaaaaagaggtcacccaaaatctcattattccactgttaatactttggtatgtttttctcactctaaaacacagttaagagcctactgagtggggtgagtataatcccagcattttgggagaccaaggcagaaggattgcttaaggctaagagttcaagaccagcctgggaaacatagcaagagttatctctacaaaaataaaaagttagcccagtgtggtggtgcacgcctgtagtcccagctacttgagaggctaaggtgggaggatcacttgagc

SEQ ID NO: 285101 - DNA, 323 bp, Homo sapiens
  misc_feature (4)..(4): n is a, c, g, or t
gggntccccccccgggccttccagggaatttcgggccacggagggaattaattttccaccatggcactgtgttcatgttttgtatattcaagtacaaaagaaactatgtatagtggttatgcgtgggtacagaagatgcataaccactatacatagtttcttttgtacttgaatatacaaaacatgaacacagtgccatatgaataatttcacatacagaacctttttttctctgaagtcctgtggacttgcaaatatatatatatattgctttgttaatttgtttttatatttcatatatgtaataaaggaatatgatctga

SEQ ID NO: 285102 - DNA, 3275 bp, Homo sapiens
gagcggaacagaggacccagctcgccatcccccggcacttcatggcctaaggaatgatgaggaggggtggcccagcgaccctgggcgcgcgtgggctggggccggtctctggtagaagcccatcgctggtgtccctgacctggtgctgggtactagagaaccaggactgagtggagtagctggagtgagttcccgctgtgaaaaagcctgcaaccctcggatgggaaatttggctttggggcgaaaactctgggcagacaccacctgcggtcagaatgctaccgaactgtactgcttctacagtgagaacacggatctgacttgtcggcagcccaaatgtgacaagtgcaatgctgcctatcctcacctggctcacctgccatctgccatggcagactcatccttccggtttcctcgcacatggtggcagtctgcggaggatgtgcacagagaaaagatccagttagacctggaagctgaattctacttcactcacctaattgtgatgttcaagtcccccaggccggctgccatggtgctggaccgctcccaggactttgggaaaacatggaagccttataagtactttgcgactaactgctccgctacatttggcctggaagatgatgttgtcaagaagggcgctatttgtacttctaaatactccagtccttttccatgcactggaggagaggttattttcaaagctttgtcaccaccatacgatacagagaacccttacagtgccaaagttcaggagcagctgaagatcaccaaccttcgcgtgcagctgctgaaacgacagtcttgtccctgtcagagaaatgacctgaacgaagagcctcaacattttacacactatgcaatctatgatttcattgtcaagggcagctgcttctgcaatggccacgctgatcaatgcatacctgttcatggcttcagacctgtcaaggccccaggaacattccacatggtccatgggaagtgtatgtgtaagcacaacacagcaggcagccactgccagcactgtgccccgttatacaatgaccggccatgggaggcagctgatggcaaaacgggggctcccaacgagtgcagaacctgcaagtgtaatgggcatgctgatacctgtcacttcgacgttaatgtgtgggaggcatcagggaatcgtagtggtggtgtctgtgatgactgtcagcacaacacagaaggacagtattgccagaggtgcaagccaggcttctatcgtgacctgcggagacccttctcagctccagatgcttgcaaaccgtgttcctgccatccagtaggatcagctgtccttcctgccaactcagtgaccttctgcgaccccagcaatggtgactgcccttgcaagcctggggtggcagggcgacgttgtgacaggtgcatggtgggatactggggcttcggagactatggctgtcgaccatgtgactgtgcggggagctgtgaccctatcaccggagactgcatcagcagccacacagacatagactggtatcatgaagttcctgacttccgtcccgtgcacaataagagcgaaccagcctgggagtgggaggatgcgcaggggttttctgcacttctacactcaggtaaatgcgaatgtaaggaacagacattaggaaatgccaaggcattctgtggaatgaaatattcatatgtgctaaaaataaagattttatcagctcatgataaaggtactcatgttgaggtcaatgtgaagattaaaaaggtcttaaaatctaccaaactgaagattttccgaggaaagcgaacattatatccagaatcatggacggacagaggatgcacttgtccaatcctcaatcctggtttggaataccttgtagcaggacatgaggatataagaacaggcaaactaattgtgaatatgaaaagctttgtccagcactggaaaccttctcttggaagaaaagtcatggatattttaaaaagagagtgcaagtagcattaagatggatagcacataatggcacttgtctatgtacaaaacacaaactttagagcaagaagacctcagacaggaaactggaattttttaaagtgccaaaacatatagaaatgtttgaatgcatgggtcttatctaacttatctcttctggacccatgtttaaatacagttttatttcatgaagagaaatgaaaacccctacactgatatctgttttctatgggactgattctgaaattcttaactattaagaatattttaatagcagcatgacatttagcagtaatccattaagggcagtacctctaacaaggacgccttccagcttcagcgatgttacttacgtttgatgctacttaaagtaatgaatgacgttttaaggaatccctaaccctactatcagaaaaggtgtttgttaaagagccttctcttgtgtgttacgcatgaactttggtctgtaggtgttaaatggaacctctccatgtgtatatagtatttccttgtataaagcactttactacctaccacttgtgttgtgaacgtttggtgactgctgttgaaagaaggaaaagggtgtgtgagaaagcctactgaagcagcagcactgccactacatgtggacaaaagtgaccatataaaagaagttgtgctatttaactctgaatacttggagaaactaggtgaagatgcaaccagaaaggagaatatgtatgcgtgaagtctcagctttgagctggaggctagattccaagatgacagccatgatgaaactttttaaaaaactaaaccagaagagactttaaaataagagaaagaaatcataaatgtagacatatgcttggctaaaggggaaatggactttaaattttaaagagctcatttgcaatgcacttgtatacacttcaaaaattattgtagacacagaatttgttatatttttgtgcttagtatttaaacctgaacattgaaacagttttcctccttgtctttcttaacagtaatagtcattatatttacctgttttttaacacaatgtatgtgatagtcaaaaaatcacagtttttcattattattcatcttctgtacccacgcataaccactatacatagtttcttttgtacttgaatatacaaaacatgaacacagtgccatatgaataatttcacatacagaacctttttttctctgaagtcctgtggacttgcaaatatatatatatattgctttgttaatttgtttttatatttcatatatgtaataaaggaatatgatctga

SEQ ID NO: 285103 - DNA, 3819 bp, Homo sapiens
cccgtggagaaggacgggacggagccggggcagccagaagaggtgggaaaagcggaggaggacgcccaggaggaggcggcggcggcggccgggaagtgaaaggtctcgcaaagttcagcggcggctgcgggcgccgagccccgggctagcggcagacgagcccgcagggccgctccgcggggcagcgcagccaggccggctatggtcccggggctcccgccgccccccaggtgcccgggacccgccaggccggtgcgcgagggtcaccccacctccccgcgcggtcccggcccctggctcccagctgccggcgaccgctgaccgagcccggcgccccaggaggaggaagaaaccagggccccgttccctcccgaggacggcggcgcttcatcccgcagcccagaggtctcggctccctccggcacccgcccggcccggctgctcccggctcctcccggccatggggagctgcgcgcggctgctgctgctctggggctgcacggtggtggccgcaggactgagtggagtagctggagtgagttcccgctgtgaaaaagcctgcaaccctcggatgggaaatttggctttggggcgaaaactctgggcagacaccacctgcggtcagaatgctaccgaactgtactgcttctacagtgagaacacggatctgacttgtcggcagcccaaatgtgacaagtgcaatgctgcctatcctcacctggctcacctgccatctgccatggcagactcatccttccggtttcctcgcacatggtggcagtctgcggaggatgtgcacagagaaaagatccagttagacctggaagctgaattctacttcactcacctaattgtgatgttcaagtcccccaggccggctgccatggtgctggaccgctcccaggactttgggaaaacatggaagccttataagtactttgcgactaactgctccgctacatttggcctggaagatgatgttgtcaagaagggcgctatttgtacttctaaatactccagtccttttccatgcactggaggagaggttattttcaaagctttgtcaccaccatacgatacagagaacccttacagtgccaaagttcaggagcagctgaagatcaccaaccttcgcgtgcagctgctgaaacgacagtcttgtccctgtcagagaaatgacctgaacgaagagcctcaacattttacacactatgcaatctatgatttcattgtcaagggcagctgcttctgcaatggccacgctgatcaatgcatacctgttcatggcttcagacctgtcaaggccccaggaacattccacatggtccatgggaagtgtatgtgtaagcacaacacagcaggcagccactgccagcactgtgccccgttatacaatgaccggccatgggaggcagctgatggcaaaacgggggctcccaacgagtgcagaacctgcaagtgtaatgggcatgctgatacctgtcacttcgacgttaatgtgtgggaggcatcagggaatcgtagtggtggtgtctgtgatgactgtcagcacaacacagaaggacagtattgccagaggtgcaagccaggcttctatcgtgacctgcggagacccttctcagctccagatgcttgcaaaccgtgttcctgccatccagtaggatcagctgtccttcctgccaactcagtgaccttctgcgaccccagcaatggtgactgcccttgcaagcctggggtggcagggcgacgttgtgacaggtgcatggtgggatactggggcttcggagactatggctgtcgaccatgtgactgtgcggggagctgtgaccctatcaccggagactgcatcagcagccacacagacatagactggtatcatgaagttcctgacttccgtcccgtgcacaataagagcgaaccagcctgggagtgggaggatgcgcaggggttttctgcacttctacactcaggtaaatgcgaatgtaaggaacagacattaggaaatgccaaggcattctgtggaatgaaatattcatatgtgctaaaaataaagattttatcagctcatgataaaggtactcatgttgaggtcaatgtgaagattaaaaaggtcttaaaatctaccaaactgaagattttccgaggaaagcgaacattatatccagaatcatggacggacagaggatgcacttgtccaatcctcaatcctggtttggaataccttgtagcaggacatgaggatataagaacaggcaaactaattgtgaatatgaaaagctttgtccagcactggaaaccttctcttggaagaaaagtcatggatattttaaaaagagagtgcaagtagcattaagatggatagcacataatggcacttgtctatgtacaaaacacaaactttagagcaagaagacctcagacaggaaactggaattttttaaagtgccaaaacatatagaaatgtttgaatgcatgggtcttatctaacttatctcttctggacccatgtttaaatacagttttatttcatgaagagaaatgaaaacccctacactgatatctgttttctatgggactgattctgaaattcttaactattaagaatattttaatagcagcatgacatttagcagtaatccattaagggcagtacctctaacaaggacgccttccagcttcagcgatgttacttacgtttgatgctacttaaagtaatgaatgacgttttaaggaatccctaaccctactatcagaaaaggtgtttgttaaagagccttctcttgtgtgttacgcatgaactttggtctgtaggtgttaaatggaacctctccatgtgtatatagtatttccttgtataaagcactttactacctaccacttgtgttgtgaacgtttggtgactgctgttgaaagaaggaaaagggtgtgtgagaaagcctactgaagcagcagcactgccactacatgtggacaaaagtgaccatataaaagaagttgtgctatttaactctgaatacttggagaaactaggtgaagatgcaaccagaaaggagaatatgtatgcgtgaagtctcagctttgagctggaggctagattccaagatgacagccatgatgaaactttttaaaaaactaaaccagaagagactttaaaataagagaaagaaatcataaatgtagacatatgcttggctaaaggggaaatggactttaaattttaaagagctcatttgcaatgcacttgtatacacttcaaaaattattgtagacacagaatttgttatatttttgtgcttagtatttaaacctgaacattgaaacagttttcctccttgtctttcttaacagtaatagtcattatatttacctgttttttaacacaatgtatgtgatagtcaaaaaatcacagtttttcattattattcatcttctgtacccacgcataaccactatacatagtttcttttgtacttgaatatacaaaacatgaacacagtgccatatgaataatttcacatacagaacctttttttctctgaagtcctgtggacttgcaaatatatatatatattgctttgttaatttgtttttatatttcatatatgtaataaaggaatatgatctgaaaaaaaaaacaaaaaaaaaaaggggggggaaaaaaccaggggcaaattaggaacccggttttggaaggggccaagagggtataaagaggggcgggaaagcggggaaaagccgggttggagactttggggaaggaccaagaaaggcgaaaaagtgggaccgggtcggttgtgacacaaacgctaaacattaata

SEQ ID NO: 285104 - DNA, 990 bp, Homo sapiens
gggctgcaggaattcggcacgagcaaggacgccttccagcttcagcgatgttacttacgtttgatgctacttaaagtaatgaatgacgttttaaggaatccctaaccctactatcagaaaaggtgtttgttaaagagccttctcttgtgtgttacgcatgaactttggtctgtaggtgttaaatggaacctctccatgtgtatatagtatttccttgtataaagcactttactacctaccacttgtgttgtgaacgtttggtgactgctgttgaaagaaggaaaagggtgtgtgagaaagcctactgaagcagcagcactgccactacatgtggacaaaagtgaccatataaaagaagttgtgctatttaactctgaatacttggagaaactaggtgaagatgcaaccagaaaggagaatatgtatgcgtgaagtctcagctttgagctggaggctagattccaagatgacagccatgatgaaactttttaaaaaactaaaccagaagagactttaaaataagagaaagaaatcataaatgtagacatatgcttggctaaaggggaaatggactttaaattttaaagagctcatttgcaatgcacttgtatacacttcaaaaattattgtagacacagaatttgttatatttttgtgcttagtatttaaacctgaacattgaaacagttttcctccttgtctttcttaacagtaatagtcattatatttacctgttttttaacacaatgtatgtgatagtcaaaaaatcacagtttttcattattattcatcttctgtacccacgcataaccactatacatagtttcttttgtacttgaatatacaaaacatgaacacagtgccatatgaataatttcacatacagaacctttttttctctgaagtcctgtggacttgcaaatatatatatatattgctttgttaatttgtttttatatttcatatatgtaataaaggaatatgatctga

SEQ ID NO: 285105 - DNA, 2620 bp, Homo sapiens
cccgtggagaaggacgggacggagccggggcagccagaagaggtgggaaaagcggaggaggacgcccaggaggaggcggcggcggcggccgggaagtgaaaggtctcgcaaagttcagcggcggctgcgggcgccgagccccgggctagcggcagacgagcccgcagggccgctccgcggggcagcgcagccaggccggctatggtcccggggctcccgccgccccccaggtgcccgggacccgccaggccggtgcgcgagggtcaccccacctccccgcgcggtcccggcccctggctcccagctgccggcgaccgctgaccgagcccggcgccccaggaggaggaagaaaccagggccccgttccctcccgaggacggcggcgcttcatcccgcagcccagaggtctcggctccctccggcacccgcccggcccggctgctcccggctcctcccggccatggggagctgcgcgcggctgctgctgctctggggctgcacggtggtggccgcaggactgagtggagtagctggagtgagttcccgctgtgaaaaagcctgcaaccctcggatgggaaatttggctttggggcgaaaactctgggcagacaccacctgcggtcagaatgctaccgaactgtactgcttctacagtgagaacacggatctgacttgtcggcagcccaaatgtgacaagtgcaatgctgcctatcctcacctggctcacctgccatctgccatggcagactcatccttccggtttcctcgcacatggtggcagtctgcggaggatgtgcacagagaaaagatccagttagacctggaagctgaattctacttcactcacctaattgtgatgttcaagtcccccaggccggctgccatggtgctggaccgctcccaggactttgggaaaacatggaagccttataagtactttgcgactaactgctccgctacatttggcctggaagatgatgttgtcaagaagggcgctatttgtacttctaaatactccagtccttttccatgcactggaggagaggttattttcaaagctttgtcaccaccatacgatacagagaacccttacagtgccaaagttcaggagcagctgaagatcaccaaccttcgcgtgcagctgctgaaacgacagtcttgtccctgtcagagaaatgacctgaacgaagagcctcaacattttacacactatgcaatctatgatttcattgtcaagggcagctgcttctgcaatggccacgctgatcaatgcatacctgttcatggcttcagacctgtcaaggccccaggaacattccacatggtccatgggaagtgtatgtgtaagcacaacacagcaggcagccactgccagcactgtgccccgttatacaatgaccggccatgggaggcagctgatggcaaaacgggggctcccaacgagtgcagaacctgcaagtgtaatgggcatgctgatacctgtcacttcgacgttaatgtgtgggaggcatcagggaatcgtagtggtggtgtctgtgatgactgtcagcacaacacagaaggacagtattgccagaggtgcaagccaggcttctatcgtgacctgcggagacccttctcagctccagatgcttgcaaaccgtgttcctgccatccagtaggatcagctgtccttcctgccaactcagtgaccttctgcgaccccagcaatggtgactgcccttgcaagcctggggtggcagggcgacgttgtgacaggtgcatggtgggatactggggcttcggagactatggctgtcgaccatgtgactgtgcggggagctgtgaccctatcaccggagactgcatcagcagccacacagacatagactggtatcatgaagttcctgacttccgtcccgtgcacaataagagcgaaccagcctgggagtgggaggatgcgcaggggttttctgcacttctacactcaggtaaatgcgaatgtaaggaacagacattaggaaatgccaaggcattctgtggaatgaaatattcatatgtgctaaaaataaagattttatcagctcatgataaaggtactcatgttgaggtcaatgtgaagattaaaaaggtcttaaaatctaccaaactgaagattttccgaggaaagcgaacattatatccagaatcatggacggacagaggatgcacttgtccaatcctcaatcctgttcaacagccaaggccaaagaaagctgataagaaaactgaaaccttacacgccaacctgcttccttggctactttggaaaagaaacaatcctattgggtatccctgcatattcattcattcttaattcatgcatacatttactcattcatcagtcatatattttagaacaccaaaactagcactaaagtattgtatcttctttttctatggatacaaaataaacttcgtgttctcagacgtgtagcaaagtagatgtcaaaaccctagagataggaaaataaaatataaatgctaataagaggtataaaagaacattgttttgcatatttgtttttggtgtgatgctgcttcataatttatggttttattcagtattgtttttatcaatttaacttatatttatacttta

SEQ ID NO: 285106 - DNA, 1199 bp, Homo sapiens
cccgtggagaaggacgggacggagccggggcagccagaagaggtgggaaaagcggaggaggacgcccaggaggaggcggcggcggcggccgggaagtgaaaggtctcgcaaagttcagcggcggctgcgggcgccgagccccgggctagcggcagacgagcccgcagggccgctccgcggggcagcgcagccaggccggctatggtcccggggctcccgccgccccccaggtgcccgggacccgccaggccggtgcgcgagggtcaccccacctccccgcgcggtcccggcccctggctcccagctgccggcgaccgctgaccgagcccggcgccccaggaggaggaagaaaccagggccccgttccctcccgaggacggcggcgcttcatcccgcagcccagaggtctcggctccctccggcacccgcccggcccggctgctcccggctcctcccggccatggggagctgcgcgcggctgctgctgctctggggctgcacggtggtggccgcaggactgagtggagtagctggagtgagttcccgctgtgaaaaagcctgcaaccctcggatgggaaatttggctttggggcgaaaactctgggcagacaccacctgcggtcagaatgctaccgaactgtactgcttctacagtgagaacacggatctgacttgtcggcagcccaaatgtgacaagtgcaatgctgcctatcctcacctggctcacctgccatctgccatggcagactcatccttccggtttcctcgcacatggtggcagtctgcggaggatgtgcacagagaaaagatccagttagacctggaagctgaattctacttcactcacctaattgtgatgttcaagtcccccaggccggctgccatggtgctggaccgctcccaggactttgggaaaacatggaagccttataagtactttgcgactaactgctccgctacatttggcctggaagatgatgttgtcaagaagggcgctatttgtacttctaaatactccagtccttttccatgcactggaggagaggtaagggcacctgtttaactctacactgtaagtaagatagaaaaatgttaccagcccgcatttttttttaaagcatgaagctatacttgtagcaacatgaatgaaattagaatttttcatgagatttatttgtcataaattatttcttaccctt

SEQ ID NO: 285107 - DNA, 332 bp, Homo sapiens
acaataagagcgaaccagcctgggagtgggaggatgcgcaggggttttctgcacttctacactcaggtgagatggatgtaaccaggcatcatattttcaggtctggtcttatgtaacagtgatacgtgacaaaccagggtccagcttttggatcctatgaggggaactctttagttctggggtttcatggtataataaagtagtgactcctgtaagtatgaaactgtaaaatatagctaaggggtattttaacacatttttgtttgttttctgatgattagagtaatatatgtagttggtatagaaaatttggaaaatgcaaaacatcatag

SEQ ID NO: 285108 - DNA, 3241 bp, Homo sapiens
cctctcctttcttctgtagctcgcgttgaagccgcacgtccggccccgatcccggcaccatgagcttcggctcggagcactacctgtgctcctcctcctcctaccgcaaggtgttcggggatggctctcgcctgtccgcccgcctctctggggccggcggcgcgggcggcttccgctcgcagtcgctgtcccgcagcaatgtggcctcctcggccgcctgctcctcggcctcgtcgctcggcctcggcctggcctatcgccggccgccggcgtccgacgggctggacctgagccaggcggcggcgcgcaccaacgagtacaagatcatccgcaccaacgagaaggagcagctgcagggcctcaacgaccgcttcgccgtgttcatcgagaaggtgcatcagctggagacgcagaaccgcgcgttggaggccgagctggccgcgctgcgacagcgccacgctgagccgtcgcgcgtcggcgagctcttccagcgcgagctgcgcgacctgcgcgcgcagctggaggaggccagctcggctcgctcgcaggccctgctggagcgcgacgggctggcggaggaggtgcagcggctgcgggcgcgctgcgaggaggagagccgcggacgcgaaggcgccgagcgcgccctgaaggcgcagcagcgcgacgtggacggcgccacgctggcccgcctggacctggagaagaaggtggagtcgctgctggacgagctggccttcgtacgccaggtgcacgacgaggaggtagccgagctgctggccacgctgcaggcgtcgtcgcaggccgcggccgaggtggacgtgactgtggctaaaccagacctgacctcggctctgagggagatccgcgcccagtatgagtccctggccgctaagaacctgcagtccgcggaagaatggtacaagtccaagtttgccaacctgaacgagcaggcggcgcgcagcaccgaggccatccgggccagccgcgaggagatccacgagtatcggcgccagctgcaggcgcgcaccatcgagatcgagggcctgcgcggggccaacgagtccttggagaggcagatcctggagctggaggagcggcacagtgccgaggtagctggctaccaggatagcattgggcagctggagaatgatctgaggaacaccaagagtgagatggcacgccaccttcgggaataccaggacttgctcaatgtcaaaatggctcttgacattgagatagcagcttacaggaaactgctggaaggcgaggagacacgttttagcaccagtgggttaagcatttcggggctgaatccacttcccaatccaagttacctgctcccacctagaatcctcagtgctacaacctccaaagtctcatccactgggctatcacttaagaaagaggaggaggaggaggaggcatctaaggtagcctctaagaaaacctcccagataggggaaagttttgaagaaatattagaggagacagtaatatctactaagaaaaccgagaaatcaaatatagaagaaaccaccatttcaagccaaaaaatataattccattgctttgaaaaagttaatgcttaagagggaatgatatgcatttgacttgttaaacagcctattcctgaactataacacctgccaccactataaaatgtcttcaaggcttcagtctcatatttagtattgaatacttacattctctaataagaaaaccaccccttagattgaagtaaactgcagtcctggagcaatcacagatgagttatctaagaatacagctttctgaccttcagctcacgcttcacagtgatcgatgattcaggtgcagaggaagtacaaactaaggtgctaaatctgcgatcatcgtcatttgctgtgaactgaaattaaaactattcatgctacccagccattacccagctaaataatcttactctagatacctaaaacataagatcactgccagagataaactaatggtccacacccaattccactctgatagaattatttcacaaataataggtgtttgtttaatggacacttttcacctccttcaattccatatatccttttcttctatgtaggaaaaaaatagtctagtgtagtattcttcccttttaaacacattttggttcttctcaaaagaacttacccccattcgcgctctgctcagtgggtaaaattagatgcatgttgaccatgtctatgattcgtgtaattacttatgcctgcccatttcatattctttcaattctgtaggttaaaaaaatggcagtgatgaattttaagggtttcccccaacatataaaataatgcaaagaatccctagactttaggctttcagcttacacaaatctatttaattaggaaaaaaactattaaggatgtagcttttcacctttactttagaagcacagtaaatatcccaaactgtgatgaagccgaccttagatttagtagtgtaagctagaagaagtgagtgtttctatgagtggaaaaagccaaggtgtcatttatgtgtcagttcatttgtggtgatatagaattagctttttcatccccttacccttagaatccacgtattccccttcccactagcctaggtcataaagaggcgttgctttcactctcctatgccttttacgagtgctaagtgtaggatattttgtcaccagaacacaatgctaccgccccaaagtaaaagaaaccacttctggtcaatcaacactaccagcgtatatataagaaagacatctttctcttttctaaaagacttccctaacacttaccccatggctgcacagttggtggggtcctgccggagaggaagagacactcagaccagagaaggggtgtgcatgcgcctactcgcttgctagaagtagattctggacagtcagctcttcatctgcccaactgtgtagcatctgcattgcccagtctttcatgtgtgccaaggctgatgcaggatttgttctctgtccagcagtcacttcggccagagctgaagagttgccccgtctctgttccatgtctcctttaagagctctggtgataaggacatgatgcttttactgaactttcttatcctagcacatgcttcaatagttcaaggaacttgaaaaatacttttccttacctttaccccatccctgtctttactcctcacacttactgtaagacattagtaacataataaattaaaagtcacacgaatctcaccaacataa

SEQ ID NO: 285109 - DNA, 3281 bp, Homo sapiens
cctctcctttcttctgtagctcgcgttgaagccgcacgtccggccccgatcccggcaccatgagcttcggctcggagcactacctgtgctcctcctcctcctaccgcaaggtgttcggggatggctctcgcctgtccgcccgcctctctggggccggcggcgcgggcggcttccgctcgcagtcgctgtcccgcagcaatgtggcctcctcggccgcctgctcctcggcctcgtcgctcggcctcggcctggcctatcgccggccgccggcgtccgacgggctggacctgagccaggcggcggcgcgcaccaacgagtacaagatcatccgcaccaacgagaaggagcagctgcagggcctcaacgaccgcttcgccgtgttcatcgagaaggtgcatcagctggagacgcagaaccgcgcgttggaggccgagctggccgcgctgcgacagcgccacgctgagccgtcgcgcgtcggcgagctcttccagcgcgagctgcgcgacctgcgcgcgcagctggaggaggccagctcggctcgctcgcaggccctgctggagcgcgacgggctggcggaggaggtgcagcggctgcgggcgcgctgcgaggaggagagccgcggacgcgaaggcgccgagcgcgccctgaaggcgcagcagcgcgacgtggacggcgccacgctggcccgcctggacctggagaagaaggtggagtcgctgctggacgagctggccttcgtacgccaggtgcacgacgaggaggtagccgagctgctggccacgctgcaggcgtcgtcgcaggccgcggccgaggtggacgtgactgtggctaaaccagacctgacctcggctctgagggagatccgcgcccagtatgagtccctggccgctaagaacctgcagtccgcggaagaatggtacaagtccaagtttgccaacctgaacgagcaggcggcgcgcagcaccgaggccatccgggccagccgcgaggagatccacgagtatcggcgccagctgcaggcgcgcaccatcgagatcgagggcctgcgcggggccaacgagtccttggagaggcagatcctggagctggaggagcggcacagtgccgaggtagctggctaccaggatagcattgggcagctggagaatgatctgaggaacaccaagagtgagatggcacgccaccttcgggaataccaggacttgctcaatgtcaaaatggctcttgacattgagatagcagcttacaggaaactgctggaaggcgaggagacacgttttagcaccagtgggttaagcatttcggggctgaatccacttcccaatccaagttacctgctcccacctagaatcctcagtgctacaacctccaaagtctcatccactgggctatcacttaagaaagaggaggaggaggaggaggcatctaaggtagcctctaagaaaacctcccagataggggaaagttttgaagaaatattagaggagacagtaatatctactaagaaaaccgagaaatcaaatatagaagaaaccaccatttcaagccaaaaaatataattccattgctttgaaaaagttaatgcttaagagggaatgatatgcatttgacttgttaaacagcctattcctgaactataacacctgccaccactataaaatgtcttcaaggcttcagtctcatatttagtattgaatacttacattctctaataagaaaaccaccccttagattgaagtaaactgcagtcctggagcaatcacagatgagttatctaagaatacagctttctgaccttcagctcacgcttcacagtgatcgatgattcaggtgcagaggaagtacaaactaaggtgctaaatctgcgatcatcgtcatttgctgtgaactgaaattaaaactattcatgctacccagccattacccagctaaataatcttactctagatacctaaaacataagatcactgccagagataaactaatggtccacacccaattccactctgatagaattatttcacaaataataggtgtttgtttaatggacacttttcacctccttcaattccatatatccttttcttctatgtaggaaaaaaatagtctagtgtagtattcttcccttttaaacacattttggttcttctcaaaagaacttacccccattcgcgctctgctcagtgggtaaaattagatgcatgttgaccatgtctatgattcgtgtaattacttatgcctgcccatttcatattctttcaattctgtaggttaaaaaaatggcagtgatgaattttaagggtttcccccaacatataaaataatgcaaagaatccctagactttaggctttcagcttacacaaatctatttaattaggaaaaaaactattaaggatgtagcttttcacctttactttagaagcacagtaaatatcccaaactgtgatgaagccgaccttagatttagtagtgtaagctagaagaagtgagtgtttctatgagtggaaaaagccaaggtgtcatttatgtgtcagttcatttgtggtgatatagaattagctttttcatccccttacccttagaatccacgtattccccttcccactagcctaggtcataaagaggcgttgctttcactctcctatgccttttacgagtgctaagtgtaggatattttgtcaccagaacacaatgctaccgccccaaagtaaaagaaaccacttctggtcaatcaacactaccagcgtatatataagaaagacatctttctcttttctaaaagacttccctaacacttaccccatggctgcacagttggtggggtcctgccggagaggaagagacactcagaccagagaaggggtgtgcatgcgcctactcgcttgctagaagtagattctggacagtcagctcttcatctgcccaactgtgtagcatctgcattgcccagtctttcatgtgtgccaaggctgatgcaggatttgttctctgtccagcagtcacttcggccagagctgaagagttgccccgtctctgttccatgtctcctttaagagctctggtgataaggacatgatgcttttactgaactttcttatcctagcacatgcttcaatagttcaaggaacttgaaaaatacttttccttacctttaccccatccctgtctttactcctcacacttactgtaagacattagtaacataataaattaaaagtcacacgaatctcaccaacataaaaaattcacttggccgtcgttttaccacgttgtgctgggc

SEQ ID NO: 285110 - DNA, 479 bp, Homo sapiens
ctgaccatagcaggatccttaccgactagccgacaggacccatggctgcacagttggtggggtcctgccggagaggaagagacactcagaccagagaaggggtgtgcatgcgcctactcgcttgctagaagtagattctggacagtcagctcttcatctgcccaactgtgtagcatctgcattgcccagtctttcatgtgtgccaaggctgatgcaggatttgttctctgtccagcagtcacttcggccagagctgaagagttgccccgtctctgttccatgtctcctttaagagctctggtgataaggacatgatgcttttactgaactttcttatcctagcacatgcttcaatagttcaaggaacttgaaaaatacttttccttacctttaccccatccctgtctttactcctcacacttactgtaagacattagtaacataataaattaaaagtcacacgaatctcaccaacataa

SEQ ID NO: 285111 - DNA, 564 bp, Homo sapiens
ccgcggacgcgaaggcgccgagcgcgccctgaaggcgcagcagcgcgacgtggacggcgccacgctggcccgcctggacctggagaagaaggtggagtcgctgctggacgagctggccttcgtacgccaggtgcacgacgaggaggtagccgagctgctggccacgctgcaggcgtcgtcgcaggccgcggccgaggtggacgtgactgtggctaaaccagacctgacctcggctctgagggagatccgcgcccagtatgagtccctggccgctaagaacctgcagtccgcggaagaatggtacaagtccaagtttgccaacctgaacgagcaggcggcgcgcagcaccgaggccatccgggccagccgcgaggagatccacgagtatcggcgccagctgcaggcgcgcaccatcgagatcgagggcctgcgcggggccaacgagtccttggagaggcagatcctggagctggaggagcggcacagtgccgaggtagctggctaccaggtaagggccggggctgggcgtggggaggggtgccctgccctcttccgcgcgtaccc

SEQ ID NO: 285112 - DNA, 384 bp, Homo sapiens
ttactttaggtaaccctgcctgagcagctcctgcattgctacaaggatgaagcagcagaaacatctggtcggttttagattccccttggatttccaacttcaaagggaattataaagaataacaaattcatgtaccggcactaaaaaaaaattagagcagcaggagagaatggtaaaattgtccttatttgactgctagtgacaggcgccacaggcagaactatgagaaaagacaaaggcaagatcaccagttgacaaccagagttcctgcaagagactgaatctttggctacatgcaaatatgcacagggcccttaacaatccatagggagatttacttgcttaaggaaaataaataggtaaataaataaaaggagttgaaag

SEQ ID NO: 285113 - DNA, 2003 bp, Homo sapiens
tacttctcttcatttcccaaaaatgaagttagaaaaaaagcaatctattcaaatctggaaatggctgctggagggctctgggacgcattcatccaacatgcaattcatcactgctcaccagagctggcaggcgacaggtcattccggggcgctttcaaagagcgcatgtagagatacacactcaagaccacacaaaaaacagtggccgcaagtgcaaactgaagaaaatgactgtacacgtaatgaaactctacgccctggaagagagatgttccgatgactgcagatgtcaggataaaagcatagaatcctttaaaaaaaaaaaaaaaaggaagtggaaaattaatattaacccaaggctcacatgaaacttacgccactatgaaacaatgcaatgttcatttttaaagtcttaatttcattattcagactaaatacacacaaatatgcaaataagcaatgtctgaggtataattttcaatatacataccattatctcttgtagaactttccaaatagtttaacatattgattctttttcagttcaaatggtcattatttgcttttaattaagggaaaacagacaagaagtgcaacctgaaaattcccacaatccaaactctcaggcacaaagtcaaatggctaattattaacagagctgggccaaacacatattttaaagtctaatgccattacctaaggggagggtattatgcacctaccaggggtcaggcaccgagccaggttggtagttacaaaattataaatatttatacttaaccaagttgccaataatggtttcaaaagattctagtaaaactctatcatccagaacagagatcttaacatgccacccgcagaaaagatgccacaacacaaatgcccgaggctaggcaggggactgcgagtacctggggggtagggacagcaggcggggacattcacgtgcaatgccaagttaaaaagcacccgccctgtgacgctccacagaactctcgttccgggctagtcctgcagccacacagaaaggctcactggaagatccaatttttttcttttggctaaagaaatagttttgctttcaaaggagctgagtgcctcaaagagctgtgatcctaaaaagtcatcaaatccatttggataaacggtcaaaagcaaaaaagaggtagctgttatttatatgagaattctaaaaccaaaccttttgtaaagtaaaatagttgtctcaaattatctgaatccacattttccacaaatactccaaacaataacttctaaattctgacttttgaaaatattcatttacctttcataaaatgtaattttaaaaaagaatggttagataaagcagtcttttgctctctagcctatgtggattaaaaataatcatccaaaatgtcttaggaacctccttagttaataatcgtaaaatctcgaaaagaaatctcaatacttgaaccagagtaattagatgaggaaatttttaaaaaggatcaagcaacttggccagccactcccccactggctccaagagctccatgtccaagtgctgtgctcagtctctgaatgtaccacacccctcagagggaagtgaaaatataacacaagattacttagaaaagaattggtacctacagagaaacacacaaaacactgaaatcaaaggacctggcggcaaagtcaacaacccacctcaccccagactcaccttccctggtgtggtaagtgaaccaccagagggagggagggtgccaaaggttctaaaacttgctccatcagcaaagaatttggtaaaagcaacaaaaagtctaacaataccaatgataagtattaagcacccaccaggggtcagactctggagctgggggagacgttttatcacatgactggcactaaaaggcagaaggtgtctaaactatctttggcttcccctttagaacccagtggagtgactgcagacagagtagatgctgcgtaagtctctaaacaaagtatccaaagtt

SEQ ID NO: 285114 - DNA, 1184 bp, Homo sapiens
gggaggctgccatgagaggggcctccggcaggggaaacgtatggtcccaaaactgaagtcataggaaacaaatgcatttccaatgttatttgagaaaagcccaaagaccaagcagcaggcccagtgtcctttcctgctgagttttcctgggataggtcccccatcacaacctactccctggggctcccagggggattcgtggagaggcggcgcccaggggggccttcgtggaggaggtgccctgggtccgcctgcccacgcgcctggctcccccgcagactgtggcctggcgccggccgcgctcaccaggattgtgggcggcagcgcagcgggccgtggggagtggccgtggcaggtgagcctgtggctgcggcgccgggaacaccgttgcggggccgtgctggtggcagagaggtggctgctgtcggcggcgcactgcttcgacgtctacggggaccccaagcagtgggcggccttcctaggcacgccgttcctgagcggcgcggaggggcagctggagcgcgtggcgcgcatctacaagcacccgttctacaatctctacacgctcgactacgacgtggcgctgctggagctggcggggccggtgcgtcgcagccgcctggtgcgtcccatctgcctgcccgagcccgcgccgcgacccccggacggcacgcgctgcgtcatcaccggctggggctcggtgcgcgaaggaggctccatggcgcggcagctgcagaaggcggccgtgcgcctcctcagcgagcagacctgccgccgcttctacccagtgcagatcagcagccgcatgctgtgtgccggcttcccgcagggtggcgtggacagctgctcgggtgacgctgggggacccctggcctgcagggagccctctggacggtgggtgctaactggggtcactagctggggctatggctgtggccggccccacttcccaggtgtctatacccgggtggcagctgtgagaggctggataggacagcacatccaggagtgaccaccacgtgactgcccaggccgagactctacgtgaaagcaacaggagcagcaggccacccaacaccccaccccaccgtaccctacccaaggacgggtgtgggggggctgtgggtcatggggatgcattttggtaccaccctttgttccaataaacacagcccctccaccct

SEQ ID NO: 285115 - DNA, 538 bp, Homo sapiens
gggaggctgccatgagaggggcctccggcaggggaaacgtatggtcccaaaactgaagtcataggaaacaaatgcatttccaatgttatttgagaaaagcccaaagaccaagcagcaggcccagtgtcctttcctgctgagttttcctgggataggtcccccatcacaacctactccctggggctcccagggggattcgtggagaggcggcgcccaggggggccttcgtggaggaggtgccctgggtccgcctgcccacgcgcctggctcccccgcagactgtggcctggcgccggccgcgctcaccaggattgtgggcggcagcgcagcgggccgtggggagtggccgtggcaggtgagcctgtggctgcggcgccgggaacaccgttgcggggccgtgctggtggcagagaggtggctgctgtcggcggcgcactgcttcgacgtgtgagttccaaacgctccaaatgcccctacatgtctctgtagctcacccggaaccgaactgttgcccgaaaacgcaccctgaccccctcct

SEQ ID NO: 285116 - DNA, 2698 bp, Homo sapiens
  misc_feature (918)..(918): n is a, c, g, or t
gaattccgcgtgtggccgcctctaaggcggccacacgggcatggccgtggggctggcgactggtgtttagcaactccgaccacctgcctgctgaggggctagagccctcagcccagaccctgtgcccccggccgggctctcatgcgtggaatggtgctgtgccccttgccagcaggccaggctcaccatggtgccgcatgccatcttggcacgggggagggacgtgtgcaggcggaatggactcctcatcctgtctgtgctgtctgtcatcgtgggctgcctcctcggcttcttcttgaggacccggcgcctctcaccacaggaaattagttacttccagttccctggagagctcctgatgaggatgctgaagatgatgatcctgccactggtggtctccagcttgatgtccggacttgcctccctggatgccaagacctctagccgcctgggcgtcctcaccgtggcgtactacctgtggaccaccttcatggctgtcatcgtgggcatcttcatggtctccatcatccacccaggcagcgcggcccagaaggagaccacggagcagagtgggaagcccatcatgagctcagccgatgccctgttggacctcatccggaacatgttcccagccaacctagtagaagccacattcaaacagtaccgcaccaagaccaccccagttgtcaagtcccccaaggtggcaccagaggaggcccctcctcggcggatcctcatctacggggtccaggaggagaatggctcccatgtgcagaacttcgccctggacctgaccccgccgcccgaggtcgtttacaagtcagagccgggcaccagcgatggcatgaatgtgctgggcatcgtcttcttctctgccaccatgggcatcatgctgggccgcatgggtgacagcggggnccccctggtcagcttctgccagtgcctcaatgagtcggtcatgaagatcgtggcggtggctgtgtggtatttccccttcggcattgtgttcctcattgcgggtaagatcctggagatggacgaccccagggccgtcggcaagaagctgggcttctactcagtcaccgtggtgtgcgggctggtgctccacgggctctttatcctgcccctgctctacttcttcatcaccaagaagaatcccatcgtcttcatccgcggcatcctgcaggctctgctcatcgcgctggccacctcctccagctcagccacactgcccatcaccttcaagtgcctgctggagaacaaccacatcgaccggcgcatcgctcgcttcgtgctgcccgtgggtgccaccatcaacatggacggcactgcgctctacgaggctgtggccgccatcttcatcgcccaggtcaacaactacgagctggactttggccagatcatcaccatcagtatcacagccactgcagccagcattggggcagctggcatcccccaggccggcctcgtcaccatggtcatcgtgctcacctccgtgggactgcccaccgatgacatcaccctcatcattgccgttgactgggctctggaccgtttccgcaccatgattaacgtgctgggtgatgcgctggcagcggggatcatggcccatatatgtcggaaggattttgcccgggacacaggcaccgagaaactgctgccctgcgagaccaagccagtgagcctccaggagatcgtggcagcccagcagaatggctgtgtgaagagtgtagccgaggcctccgagctcaccctgggccccacctgcccccaccacgtccccgttcaagtggagcgggatgaggagctgcccgctgcgagtctgaaccactgcaccatccagatcagcgagctggagaccaatgtctgagcctgcggagctgcaggggcaggcgaggcctccaggggcagggtcctgaggcaggaactcgactctccaaccctcctgagcagccggcaggggccaggatcacacattcttctcacccttgagaggctggaattaaccccgcttgacggaaaatgtatctcagagaagggaaaggctgcatgggggagccccatccagggagtgatgggcccggcattgcctgaggccccgctgtgacagtttccccggtgtgagcccggtgagggcggcaggcaggggttatccggccccactttctggatgacagacttgaggctctgagagctgaaaacacttgtccaaggtctcacgttaaggtcaagacactaactcaaatctttcaagccccgcctctcctcttggaggacagggcagcctgcagctgtgtccaggcccaggccccaccccataacaggtggcctcagccacacagttctccccaaggggagcagcccagggccaagccccgctgccttccccaggccacagtgcgtccagtctcctgtcctgccacgtgtcttttgcaaagctccttggatgtggagacagatgtctttactagagctgaaaggcccccttgacacatccaggccaacctcccatggaataggtaggcaagccaggactccgggaaggaggtgcagccaggatgctctggtggagctgccgatggggccctggtgtcagaactccccaaaggcctgtgcgtccaagtggagtcaggttttctattcctttctgtgtttgcaaattcagtgttaactaaataaaggtattttgtttttcaat

SEQ ID NO: 285117 - DNA, 1324 bp, Homo sapiens
  misc_feature (802)..(802): n is a, c, g, or t
  misc_feature (849)..(849): n is a, c, g, or t
gaattccgcgtgtggccgcctctaaggcggccacacgggcatggccgtggggctggcgactggtgtttagcaactccgaccacctgcctgctgaggggctagagccctcagcccagaccctgtgcccccggccgggctctcatgcgtggaatggtgctgtgccccttgccagcaggccaggctcaccatggtgccgcatgccatcttggcacgggggagggacgtgtgcaggcggaatggactcctcatcctgtctgtgctgtctgtcatcgtgggctgcctcctcggcttcttcttgaggacccggcgcctctcaccacaggaaattagttacttccagttccctggagagctcctgatgaggatgctgaagatgatgatcctgccactggtggtctccagcttgatgtccggacttgcctccctggatgccaagacctctagccgcctgggcgtcctcaccgtggcgtactacctgtggaccaccttcatggctgtcatcgtgggcatcttcatggtctccatcatccacccaggcagcgcggcccagaaggagaccacggagcagagtgggaagcccatcatgagctcagccgatgccctgttggacctcatccggcagaaagaagaaagttggaggaacggaccaaagggtcctggctgaatgggcacctccttaagagttttccaggaatcaccacccaacgacttccactcacctctcgatggccaccccattagcaagagaatcagagcttgatggcaggtcccatttggtccccacaacataataggacttctnttaaggaaggacgggagaatggagactgcataggcaactagctgtcnctgccaaggcccacatttaaaatgattgtaattgtaaaggaagttgtaaagaaatgtctatataggtataagttccatttggcttcttacgagcttccaaatgttctccgtgtgtgtaaactgagtcttgaaagaggggaagagggttaccgaggacaagagtgagtgggaggcgacccaggtggaggcagtgtgagtgtggggcggcaggttggaggaagagcaggcatgcaacggaagcctcttaccagatgctcacctcagagttggcatttctcacaagacacactcctagaaggggactgtgaagacaaagatacaaatgcttttagagaaaggttgctgccaggaccatgtgagggtgcccatctcaccaaacctcccacattgtgcactgtcatttgaaaaatactttgtcagtttgacaggtggaaatatcttgaatttgttgatgaaactaaacattttaaaaagc

SEQ ID NO: 285118 - DNA, 545 bp, Homo sapiens
  misc_feature (36)..(37): n is a, c, g, or t
aacacaaggtgttgctgggtgctctgattatccccnngcagaatacactcaaagaagggaaaggctgcatgggggagccccatccagggagtgatgggcccggcattgcctgaggccccgctgtgacagtttccccggtgtgagcccggtgagggcggcaggcaggggttatccggccccactttctggatgacagacttgaggctctgagagctgaaaacacttgtccttgtgtcttctccagggaacggacggacagatggacagggcagacggcgagctgctatggctgattctggctggggcaagaactgtctgtggcataggctttggagggctgttcgcacatgacttgtgcatgtgtgtgtgtgtggtgtgtatgcatacgcatacacatgtcagcagggggagggaatgggtgcctgtgtgtgccagggcaggggcagacccttccctgcatgattcagagggcgtggcagcggtagtgggggtgtgacagagactgtggtggtttggagggtagttgtgtgtggctgagctgggtg

SEQ ID NO: 285119 - DNA, 2526 bp, Homo sapiens
  misc_feature (918)..(918): n is a, c, g, or t
gaattccgcgtgtggccgcctctaaggcggccacacgggcatggccgtggggctggcgactggtgtttagcaactccgaccacctgcctgctgaggggctagagccctcagcccagaccctgtgcccccggccgggctctcatgcgtggaatggtgctgtgccccttgccagcaggccaggctcaccatggtgccgcatgccatcttggcacgggggagggacgtgtgcaggcggaatggactcctcatcctgtctgtgctgtctgtcatcgtgggctgcctcctcggcttcttcttgaggacccggcgcctctcaccacaggaaattagttacttccagttccctggagagctcctgatgaggatgctgaagatgatgatcctgccactggtggtctccagcttgatgtccggacttgcctccctggatgccaagacctctagccgcctgggcgtcctcaccgtggcgtactacctgtggaccaccttcatggctgtcatcgtgggcatcttcatggtctccatcatccacccaggcagcgcggcccagaaggagaccacggagcagagtgggaagcccatcatgagctcagccgatgccctgttggacctcatccggaacatgttcccagccaacctagtagaagccacattcaaacagtaccgcaccaagaccaccccagttgtcaagtcccccaaggtggcaccagaggaggcccctcctcggcggatcctcatctacggggtccaggaggagaatggctcccatgtgcagaacttcgccctggacctgaccccgccgcccgaggtcgtttacaagtcagagccgggcaccagcgatggcatgaatgtgctgggcatcgtcttcttctctgccaccatgggcatcatgctgggccgcatgggtgacagcggggnccccctggtcagcttctgccagtgcctcaatgagtcggtcatgaagatcgtggcggtggctgtgtggtatttccccttcggcattgtgttcctcattgcgggtaagatcctggagatggacgaccccagggccgtcggcaagaagctgggcttctactcagtcaccgtggtgtgcgggctggtgctccacgggctctttatcctgcccctgctctacttcttcatcaccaagaagaatcccatcgtcttcatccgcggcatcctgcaggctctgctcatcgcgctggccacctcctccagctcagccacactgcccatcaccttcaagtgcctgctggagaacaaccacatcgaccggcgcatcgctcgcttcgtgctgcccgtgggtgccaccatcaacatggacggcactgcgctctacgaggctgtggccgccatcttcatcgcccaggtcaacaactacgagctggactttggccagatcatcaccatcagtatcacagccactgcagccagcattggggcagctggcatcccccaggccggcctcgtcaccatggtcatcgtgctcacctccgtgggactgcccaccgatgacatcaccctcatcattgccgttgactgggctctggaccgtttccgcaccatgattaacgtgctgggtgatgcgctggcagcggggatcatggcccatatatgtcggaaggattttgcccgggacacaggcaccgagaaactgctgccctgcgagaccaagccagtgagcctccaggagatcgtggcagcccagcagaatggctgtgtgaagagtgtagccgaggcctccgagctcaccctgggccccacctgcccccaccacgtccccgttcaagtggagcgggatgaggagctgcccgctgcgagtctgaaccactgcaccatccagatcagcgagctggagaccaatgtctgagcctgcggagctgcaggggcaggcgaggcctccaggggcagggtcctgaggcaggaactcgactctccaaccctcctgagcagccggcaggggccaggatcacacattcttctcacccttgagaggctggaattaaccccgcttgacggaaaatgtatctcagagaagggaaaggctgcatgggggagccccatccagggagtgatgggcccggcattgcctgaggccccgctgtgacagtttccccggtgtgagcccggtgagggcggcaggcaggggttatccggccccactttctggatgacagacttgaggctctgagagctgaaaacacttgtccttgtgtcttctccagggaacggacggacagatggacagggcagacggcgagctgctatggctgattctggctggggcaagaactgtctgtggcataggctttggagggctgttcgcacatgacttgtgcatgtgtgtgtgtgtggtgtgtatgcatacgcatacacatgtcagcagggggagggaatgggtgcctgtgtgtgccagggcaggggcagacccttccctgcatgattcagagggcgtggcagcggtagtgggggtgtgacagagactgtggtggtttggagggtagttgtgtgtggctgagctgggtg

SEQ ID NO: 285120 - DNA, 1611 bp, Homo sapiens
gccggagcagcgctgcagaggcacaaacactcctggcggggtggctgcctggggaggggtgagcttcccgacagaggccccagccatcctggaggagggtgctgggcagacaccggcccctctaaccgtagctcagccacactgcccatcaccttcaagtgcctgctggagaacaaccacatcgaccggcgcatcgctcgcttcgtgctgcccgtgggtgccaccatcaacatggacggcactgcgctctacgaggctgtggccgccatcttcatcgcccaggtcaacaactacgagctggactttggccagatcatcaccatcagtatcacagccactgcagccagcattggggcagctggcatcccccaggccggcctcgtcaccatggtcatcgtgctcacctccgtgggactgcccaccgatgacatcaccctcatcattgccgttgactgggctctggaccgtttccgcaccatgattaacgtgctgggtgatgcgctggcagcggggatcatggcccatatatgtcggaaggattttgcccgggacacaggcaccgagaaactgctgccctgcgagaccaagccagtgagcctccaggagatcgtggcagcccagcagaatggctgtgtgaagagtgtagccgaggcctccgagctcaccctgggccccacctgcccccaccacgtccccgttcaagtggagcgggatgaggagctgcccgctgcgagtctgaaccactgcaccatccagatcagcgagctggagaccaatgtctgagcctgcggagctgcaggggcaggcgaggcctccaggggcagggtcctgaggcaggaactcgactctccaaccctcctgagcagccggcaggggccaggatcacacattcttctcacccttgagaggctggaattaaccccgcttgacggaaaatgtatctcagagaagggaaaggctgcatgggggagccccatccagggagtgatgggcccggcattgcctgaggccccgctgtgacagtttccccggtgtgagcccggtgagggcggcaggcaggggttatccggccccactttctggatgacagacttgaggctctgagagctgaaaacacttgtccaaggtctcacgttaaggtcaagacactaactcaaatctttcaagccccgcctctcctcttggaggacagggcagcctgcagctgtgtccaggcccaggccccaccccataacaggtggcctcagccacacagttctccccaaggggagcagcccagggccaagccccgctgccttccccaggccacagtgcgtccagtctcctgtcctgccacgtgtcttttgcaaagctccttggatgtggagacagatgtctttactagagctgaaaggcccccttgacacatccaggccaacctcccatggaataggtaggcaagccaggactccgggaaggaggtgcagccaggatgctctggtggagctgccgatggggccctggtgtcagaactccccaaaggcctgtgcgtccaagtggagtcaggttttctattcctttctgtgtttgcaaattcagtgttaactaaataaaggtattttgtttttcaat

SEQ ID NO: 285121 - DNA, 815 bp, Homo sapiens
tacatttaagacatatttttgtgtttcttaatgaataaattatgaaagaatgttaatttaaaattcataatatgtaaaagaatatttagatttcatttcctataatcagacacgctgttgtttttactatataactgttagaagatataaatctataacatatgcagcatatacataaaaataatcacaatatttttaaaagtttctgttaatgtcatgtatcttctttttttatccaaaagaaaacttattcaaaaaaatgtacccagaagacacagcctaaggaatacaagcaggaaactgagaaacctgccaacaacagctaaagggacacaaacaggtacatgcaaagttgccagtaagcagcatttaaaatgctgattttcagaaagagagcagcaggtggagttaagggtttaggctctggcgtcagactacttagggacgttgggaaagtttcttaccctctctgtaccacagttttctcatttgtaaaatgggaaccaatccttctttgcttttttttttttttgagacggagtcttgctcggttgcccagccttgagtgcagtggcgcaatctcaactcgctgcaacctccgcctcccgggttcaatggaatccagcaaaagaaaattcgaagaattaaggatgctattatatggtcctgtctatcagtggggaaaatacctctgaacaaaactagaaatctcttcagtggtaaaaaccatatgctccctagaaggctgcaatcatcagcacagtttaccatcacataagcataagtcactggacaatctgataccctaaaggtgg

SEQ ID NO: 285122 - DNA, 1664 bp, Homo sapiens
cggccttcctgcagcggggggacaaagagggcggcgggcggctggcggccttgagcgcagcccggtcggcagtgcagggcctgcgaagcccgcgggccggcgcaggggtgggagtcgggcccggggcccagagagaccttccggggccggggctgcggctccgcgggcttccccaccggccgggtctcccggcaactaccagagagcgggggcgcccggggaggcccggcgttccacaaggtccacgcgtattcgcgggccgcggggtcgccgccggccgcccaggcgcggagcctctcgggggtcacccggccgccgggcccgcgggacgcacggggcctgccaggggaggacaacaagcctcaggccctgtccctgcgccccgcccggcctcccccgcggggctgcgcagcccactcggccatcctggcctgaaggggccgcccccggcctcgcgggaaagcctgagcctcccgggccttctcgggccttctcggactttcccccaggcgtcctggaccttcttcggccttcctgggcctcctcgggcttccttgaccctccccaggccttccccgaggcctccaggcccttccctgggcctctccaggctgagctctccgcgacatggccagtgggcctctgggacccggggcccggcccacccgcctccaccctccattcccaccgcctgctcacatcaagccaggagcaccgcccggatgaacacgcagggttccggaccaatacctgggccattgtgactctcagaatgccaggcaataagagatcagaaagctggttccacttcatcttggagatggaggaaagcttgccagaacaactgcacaccccatccactcctcatgttctcagtttgttcttctctgtgatacaaccagcatcacgagaacagccagcagcagctccagcgtgataaaattttcactccttgacaagtgtaagaagccggaaaactgtgcccagccagaagttttgtgtcgcccctttgagatgctgtctaacctccacgagctgcttccgaatcacctgatggagacgctttattcccgcaagagtgaagaggacaagaaaaaatgtgagaatcctgaactctctggcttagaaagaatcttagcaagacatcagttgccaaaagagattaatctgaccccaaagccgaacagaatgcccccgtggaaaagaaaaatcatcaacaatgtaactgacgggtggaagaaatgtcacttgttgaagagaaacacgaaagagcctccaatgtccaccatagttgtcagaaaacttattcaaaaaaatgtacccagaagacacagcctaaggaatacaagcaggaaactgagaaacctgccaacaacagctaaagggacacaaacaggaaaatcacagtgccttctgggtatatcagaacctacctgaaattcacaaactctaaacaatgaatgctcaactctgttgtatgaagtagccacaattaccaaccttcctgcacaaatcaaacaagagatatcttaaaataggaatgatgctgaaactctacagcttttgtgtgaaacacatagaagaagaaagtaaaacaggacaaactccgtgggcaggctccacctgactagaggattccaatgaaggactcaaactggacacca

SEQ ID NO: 285123 - DNA, 1872 bp, Homo sapiens
cggccttcctgcagcggggggacaaagagggcggcgggcggctggcggccttgagcgcagcccggtcggcagtgcagggcctgcgaagcccgcgggccggcgcaggggtgggagtcgggcccggggcccagagagaccttccggggccggggctgcggctccgcgggcttccccaccggccgggtctcccggcaactaccagagagcgggggcgcccggggaggcccggcgttccacaaggtccacgcgtattcgcgggccgcggggtcgccgccggccgcccaggcgcggagcctctcgggggtcacccggccgccgggcccgcgggacgcacggggcctgccaggggaggacaacaagcctcaggccctgtccctgcgccccgcccggcctcccccgcggggctgcgcagcccactcggccatcctggcctgaaggggccgcccccggcctcgcgggaaagcctgagcctcccgggccttctcgggccttctcggactttcccccaggcgtcctggaccttcttcggccttcctgggcctcctcgggcttccttgaccctccccaggccttccccgaggcctccaggcccttccctgggcctctccaggctgagctctccgcgacatggccagtgggcctctgggacccggggcccggcccacccgcctccaccctccattcccaccgcctgctcacatcaagccaggagcaccgcccggatgaacacgcagggttccggaccaatacctgggccattgtgactctcagaatgccaggcaataagagatcagaaagctggttccacttcatcttggagatggaggaaagcttgccagaacaactgcacaccccatccactcctcatgttctcagtttgttcttctctgtgatacaaccagcatcacgagaacagccagcagcagctccagcgtgataaaattttcactccttgacaagtgtaagaagccggaaaactgtgcccagccagaagttttgtgtcgcccctttgagatgctgtctaacctccacgagctgcttccgaatcacctgatggagacgctttattcccgcaagagtgaagaggacaagaaaaaatgtgagaatcctgaactctctggcttagaaagaatcttagcaagacatcagttgccaaaagagattaatctgaccccaaagccgaacagaatgcccccgtggaaaagaaaaatcatcaacaatgtaactgacgggtggaagaaatgtcacttgttgaagagaaacacgaaagagcctccaatgtccaccatagttgtcagaaaacttattcaaaaaaatgtacccagaagacacagcctaaggaatacaagcaggaaactgagaaacctgccaacaacagctaaagggacacaaacagtcaaatctcatgagaccagcaggatgaacaggtaacagaggtcaaagagaaagaatgaatgcccacctatggatggaggcagtttagagaaatatgcttgtccaaagtcacaattaactgcactgacacagagaagcagatattgcacttttgctcaactaaataccactttgatgactaagaacgggccctctgggatcagacaaaggaaaatcacagtgccttctgggtatatcagaacctacctgaaattcacaaactctaaacaatgaatgctcaactctgttgtatgaagtagccacaattaccaaccttcctgcacaaatcaaacaagagatatcttaaaataggaatgatgctgaaactctacagcttttgtgtgaaacacatagaagaagaaagtaaaacaggacaaactccgtgggcaggctccacctgactagaggattccaatgaaggactcaaactggacacca

SEQ ID NO: 285124 - DNA, 1494 bp, Homo sapiens
cggccttcctgcagcggggggacaaagagggcggcgggcggctggcggccttgagcgcagcccggtcggcagtgcagggcctgcgaagcccgcgggccggcgcaggggtgggagtcgggcccggggcccagagagaccttccggggccggggctgcggctccgcgggcttccccaccggccgggtctcccggcaactaccagagagcgggggcgcccggggaggcccggcgttccacaaggtccacgcgtattcgcgggccgcggggtcgccgccggccgcccaggcgcggagcctctcgggggtcacccggccgccgggcccgcgggacgcacggggcctgccaggggaggacaacaagcctcaggccctgtccctgcgccccgcccggcctcccccgcggggctgcgcagcccactcggccatcctggcctgaaggggccgcccccggcctcgcgggaaagcctgagcctcccgggccttctcgggccttctcggactttcccccaggcgtcctggaccttcttcggccttcctgggcctcctcgggcttccttgaccctccccaggccttccccgaggcctccaggcccttccctgggcctctccaggctgagctctccgcgacatggccagtgggcctctgggacccggggcccggcccacccgcctccaccctccattcccaccgcctgctcacatcaagccaggagcaccgcccggtgagaatcctgaactctctggcttagaaagaatcttagcaagacatcagttgccaaaagagattaatctgaccccaaagccgaacagaatgcccccgtggaaaagaaaaatcatcaacaatgtaactgacgggtggaagaaatgtcacttgttgaagagaaacacgaaagagcctccaatgtccaccatagttgtcagaaaacttattcaaaaaaatgtacccagaagacacagcctaaggaatacaagcaggaaactgagaaacctgccaacaacagctaaagggacacaaacagtcaaatctcatgagaccagcaggatgaacaggtaacagaggtcaaagagaaagaatgaatgcccacctatggatggaggcagtttagagaaatatgcttgtccaaagtcacaattaactgcactgacacagagaagcagatattgcacttttgctcaactaaataccactttgatgactaagaacgggccctctgggatcagacaaaggaaaatcacagtgccttctgggtatatcagaacctacctgaaattcacaaactctaaacaatgaatgctcaactctgttgtatgaagtagccacaattaccaaccttcctgcacaaatcaaacaagagatatcttaaaataggaatgatgctgaaactctacagcttttgtgtgaaacacatagaagaagaaagtaaaacaggacaaactccgtgggcaggctccacctgactagaggattccaatgaaggactcaaactggacacca

SEQ ID NO: 285125 - DNA, 1579 bp, Homo sapiens
cggccttcctgcagcggggggacaaagagggcggcgggcggctggcggccttgagcgcagcccggtcggcagtgcagggcctgcgaagcccgcgggccggcgcaggggtgggagtcgggcccggggcccagagagaccttccggggccggggctgcggctccgcgggcttccccaccggccgggtctcccggcaactaccagagagcgggggcgcccggggaggcccggcgttccacaaggtccacgcgtattcgcgggccgcggggtcgccgccggccgcccaggcgcggagcctctcgggggtcacccggccgccgggcccgcgggacgcacggggcctgccaggggaggacaacaagcctcaggccctgtccctgcgccccgcccggcctcccccgcggggctgcgcagcccactcggccatcctggcctgaaggggccgcccccggcctcgcgggaaagcctgagcctcccgggccttctcgggccttctcggactttcccccaggcgtcctggaccttcttcggccttcctgggcctcctcgggcttccttgaccctccccaggccttccccgaggcctccaggcccttccctgggcctctccaggctgagctctccgcgacatggccagtgggcctctgggacccggggcccggcccacccgcctccaccctccattcccaccgcctgctcacatcaagccaggagcaccgcccggatgaacacgcagggttccggaccaatacctgggccattgtgactctcagaatgccaggcaataagagatcagaaagctggttccacttcatcttggagatggaggaaagcttgccagaacaactgcacaccccatccactcctcatgttctcagtttgttcttctctgtgatacaaccagcatcacgagaacagccagcagcagctccagcgtgataaaattttcactccttgacaagtgtaagaagccggaaaactgtgcccagccagaagttttgtgtcgcccctttgagatgctgtctaacctccacgagctgcttccgaatcacctgatggagacgctttattcccgcaagagtgaagaggacaagaaaaaatgtgagaatcctgaactctctggcttagaaagaatcttagcaagacatcagttgccaaaagagattaatctgaccccaaagccgaacagaatgcccccgtggaaaagaaaaatcatcaacaatgtaactgacgggtggaagaaatgtcacttgttgaagagaaacacgaaagagcctccaatgtccaccatagttgtcagagaagttttgttcacattctttggaatcagaagtggaattcaagcaacactgattcttctcctgatgctgtcctgaaccaacacattgggatcttcaagggtcctttgagttcagttgtcttctcagagatgccaggaagcctcaggtgtatgcatgtctgttcgtatgttgtctacataataccaagttgacttcgtttgttcgttcgtgtgtttttgttgagctaccgggcctggccccacattgacttttaaataaatgtgagtattcataaattaag

SEQ ID NO: 285126 - DNA, 991 bp, Homo sapiens
  misc_feature (673)..(673): n is a, c, g, or t
  misc_feature (682)..(682): n is a, c, g, or t
  misc_feature (701)..(701): n is a, c, g, or t
  misc_feature (704)..(704): n is a, c, g, or t
  misc_feature (711)..(713): n is a, c, g, or t
  misc_feature (719)..(719): n is a, c, g, or t
  misc_feature (728)..(728): n is a, c, g, or t
  misc_feature (732)..(732): n is a, c, g, or t
  misc_feature (735)..(735): n is a, c, g, or t
  misc_feature (747)..(747): n is a, c, g, or t
  misc_feature (751)..(751): n is a, c, g, or t
  misc_feature (755)..(755): n is a, c, g, or t
  misc_feature (759)..(759): n is a, c, g, or t
  misc_feature (769)..(770): n is a, c, g, or t
  misc_feature (776)..(777): n is a, c, g, or t
  misc_feature (781)..(782): n is a, c, g, or t
  misc_feature (790)..(790): n is a, c, g, or t
  misc_feature (803)..(803): n is a, c, g, or t
  misc_feature (811)..(811): n is a, c, g, or t
  misc_feature (818)..(818): n is a, c, g, or t
  misc_feature (822)..(822): n is a, c, g, or t
  misc_feature (831)..(831): n is a, c, g, or t
cagtactcctaacggtttaaggtagcgaggctgggtggcgcctggatcatggctgccgcgccgccgctacgggaccgcctgagctttctacaccggctcccgattctcctgaaggggacgtccgatgatgatgtcccgtgtccgggctacctgtttgaagagattgctagtatccttccttgatgtccccgtgtagtggaaagagcggatggcagggtcccagagtggtgcaaagggttcctggggattctgctgtccctagggggatgcacggctcctttattattgtaaccaggcatgggtggggtctgaaggctgcaatactgatgacacaggggaccctagaagcccaggtgctcctgatggcagagcctccagtaggcgcctccagggagcgtgaactgagaggccccatggcctggtctccctgcggcctggcgcagccctcatcatctcgcccttccctaacccgagcgtgccgcagaaatctcccacgagtctccgggcagcagccagtgcctgctggagtacctcctgagccgcctgcacagcagctccggccacgggaagctcaaggtgctgaagatcctgctctatctgtgcagccacggctcctccttcttcctgctcatcctcaaacgcaactctgccttcatccaggaagctgcagctntgcagggcncccagatctctgacggganagntgtaacnnnaaggtncggcggcgngcangantggggagacacnggcncganacgngttgcgtggnncctccnnactnngggacccngctgcaaaggcanggtccggncaggcgncagnactcaggtncggaacgaagaccggcgcgctgtgggacagccggaggagaggtaggaggatggagagcccagcaacccccaaagacccgaagggagcgccgcacacgagaacacaggacgagcagcagagggaaagggggacaacgagaaaggccaacagcacaggacaa

SEQ ID NO: 285127 - DNA, 4321 bp, Homo sapiens
ggcctggcggaagcggggcagaccgggaggggacctggatcatggctgccgcgccgccgctacgggaccgcctgagctttctacaccgggtgagtgagggcggtccgcccgggccccggtcccacggctcctctcgagcgccgcattccccggactcgccccgggccggagccattgaccttgcgtctccgcgccgggtagctgctcctggccccttcgcccgcgccgacgcccctgagctgcccgcccgccgcgccgtcccggggccttccaagccgggccttccaagccggacccgccgagcgcaagggcgatgggcacagccagaccctgggggaacgaacaggcctcggccagcattcagtggcctccgacgggagggaaggagcggcggacccggtggacgtggagccgctgtgtccgtgctgctggcgcccaggtgggctggcagcccgccgtcctccctgacggtggcgtttcagaggactccggtcctggagaggcacccctgggttgcagagaacacagacgtctcgaagggacagagaaggacgcaccattgtaagcccctcttagtaaaccctctgagaagtagaggccggggcgagttcccaggtgtcgtcctgagcaaactgccctcttttgtcagccctgagctttcctgggctggacctcagagggggctgggtggtcccaggacgcgaccttgggctgccagaagccacgctagggttggtcaaggctctcagtgcaaggtttcgacatagtcgttctgtgctgcgttctgcagttgtcagctgtcacctgcaaacctcagcagctccccttagggcgtggtgggcaaacagtgtcagtgatgcgtgtccacagcctcgggaaacacttcaggtccacgttttcgtatgttgtcactagatctcggcccttccgaccgaaaggcttcggcacctcacgcggtgggtcccatgcttgtcctgttaaatactcttgaactctattctgtcctgatactgaataatgcaagaatgggtggttccagttttcatccctataaaccgtacatctttgtgccagtaagtaagcatgaaacaaataagtacgtctgcgctaagcgaacgtaaaacacacgacatcagtcggttctcggggagcgatggagctagtcacgctgagcggctgtcactctgccattccggcctctggggaggtggaacgattcatagtcccctgtgtggaaaaggggcttgcctgggccttgtttggctttgctagtcagtaggtaggtacaggagaggtaccttcaaatagccttacatgctggtaagtgcagggaggctgggggctgtgtcccttcttaacccaagtggcgcagctcctccgtggagaaccaccattgatttgcctcttctccgaggctgttcatccctgactgttgagagaggaccctgctgcagcctccctgtggccagtagcacagttctcatcccttcccagtcctctctccggccatgtcaacagtgagaggtgggtcgtttccatcccctttggggggctgcggattcacccctgtgggaaatggcacctcatcatggtaggggctcttgttccctttcagctcccgattctcctgaaggggacgtccgatgatgatgtcccgtgtccgggctacctgtttgaagagattgctagtatccttccttgatgtccccgtgtagtggaaagagcggatggcagggtcccagagtggtgcaaagggttcctggggattctgctgtccctagggggatgcacggctcctttattattgtaaccaggcatgggtggggtctgaaggctgcaatactgatgacacaggggaccctagaagcccaggtgctcctgatggcagagcctccagtaggcgcctccagggagcgtgaactgagaggccccatggcctggtctccctgcggcctggcgcagccctcatcatctcgcccttccctaacccgagcgtgccgcagaaatctcccacgagtctccgggcagcagccagtgcctgctggagtacctcctgagccgcctgcacagcagctccggccacgggaagctcaaggtgctgaagatcctgctctatctgtgcagccacggctcctccttcttcctgctcatcctcaaacgcaactctgccttcatccaggaagctgcagcttttgcagggcccccagatcctctgcacgggaacagcttgtaccagaaggttcgcgcggccgcgcaggacttggggagcaccctgttctcggacaccgtgttgccgctggctccctcccagcctctggggaccccgcctgccacaggcatgggctcccaggccaggccgcacagcaccctccagggtttcggctacagcaaggaacacggccgcacgggctcggcaggcgaagccttcctctccaccatccagaaggccgcagaggtggtggccagcgccatgcgccccgggcccgagagtcccagtacccggaggctcctgccgcggggtgacacctaccagcctgccatgatgccttcagccagccacggtcccccaaccctggggaacctactccccggggccattccaggtccccgagctgtgaggcatcagcctgggcaggccggagggggctgggatgagctggacagcggccccagctctcagaattcctcccagaacagcgacctgagcagggtctcggactcgggcagtcattccggcagcgacagccattcaggggccagccgggagccgggtgacctggcagaaagggtcgaggtggtggccctgagtgactgtcagcaggagttgagcttggtgaggactgtgactcggggaccacgcgccttcctgagccgcgaggaggcacagcacttcatcaaagcgtgcaggtgtggactgctcaactgtgaggccgtgctgcagctgctgacctgccacctgcgtgggaccagtgaatgcacgcagctgagggcgctgtgtgccatcgcctccctggggagcagcgacctcctcccccaggagcacatcctcctccgcacccggccgtggctgcaggagctcagcatgggcagcccgggacctgtgaccaacaaggccaccaagatcctgaggcactttgaggcctcctgtgggcagctgtcccctgcccggggcacctcagctgagcctggccccacagccgccctcccaggcccatctgacctgctgaccgacgctgtgcctctccctgggagccaggtcttcctgcagcctctgagttcaaccccggtctcgtcccggagccctgctccctcatctgggatgccgtccagccctgtgcccaccccacccccagatgcctcccccattccagcccccggagaccccagcgaggccgaggccagactggcagaaagcaggcggtggagacctgaacggatcccagggggcacggacagcccaaagagaggccccagcagctgtgtgtggagccgcgactccttgtttgctggcatggagctggtggcctgtccccgcctggtgggggctggggctgctgcgggagagtcctgtcctgatgctccccgcgccccccaaacatcgtcccagaggacagcagccaaagagcctcctggctcagagccgtcagctttcgcgttcctgaacgcctgacccgatggcctggccctggagtcttcagcttcagctgctgtctggggcggtctgtgcttcctgagcagcctcaaccgtagctgctacagtctccaggcagcttgacttgagaggacgaccctagggctacctcagtttcccccatctcctctgccagaggctctggctatttggacttgaatccctacgagggatggcaggtggcagggcttcagaaatgtcgatctcagggctctcagggggcagtccctgcctgtcttgccctcagacatgaggtttcttgtatgaatgcggaagcgactaccaggttccttatttcattttgatctcagctccctccttccccaggaggtcatgagcagcaacaagccactgctcccccgtcccatcggggtgggctaggtgctgaggctgggtttggtgcatgtgggttgagggtgtcttgtccgggctgccttgtgctgtctggcctgaggccatttcaagtctcagatccctacgtgatccttccctggctctcacctgctcctttaggctgtaattgcttcctacacacgaagcctctgattggagcctctggtccatctcagaaaaaccttccaagagcgctggggtttatgctttctgaataaacactactgtttacatgaa

SEQ ID NO: 285128 - DNA, 3915 bp, Homo sapiens
ggcctggcggaagcggggcagaccgggaggggacctggatcatggctgccgcgccgccgctacgggaccgcctgagctttctacaccgggtgagtgagggcggtccgcccgggccccggtcccacggctcctctcgagcgccgcattccccggactcgccccgggccggagccattgaccttgcgtctccgcgccgggtagctgctcctggccccttcgcccgcgccgacgcccctgagctgcccgcccgccgcgccgtcccggggccttccaagccgggccttccaagccggacccgccgagcgcaagggcgatgggcacagccagaccctgggggaacgaacaggcctcggccagcattcagtggcctccgacgggagggaaggagcggcggacccggtggacgtggagccgctgtgtccgtgctgctggcgcccaggtgggctggcagcccgccgtcctccctgacggtggcgtttcagaggactccggtcctggagaggcacccctgggttgcagagaacacagacgtctcgaagggacagagaaggacgcaccattgtaagcccctcttagtaaaccctctgagaagtagaggccggggcgagttcccaggtgtcgtcctgagcaaactgccctcttttgtcagccctgagctttcctgggctggacctcagagggggctgggtggtcccaggacgcgaccttgggctgccagaagccacgctagggttggtcaaggctctcagtgcaaggtttcgacatagtcgttctgtgctgcgttctgcagttgtcagctgtcacctgcaaacctcagcagctccccttagggcgtggtgggcaaacagtgtcagtgatgcgtgtccacagcctcgggaaacacttcaggtccacgttttcgtatgttgtcactagatctcggcccttccgaccgaaaggcttcggcacctcacgcggtgggtcccatgcttgtcctgttaaatactcttgaactctattctgtcctgatactgaataatgcaagaatgggtggttccagttttcatccctataaaccgtacatctttgtgccagtaagtaagcatgaaacaaataagtacgtctgcgctaagcgaacgtaaaacacacgacatcagtcggttctcggggagcgatggagctagtcacgctgagcggctgtcactctgccattccggcctctggggaggtggaacgattcatagtcccctgtgtggaaaaggggcttgcctgggccttgtttggctttgctagtcagtaggtaggtacaggagaggtaccttcaaatagccttacatgctggtaagtgcagggaggctgggggctgtgtcccttcttaacccaagtggcgcagctcctccgtggagaaccaccattgatttgcctcttctccgaggctgttcatccctgactgttgagagaggaccctgctgcagcctccctgtggccagtagcacagttctcatcccttcccagtcctctctccggccatgtcaacagtgagagctcccgattctcctgaaggggacgtccgatgatgatgtcccgtgtccgggctacctgtttgaagagattgctaaaatctcccacgagtctccgggcagcagccagtgcctgctggagtacctcctgagccgcctgcacagcagctccggccacgggaagctcaaggtgctgaagatcctgctctatctgtgcagccacggctcctccttcttcctgctcatcctcaaacgcaactctgccttcatccaggaagctgcagcttttgcagggcccccagatcctctgcacgggaacagcttgtaccagaaggttcgcgcggccgcgcaggacttggggagcaccctgttctcggacaccgtgttgccgctggctccctcccagcctctggggaccccgcctgccacaggcatgggctcccaggccaggccgcacagcaccctccagggtttcggctacagcaaggaacacggccgcacgggctcggcaggcgaagccttcctctccaccatccagaaggccgcagaggtggtggccagcgccatgcgccccgggcccgagagtcccagtacccggaggctcctgccgcggggtgacacctaccagcctgccatgatgccttcagccagccacggtcccccaaccctggggaacctactccccggggccattccaggtccccgagctgtgaggcatcagcctgggcaggccggagggggctgggatgagctggacagcggccccagctctcagaattcctcccagaacagcgacctgagcagggtctcggactcgggcagtcattccggcagcgacagccattcaggggccagccgggagccgggtgacctggcagaaagggtcgaggtggtggccctgagtgactgtcagcaggagttgagcttggtgaggactgtgactcggggaccacgcgccttcctgagccgcgaggaggcacagcacttcatcaaagcgtgcaggtgtggactgctcaactgtgaggccgtgctgcagctgctgacctgccacctgcgtgggaccagtgaatgcacgcagctgagggcgctgtgtgccatcgcctccctggggagcagcgacctcctcccccaggagcacatcctcctccgcacccggccgtggctgcaggagctcagcatgggcagcccgggacctgtgaccaacaaggccaccaagatcctgaggcactttgaggcctcctgtgggcagctgtcccctgcccggggcacctcagctgagcctggccccacagccgccctcccaggcccatctgacctgctgaccgacgctgtgcctctccctgggagccaggtcttcctgcagcctctgagttcaaccccggtctcgtcccggagccctgctccctcatctgggatgccgtccagccctgtgcccaccccacccccagatgcctcccccattccagcccccggagaccccagcgaggccgaggccagactggcagaaagcaggcggtggagacctgaacggatcccagggggcacggacagcccaaagagaggccccagcagctgtgtgtggagccgcgactccttgtttgctggcatggagctggtggcctgtccccgcctggtgggggctggggctgctgcgggagagtcctgtcctgatgctccccgcgccccccaaacatcgtcccagaggacagcagccaaagagcctcctggctcagagccgtcagctttcgcgttcctgaacgcctgacccgatggcctggccctggagtcttcagcttcagctgctgtctggggcggtctgtgcttcctgagcagcctcaaccgtagctgctacagtctccaggcagcttgacttgagaggacgaccctagggctacctcagtttcccccatctcctctgccagaggctctggctatttggacttgaatccctacgagggatggcaggtggcagggcttcagaaatgtcgatctcagggctctcagggggcagtccctgcctgtcttgccctcagacatgaggtttcttgtatgaatgcggaagcgactaccaggttccttatttcattttgatctcagctccctccttccccaggaggtcatgagcagcaacaagccactgctcccccgtcccatcggggtgggctaggtgctgaggctgggtttggtgcatgtgggttgagggtgtcttgtccgggctgccttgtgctgtctggcctgaggccatttcaagtctcagatccctacgtgatccttccctggctctcacctgctcctttaggctgtaattgcttcctacacacgaagcctctgattggagcctctggtccatctcagaaaaaccttccaagagcgctggggtttatgctttctgaataaacactactgtttacatgaa

SEQ ID NO: 285129 - DNA, 4006 bp, Homo sapiens
ggcctggcggaagcggggcagaccgggaggggacctggatcatggctgccgcgccgccgctacgggaccgcctgagctttctacaccgggtgagtgagggcggtccgcccgggccccggtcccacggctcctctcgagcgccgcattccccggactcgccccgggccggagccattgaccttgcgtctccgcgccgggtagctgctcctggccccttcgcccgcgccgacgcccctgagctgcccgcccgccgcgccgtcccggggccttccaagccgggccttccaagccggacccgccgagcgcaagggcgatgggcacagccagaccctgggggaacgaacaggcctcggccagcattcagtggcctccgacgggagggaaggagcggcggacccggtggacgtggagccgctgtgtccgtgctgctggcgcccaggtgggctggcagcccgccgtcctccctgacggtggcgtttcagaggactccggtcctggagaggcacccctgggttgcagagaacacagacgtctcgaagggacagagaaggacgcaccattgtaagcccctcttagtaaaccctctgagaagtagaggccggggcgagttcccaggtgtcgtcctgagcaaactgccctcttttgtcagccctgagctttcctgggctggacctcagagggggctgggtggtcccaggacgcgaccttgggctgccagaagccacgctagggttggtcaaggctctcagtgcaaggtttcgacatagtcgttctgtgctgcgttctgcagttgtcagctgtcacctgcaaacctcagcagctccccttagggcgtggtgggcaaacagtgtcagtgatgcgtgtccacagcctcgggaaacacttcaggtccacgttttcgtatgttgtcactagatctcggcccttccgaccgaaaggcttcggcacctcacgcggtgggtcccatgcttgtcctgttaaatactcttgaactctattctgtcctgatactgaataatgcaagaatgggtggttccagttttcatccctataaaccgtacatctttgtgccagtaagtaagcatgaaacaaataagtacgtctgcgctaagcgaacgtaaaacacacgacatcagtcggttctcggggagcgatggagctagtcacgctgagcggctgtcactctgccattccggcctctggggaggtggaacgattcatagtcccctgtgtggaaaaggggcttgcctgggccttgtttggctttgctagtcagtaggtaggtacaggagaggtaccttcaaatagccttacatgctggtaagtgcagggaggctgggggctgtgtcccttcttaacccaagtggcgcagctcctccgtggagaaccaccattgatttgcctcttctccgaggctgttcatccctgactgttgagagaggaccctgctgcagcctccctgtggccagtagcacagttctcatcccttcccagtcctctctccggccatgtcaacagtgagaggtgggtcgtttccatcccctttggggggctgcggattcacccctgtgggaaatggcacctcatcatggtaggggctcttgttccctttcagctcccgattctcctgaaggggacgtccgatgatgatgtcccgtgtccgggctacctgtttgaagagattgctaaaatctcccacgagtctccgggcagcagccagtgcctgctggagtacctcctgagccgcctgcacagcagctccggccacgggaagctcaaggtgctgaagatcctgctctatctgtgcagccacggctcctccttcttcctgctcatcctcaaacgcaactctgccttcatccaggaagctgcagcttttgcagggcccccagatcctctgcacgggaacagcttgtaccagaaggttcgcgcggccgcgcaggacttggggagcaccctgttctcggacaccgtgttgccgctggctccctcccagcctctggggaccccgcctgccacaggcatgggctcccaggccaggccgcacagcaccctccagggtttcggctacagcaaggaacacggccgcacgggctcggcaggcgaagccttcctctccaccatccagaaggccgcagaggtggtggccagcgccatgcgccccgggcccgagagtcccagtacccggaggctcctgccgcggggtgacacctaccagcctgccatgatgccttcagccagccacggtcccccaaccctggggaacctactccccggggccattccaggtccccgagctgtgaggcatcagcctgggcaggccggagggggctgggatgagctggacagcggccccagctctcagaattcctcccagaacagcgacctgagcagggtctcggactcgggcagtcattccggcagcgacagccattcaggggccagccgggagccgggtgacctggcagaaagggtcgaggtggtggccctgagtgactgtcagcaggagttgagcttggtgaggactgtgactcggggaccacgcgccttcctgagccgcgaggaggcacagcacttcatcaaagcgtgcaggtgtggactgctcaactgtgaggccgtgctgcagctgctgacctgccacctgcgtgggaccagtgaatgcacgcagctgagggcgctgtgtgccatcgcctccctggggagcagcgacctcctcccccaggagcacatcctcctccgcacccggccgtggctgcaggagctcagcatgggcagcccgggacctgtgaccaacaaggccaccaagatcctgaggcactttgaggcctcctgtgggcagctgtcccctgcccggggcacctcagctgagcctggccccacagccgccctcccaggcccatctgacctgctgaccgacgctgtgcctctccctgggagccaggtcttcctgcagcctctgagttcaaccccggtctcgtcccggagccctgctccctcatctgggatgccgtccagccctgtgcccaccccacccccagatgcctcccccattccagcccccggagaccccagcgaggccgaggccagactggcagaaagcaggcggtggagacctgaacggatcccagggggcacggacagcccaaagagaggccccagcagctgtgtgtggagccgcgactccttgtttgctggcatggagctggtggcctgtccccgcctggtgggggctggggctgctgcgggagagtcctgtcctgatgctccccgcgccccccaaacatcgtcccagaggacagcagccaaagagcctcctggctcagagccgtcagctttcgcgttcctgaacgcctgacccgatggcctggccctggagtcttcagcttcagctgctgtctggggcggtctgtgcttcctgagcagcctcaaccgtagctgctacagtctccaggcagcttgacttgagaggacgaccctagggctacctcagtttcccccatctcctctgccagaggctctggctatttggacttgaatccctacgagggatggcaggtggcagggcttcagaaatgtcgatctcagggctctcagggggcagtccctgcctgtcttgccctcagacatgaggtttcttgtatgaatgcggaagcgactaccaggttccttatttcattttgatctcagctccctccttccccaggaggtcatgagcagcaacaagccactgctcccccgtcccatcggggtgggctaggtgctgaggctgggtttggtgcatgtgggttgagggtgtcttgtccgggctgccttgtgctgtctggcctgaggccatttcaagtctcagatccctacgtgatccttccctggctctcacctgctcctttaggctgtaattgcttcctacacacgaagcctctgattggagcctctggtccatctcagaaaaaccttccaagagcgctggggtttatgctttctgaataaacactactgtttacatgaa

SEQ ID NO: 285130 - DNA, 3457 bp, Homo sapiens
gtgactctacaggatcctcccgctctcacccaccccgtatgttgtcactagatctcggcccttccgaccgaaaggcttcggcacctcacgcggtgggtcccatgcttgtcctgttaaatactcttgaactctattctgtcctgatactgaataatgcaagaatgggtggttccagttttcatccctataaaccgtacatctttgtgccagtaagtaagcatgaaacaaataagtacgtctgcgctaagcgaacgtaaaacacacgacatcagtcggttctcggggagcgatggagctagtcacgctgagcggctgtcactctgccattccggcctctggggaggtggaacgattcatagtcccctgtgtggaaaaggggcttgcctgggccttgtttggctttgctagtcagtaggtaggtacaggagaggtaccttcaaatagccttacatgctggtaagtgcagggaggctgggggctgtgtcccttcttaacccaagtggcgcagctcctccgtggagaaccaccattgatttgcctcttctccgaggctgttcatccctgactgttgagagaggaccctgctgcagcctccctgtggccagtagcacagttctcatcccttcccagtcctctctccggccatgtcaacagtgagaggtgggtcgtttccatcccctttggggggctgcggattcacccctgtgggaaatggcacctcatcatggtaggggctcttgttccctttcagctcccgattctcctgaaggggacgtccgatgatgatgtcccgtgtccgggctacctgtttgaagagattgctagtatccttccttgatgtccccgtgtagtggaaagagcggatggcagggtcccagagtggtgcaaagggttcctggggattctgctgtccctagggggatgcacggctcctttattattgtaaccaggcatgggtggggtctgaaggctgcaatactgatgacacaggggaccctagaagcccaggtgctcctgatggcagagcctccagtaggcgcctccagggagcgtgaactgagaggccccatggcctggtctccctgcggcctggcgcagccctcatcatctcgcccttccctaacccgagcgtgccgcagaaatctcccacgagtctccgggcagcagccagtgcctgctggagtacctcctgagccgcctgcacagcagctccggccacgggaagctcaaggtgctgaagatcctgctctatctgtgcagccacggctcctccttcttcctgctcatcctcaaacgcaactctgccttcatccaggaagctgcagcttttgcagggcccccagatcctctgcacgggaacagcttgtaccagaaggttcgcgcggccgcgcaggacttggggagcaccctgttctcggacaccgtgttgccgctggctccctcccagcctctggggaccccgcctgccacaggcatgggctcccaggccaggccgcacagcaccctccagggtttcggctacagcaaggaacacggccgcacgggctcggcaggcgaagccttcctctccaccatccagaaggccgcagaggtggtggccagcgccatgcgccccgggcccgagagtcccagtacccggaggctcctgccgcggggtgacacctaccagcctgccatgatgccttcagccagccacggtcccccaaccctggggaacctactccccggggccattccaggtccccgagctgtgaggcatcagcctgggcaggccggagggggctgggatgagctggacagcggccccagctctcagaattcctcccagaacagcgacctgagcagggtctcggactcgggcagtcattccggcagcgacagccattcaggggccagccgggagccgggtgacctggcagaaagggtcgaggtggtggccctgagtgactgtcagcaggagttgagcttggtgaggactgtgactcggggaccacgcgccttcctgagccgcgaggaggcacagcacttcatcaaagcgtgcaggtgtggactgctcaactgtgaggccgtgctgcagctgctgacctgccacctgcgtgggaccagtgaatgcacgcagctgagggcgctgtgtgccatcgcctccctggggagcagcgacctcctcccccaggagcacatcctcctccgcacccggccgtggctgcaggagctcagcatgggcagcccgggacctgtgaccaacaaggccaccaagatcctgaggcactttgaggcctcctgtgggcagctgtcccctgcccggggcacctcagctgagcctggccccacagccgccctcccaggcccatctgacctgctgaccgacgctgtgcctctccctgggagccaggtcttcctgcagcctctgagttcaaccccggtctcgtcccggagccctgctccctcatctgggatgccgtccagccctgtgcccaccccacccccagatgcctcccccattccagcccccggagaccccagcgaggccgaggccagactggcagaaagcaggcggtggagacctgaacggatcccagggggcacggacagcccaaagagaggccccagcagctgtgtgtggagccgcgactccttgtttgctggcatggagctggtggcctgtccccgcctggtgggggctggggctgctgcgggagagtcctgtcctgatgctccccgcgccccccaaacatcgtcccagaggacagcagccaaagagcctcctggctcagagccgtcagctttcgcgttcctgaacgcctgacccgatggcctggccctggagtcttcagcttcagctgctgtctggggcggtctgtgcttcctgagcagcctcaaccgtagctgctacagtctccaggcagcttgacttgagaggacgaccctagggctacctcagtttcccccatctcctctgccagaggctctggctatttggacttgaatccctacgagggatggcaggtggcagggcttcagaaatgtcgatctcagggctctcagggggcagtccctgcctgtcttgccctcagacatgaggtttcttgtatgaatgcggaagcgactaccaggttccttatttcattttgatctcagctccctccttccccaggaggtcatgagcagcaacaagccactgctcccccgtcccatcggggtgggctaggtgctgaggctgggtttggtgcatgtgggttgagggtgtcttgtccgggctgccttgtgctgtctggcctgaggccatttcaagtctcagatccctacgtgatccttccctggctctcacctgctcctttaggctgtaattgcttcctacacacgaagcctctgattggagcctctggtccatctcagaaaaaccttccaagagcgctggggtttatgctttctgaataaacactactgtttacatgaa

SEQ ID NO: 285131 - DNA, 3069 bp, Homo sapiens
cagtactcctaacggtttaaggtagcgaggctgggtggcgcctggatcatggctgccgcgccgccgctacgggaccgcctgagctttctacaccgggtgagtgagggcggtccgcccgggccccggtcccacggctcctctcgagcgccgcattccccggactcgccccgggccggagccattgaccttgcgtctccgcgccgggtagctgctcctggccccttcgcccgcgccgacgcccctgagctgcccgcccgccgcgccgtcccggggccttccaagccgggccttccaagccggacccgccgagcgcaagggcgatgggcacagccagaccctgggggaacgaacaggcctcggccagcattcagtggcctccgacgggagggaaggagcggcggacccggtggacgtggagccgctgtgtccgtgctgctggcgcccaggtgggctggcagcccgccgtcctccctgacggtggcgtttcagaggactccggtcctggagaggcacccctgggttgcagagaacacagacgtctcgaagggacagagaaggacgcaccattgctgttcatccctgactgttgagagaggaccctgctgcagcctccctgtggccagtagcacagttctcatcccttcccagtcctctctccggccatgtcaacagtgagagctcccgattctcctgaaggggacgtccgatgatgatgtcccgtgtccgggctacctgtttgaagagattgctaaaatctcccacgagtctccgggcagcagccagtgcctgctggagtacctcctgagccgcctgcacagcagctccggccacgggaagctcaaggtgctgaagatcctgctctatctgtgcagccacggctcctccttcttcctgctcatcctcaaacgcaactctgccttcatccaggaagctgcagcttttgcagggcccccagatcctctgcacgggaacagcttgtaccagaaggttcgcgcggccgcgcaggacttggggagcaccctgttctcggacaccgtgttgccgctggctccctcccagcctctggggaccccgcctgccacaggcatgggctcccaggccaggccgcacagcaccctccagggtttcggctacagcaaggaacacggccgcacgggctcggcaggcgaagccttcctctccaccatccagaaggccgcagaggtggtggccagcgccatgcgccccgggcccgagagtcccagtacccggaggctcctgccgcggggtgacacctaccagcctgccatgatgccttcagccagccacggtcccccaaccctggggaacctactccccggggccattccaggtccccgagctgtgaggcatcagcctgggcaggccggagggggctgggatgagctggacagcggccccagctctcagaattcctcccagaacagcgacctgagcagggtctcggactcgggcagtcattccggcagcgacagccattcaggggccagccgggagccgggtgacctggcagaaagggtcgaggtggtggccctgagtgactgtcagcaggagttgagcttggtgaggactgtgactcggggaccacgcgccttcctgagccgcgaggaggcacagcacttcatcaaagcgtgcaggtgtggactgctcaactgtgaggccgtgctgcagctgctgacctgccacctgcgtgggaccagtgaatgcacgcagctgagggcgctgtgtgccatcgcctccctggggagcagcgacctcctcccccaggagcacatcctcctccgcacccggccgtggctgcaggagctcagcatgggcagcccgggacctgtgaccaacaaggccaccaagatcctgaggcactttgaggcctcctgtgggcagctgtcccctgcccggggcacctcagctgagcctggccccacagccgccctcccaggcccatctgacctgctgaccgacgctgtgcctctccctgggagccaggtcttcctgcagcctctgagttcaaccccggtctcgtcccggagccctgctccctcatctgggatgccgtccagccctgtgcccaccccacccccagatgcctcccccattccagcccccggagaccccagcgaggccgaggccagactggcagaaagcaggcggtggagacctgaacggatcccagggggcacggacagcccaaagagaggccccagcagctgtgtgtggagccgcgactccttgtttgctggcatggagctggtggcctgtccccgcctggtgggggctggggctgctgcgggagagtcctgtcctgatgctccccgcgccccccaaacatcgtcccagaggacagcagccaaagagcctcctggctcagagccgtcagctttcgcgttcctgaacgcctgacccgatggcctggccctggagtcttcagcttcagctgctgtctggggcggtctgtgcttcctgagcagcctcaaccgtagctgctacagtctccaggcagcttgacttgagaggacgaccctagggctacctcagtttcccccatctcctctgccagaggctctggctatttggacttgaatccctacgagggatggcaggtggcagggcttcagaaatgtcgatctcagggctctcagggggcagtccctgcctgtcttgccctcagacatgaggtttcttgtatgaatgcggaagcgactaccaggttccttatttcattttgatctcagctccctccttccccaggaggtcatgagcagcaacaagccactgctcccccgtcccatcggggtgggctaggtgctgaggctgggtttggtgcatgtgggttgagggtgtcttgtccgggctgccttgtgctgtctggcctgaggccatttcaagtctcagatccctacgtgatccttccctggctctcacctgctcctttaggctgtaattgcttcctacacacgaagcctctgattggagcctctggtccatctcagaaaaaccttccaagagcgctggggtttatgctttctgaataaacactactgtttacatgaa

SEQ ID NO: 285132 - DNA, 2531 bp, Homo sapiens
ggtggggctaggtggagctttcaggctgtgataagaacgctggtttctccctccaggccccggaagcctctgaggggtccctggtgcacctggggcagggagagtgggcttcggggaggccacacccgctcaggcaccaggggttgccgaccctgggggagacgaggtggttgctgtggagagagtctcgcctctgtggggcatgggtgagggggagctgagggtctgctcaggtgtggcctctgcagggtcctggaggagggcatcccattggctgtgacagaagggccttggtggcaggaacttgccaccctggagtgggcccagggcaccgtgctccacagggagcagcggtgccaggctcagccctgcccccgacttgccttttctgttctgcagcttttgcagggcccccagatcctctgcacgggaacagcttgtaccagaaggttcgcgcggccgcgcaggacttggggagcaccctgttctcggacaccgtgttgccgctggctccctcccagcctctggggaccccgcctgccacaggcatgggctcccaggccaggccgcacagcaccctccagggtttcggctacagcaaggaacacggccgcacgggctcggcaggcgaagccttcctctccaccatccagaaggccgcagaggtggtggccagcgccatgcgccccgggcccgagagtcccagtacccggaggctcctgccgcggggtgacacctaccagcctgccatgatgccttcagccagccacggtcccccaaccctggggaacctactccccggggccattccaggtccccgagctgtgaggcatcagcctgggcaggccggagggggctgggatgagctggacagcggccccagctctcagaattcctcccagaacagcgacctgagcagggtctcggactcgggcagtcattccggcagcgacagccattcaggggccagccgggagccgggtgacctggcagaaagggtcgaggtggtggccctgagtgactgtcagcaggagttgagcttggtgaggactgtgactcggggaccacgcgccttcctgagccgcgaggaggcacagcacttcatcaaagcgtgcaggtgtggactgctcaactgtgaggccgtgctgcagctgctgacctgccacctgcgtgggaccagtgaatgcacgcagctgagggcgctgtgtgccatcgcctccctggggagcagcgacctcctcccccaggagcacatcctcctccgcacccggccgtggctgcaggagctcagcatgggcagcccgggacctgtgaccaacaaggccaccaagatcctgaggcactttgaggcctcctgtgggcagctgtcccctgcccggggcacctcagctgagcctggccccacagccgccctcccaggcccatctgacctgctgaccgacgctgtgcctctccctgggagccaggtcttcctgcagcctctgagttcaaccccggtctcgtcccggagccctgctccctcatctgggatgccgtccagccctgtgcccaccccacccccagatgcctcccccattccagcccccggagaccccagcgaggccgaggccagactggcagaaagcaggcggtggagacctgaacggatcccagggggcacggacagcccaaagagaggccccagcagctgtgtgtggagccgcgactccttgtttgctggcatggagctggtggcctgtccccgcctggtgggggctggggctgctgcgggagagtcctgtcctgatgctccccgcgccccccaaacatcgtcccagaggacagcagccaaagagcctcctggctcagagccgtcagctttcgcgttcctgaacgcctgacccgatggcctggccctggagtcttcagcttcagctgctgtctggggcggtctgtgcttcctgagcagcctcaaccgtagctgctacagtctccaggcagcttgacttgagaggacgaccctagggctacctcagtttcccccatctcctctgccagaggctctggctatttggacttgaatccctacgagggatggcaggtggcagggcttcagaaatgtcgatctcagggctctcagggggcagtccctgcctgtcttgccctcagacatgaggtttcttgtatgaatgcggaagcgactaccaggttccttatttcattttgatctcagctccctccttccccaggaggtcatgagcagcaacaagccactgctcccccgtcccatcggggtgggctaggtgctgaggctgggtttggtgcatgtgggttgagggtgtcttgtccgggctgccttgtgctgtctggcctgaggccatttcaagtctcagatccctacgtgatccttccctggctctcacctgctcctttaggctgtaattgcttcctacacacgaagcctctgattggagcctctggtccatctcagaaaaaccttccaagagcgctggggtttatgctttctgaataaacactactgtttacatgaa

SEQ ID NO: 285133 - DNA, 2283 bp, Homo sapiens
cagtactcctaacggtttaaggtagcgaggctgggtggcgcctggatcatggctgccgcgccgccgctacgggaccgcctgagctttctacaccggctcccgattctcctgaaggggacgtccgatgatgatgtcccgtgtccgggctacctgtttgaagagattgctaaaatctcccacgagtctccgggcagcagccagtgcctgctggagtacctcctgagccgcctgcacagcagctccggccacgggaagctcaaggtgctgaagatcctgctctatctgtgcagccacggctcctccttcttcctgctcatcctcaaacgcaactctgccttcatccaggaagctgcagcttttgcagggcccccagatcctctgcacgggaacagcttgtaccagaaggttcgcgcggccgcgcaggacttggggagcaccctgttctcggacaccgtgttgccgctggctccctcccagcctctggggaccccgcctgccacaggcatgggctcccaggccaggccgcacagcaccctccagggtttcggctacagcaaggaacacggccgcacggctgtgaggcatcagcctgggcaggccggagggggctgggatgagctggacagcggccccagctctcagaattcctcccagaacagcgacctgagcagggtctcggactcgggcagtcattccggcagcgacagccattcaggggccagccgggagccgggtgacctggcagaaagggtcgaggtggtggccctgagtgactgtcagcaggagttgagcttggtgaggactgtgactcggggaccacgcgccttcctgagccgcgaggaggcacagcacttcatcaaagcgtgcaggtgtggactgctcaactgtgaggccgtgctgcagctgctgacctgccacctgcgtgggaccagtgaatgcacgcagctgagggcgctgtgtgccatcgcctccctggggagcagcgacctcctcccccaggagcacatcctcctccgcacccggccgtggctgcaggagctcagcatgggcagcccgggacctgtgaccaacaaggccaccaagatcctgaggcactttgaggcctcctgtgggcagctgtcccctgcccggggcacctcagctgagcctggccccacagccgccctcccaggcccatctgacctgctgaccgacgctgtgcctctccctgggagccaggtcttcctgcagcctctgagttcaaccccggtctcgtcccggagccctgctccctcatctgggatgccgtccagccctgtgcccaccccacccccagatgcctcccccattccagcccccggagaccccagcgaggccgaggccagactggcagaaagcaggcggtggagacctgaacggatcccagggggcacggacagcccaaagagaggccccagcagctgtgtgtggagccgcgactccttgtttgctggcatggagctggtggcctgtccccgcctggtgggggctggggctgctgcgggagagtcctgtcctgatgctccccgcgccccccaaacatcgtcccagaggacagcagccaaagagcctcctggctcagagccgtcagctttcgcgttcctgaacgcctgacccgatggcctggccctggagtcttcagcttcagctgctgtctggggcggtctgtgcttcctgagcagcctcaaccgtagctgctacagtctccaggcagcttgacttgagaggacgaccctagggctacctcagtttcccccatctcctctgccagaggctctggctatttggacttgaatccctacgagggatggcaggtggcagggcttcagaaatgtcgatctcagggctctcagggggcagtccctgcctgtcttgccctcagacatgaggtttcttgtatgaatgcggaagcgactaccaggttccttatttcattttgatctcagctccctccttccccaggaggtcatgagcagcaacaagccactgctcccccgtcccatcggggtgggctaggtgctgaggctgggtttggtgcatgtgggttgagggtgtcttgtccgggctgccttgtgctgtctggcctgaggccatttcaagtctcagatccctacgtgatccttccctggctctcacctgctcctttaggctgtaattgcttcctacacacgaagcctctgattggagcctctggtccatctcagaaaaaccttccaagagcgctggggtttatgctttctgaataaacactactgtttacatgaa

SEQ ID NO: 285134 - DNA, 1794 bp, Homo sapiens
ggcctggcggaagcggggcagaccgggaggggacctggatcatggctgccgcgccgccgctacgggaccgcctgagctttctacaccgggtgagtgagggcggtccgcccgggccccggtcccacggctcctctcgagcgccgcattccccggactcgccccgggccggagccattgaccttgcgtctccgcgccgggtagctgctcctggccccttcgcccgcgccgacgcccctgagctgcccgcccgccgcgccgtcccggggccttccaagccgggccttccaagccggacccgccgagcgcaagggcgatgggcacagccagaccctgggggaacgaacaggcctcggccagcattcagtggcctccgacgggagggaaggagcggcggacccggtggacgtggagccgctgtgtccgtgctgctggcgcccaggtgggctggcagcccgccgtcctccctgacggtggcgtttcagaggactccggtcctggagaggcacccctgggttgcagagaacacagacgtctcgaagggacagagaaggacgcaccattgtaagcccctcttagtaaaccctctgagaagtagaggccggggcgagttcccaggtgtcgtcctgagcaaactgccctcttttgtcagccctgagctttcctgggctggacctcagagggggctgggtggtcccaggacgcgaccttgggctgccagaagccacgctagggttggtcaaggctctcagtgcaaggtttcgacatagtcgttctgtgctgcgttctgcagttgtcagctgtcacctgcaaacctcagcagctccccttagggcgtggtgggcaaacagtgtcagtgatgcgtgtccacagcctcgggaaacacttcaggtccacgttttcgtatgttgtcactagatctcggcccttccgaccgaaaggcttcggcacctcacgcggtgggtcccatgcttgtcctgttaaatactcttgaactctattctgtcctgatactgaataatgcaagaatgggtggttccagttttcatccctataaaccgtacatctttgtgccagtaagtaagcatgaaacaaataagtacgtctgcgctaagcgaacgtaaaacacacgacatcagtcggttctcggggagcgatggagctagtcacgctgagcggctgtcactctgccattccggcctctggggaggtggaacgattcatagtcccctgtgtggaaaaggggcttgcctgggccttgtttggctttgctagtcagtaggtaggtacaggagaggtaccttcaaatagccttacatgctggtaagtgcagggaggctgggggctgtgtcccttcttaacccaagtggcgcagctcctccgtggagaaccaccattgatttgcctcttctccgaggctgttcatccctgactgttgagagaggaccctgctgcagcctccctgtggccagtagcacagttctcatcccttcccagtcctctctccggccatgtcaacagtgagaggtgggtcgtttccatcccctttggggggctgcggattcacccctgtgggaaatggcacctcatcatggtaggggctcttgttccctttcagctcccgattctcctgaaggggacgtccgatgatgatgtcccgtgtccgggctacctgtttgaagagattgctaaaatctcccacgagtctccgggcagcagccagtgcctgctggagtacctcctgagccgtggctgcacagatagagcaggatcttcagcaccttgagcttccgtcga

SEQ ID NO: 285135 - DNA, 2957 bp, Homo sapiens
cagtactcctaacggtttaaggtagcgaggctgggtggcgcctggatcatggctgccgcgccgccgctacgggaccgcctgagctttctacaccggctgctcctggccccttcgcccgcgccgacgcccctgagctgcccgcccgccgcgccgtcccggggccttccaagccgggccttccaagccggacccgccgagcgcaagggcgatgggcacagccagaccctgggggaacgaacaggcctcggccagcattcagtggcctccgacgggagggaaggagcggcggacccggtggacgtggagccgctgtgtccgtgctgctggcgcccaggtgggctggcagcccgccgtcctccctgacggtggcgtttcagaggactccggtcctggagaggcacccctgggttgcagagaacacagacgtctcgaagggacagagaaggacgcaccattgctgttcatccctgactgttgagagaggaccctgctgcagcctccctgtggccagtagcacagttctcatcccttcccagtcctctctccggccatgtcaacagtgagagctcccgattctcctgaaggggacgtccgatgatgatgtcccgtgtccgggctacctgtttgaagagattgctaaaatctcccacgagtctccgggcagcagccagtgcctgctggagtacctcctgagccgcctgcacagcagctccggccacgggaagctcaaggtgctgaagatcctgctctatctgtgcagccacggctcctccttcttcctgctcatcctcaaacgcaactctgccttcatccaggaagctgcagcttttgcagggcccccagatcctctgcacgggaacagcttgtaccagaaggttcgcgcggccgcgcaggacttggggagcaccctgttctcggacaccgtgttgccgctggctccctcccagcctctggggaccccgcctgccacaggcatgggctcccaggccaggccgcacagcaccctccagggtttcggctacagcaaggaacacggccgcacgggctcggcaggcgaagccttcctctccaccatccagaaggccgcagaggtggtggccagcgccatgcgccccgggcccgagagtcccagtacccggaggctcctgccgcggggtgacacctaccagcctgccatgatgccttcagccagccacggtcccccaaccctggggaacctactccccggggccattccaggtccccgagctgtgaggcatcagcctgggcaggccggagggggctgggatgagctggacagcggccccagctctcagaattcctcccagaacagcgacctgagcagggtctcggactcgggcagtcattccggcagcgacagccattcaggggccagccgggagccgggtgacctggcagaaagggtcgaggtggtggccctgagtgactgtcagcaggagttgagcttggtgaggactgtgactcggggaccacgcgccttcctgagccgcgaggaggcacagcacttcatcaaagcgtgcaggtgtggactgctcaactgtgaggccgtgctgcagctgctgacctgccacctgcgtgggaccagtgaatgcacgcagctgagggcgctgtgtgccatcgcctccctggggagcagcgacctcctcccccaggagcacatcctcctccgcacccggccgtggctgcaggagctcagcatgggcagcccgggacctgtgaccaacaaggccaccaagatcctgaggcactttgaggcctcctgtgggcagctgtcccctgcccggggcacctcagctgagcctggccccacagccgccctcccaggcccatctgacctgctgaccgacgctgtgcctctccctgggagccaggtcttcctgcagcctctgagttcaaccccggtctcgtcccggagccctgctccctcatctgggatgccgtccagccctgtgcccaccccacccccagatgcctcccccattccagcccccggagaccccagcgaggccgaggccagactggcagaaagcaggcggtggagacctgaacggatcccagggggcacggacagcccaaagagaggccccagcagctgtgtgtggagccgcgactccttgtttgctggcatggagctggtggcctgtccccgcctggtgggggctggggctgctgcgggagagtcctgtcctgatgctccccgcgccccccaaacatcgtcccagaggacagcagccaaagagcctcctggctcagagccgtcagctttcgcgttcctgaacgcctgacccgatggcctggccctggagtcttcagcttcagctgctgtctggggcggtctgtgcttcctgagcagcctcaaccgtagctgctacagtctccaggcagcttgacttgagaggacgaccctagggctacctcagtttcccccatctcctctgccagaggctctggctatttggacttgaatccctacgagggatggcaggtggcagggcttcagaaatgtcgatctcagggctctcagggggcagtccctgcctgtcttgccctcagacatgaggtttcttgtatgaatgcggaagcgactaccaggttccttatttcattttgatctcagctccctccttccccaggaggtcatgagcagcaacaagccactgctcccccgtcccatcggggtgggctaggtgctgaggctgggtttggtgcatgtgggttgagggtgtcttgtccgggctgccttgtgctgtctggcctgaggccatttcaagtctcagatccctacgtgatccttccctggctctcacctgctcctttaggctgtaattgcttcctacacacgaagcctctgattggagcctctggtccatctcagaaaaaccttccaagagcgctggggtttatgctttctgaataaacactactgtttacatgaa

SEQ ID NO: 285136 - DNA, 2959 bp, Homo sapiens
cagtactcctaacggtttaaggtagcgaggctgggtggcgcctggatcatggctgccgcgccgccgctacgggaccgcctgagctttctacaccgggtgagtgagggcggtccgcccgggccccggtcccacggctcctctcgagcgccgcattccccggactcgccccgggccggagccattgaccttgcgtctccgcgccgggtagctgctcctggccccttcgcccgcgccgacgcccctgagctgcccgcccgccgcgccgtcccggggccttccaagccgggccttccaagccggacccgccgagcgcaagggcgatgggcacagccagaccctgggggaacgaacaggcctcggccagcattcagtggcctccgacgggagggaaggagcggcggacccggtggacgtggagccgctgtgtccgtgctgctggcgcccaggtgggctggcagcccgccgtcctccctgacggtggcgtttcagaggactccggtcctggagaggcacccctgggttgcagagaacacagacgtctcgaagggacagagaaggacgcaccattctcccgattctcctgaaggggacgtccgatgatgatgtcccgtgtccgggctacctgtttgaagagattgctaaaatctcccacgagtctccgggcagcagccagtgcctgctggagtacctcctgagccgcctgcacagcagctccggccacgggaagctcaaggtgctgaagatcctgctctatctgtgcagccacggctcctccttcttcctgctcatcctcaaacgcaactctgccttcatccaggaagctgcagcttttgcagggcccccagatcctctgcacgggaacagcttgtaccagaaggttcgcgcggccgcgcaggacttggggagcaccctgttctcggacaccgtgttgccgctggctccctcccagcctctggggaccccgcctgccacaggcatgggctcccaggccaggccgcacagcaccctccagggtttcggctacagcaaggaacacggccgcacgggctcggcaggcgaagccttcctctccaccatccagaaggccgcagaggtggtggccagcgccatgcgccccgggcccgagagtcccagtacccggaggctcctgccgcggggtgacacctaccagcctgccatgatgccttcagccagccacggtcccccaaccctggggaacctactccccggggccattccaggtccccgagctgtgaggcatcagcctgggcaggccggagggggctgggatgagctggacagcggccccagctctcagaattcctcccagaacagcgacctgagcagggtctcggactcgggcagtcattccggcagcgacagccattcaggggccagccgggagccgggtgacctggcagaaagggtcgaggtggtggccctgagtgactgtcagcaggagttgagcttggtgaggactgtgactcggggaccacgcgccttcctgagccgcgaggaggcacagcacttcatcaaagcgtgcaggtgtggactgctcaactgtgaggccgtgctgcagctgctgacctgccacctgcgtgggaccagtgaatgcacgcagctgagggcgctgtgtgccatcgcctccctggggagcagcgacctcctcccccaggagcacatcctcctccgcacccggccgtggctgcaggagctcagcatgggcagcccgggacctgtgaccaacaaggccaccaagatcctgaggcactttgaggcctcctgtgggcagctgtcccctgcccggggcacctcagctgagcctggccccacagccgccctcccaggcccatctgacctgctgaccgacgctgtgcctctccctgggagccaggtcttcctgcagcctctgagttcaaccccggtctcgtcccggagccctgctccctcatctgggatgccgtccagccctgtgcccaccccacccccagatgcctcccccattccagcccccggagaccccagcgaggccgaggccagactggcagaaagcaggcggtggagacctgaacggatcccagggggcacggacagcccaaagagaggccccagcagctgtgtgtggagccgcgactccttgtttgctggcatggagctggtggcctgtccccgcctggtgggggctggggctgctgcgggagagtcctgtcctgatgctccccgcgccccccaaacatcgtcccagaggacagcagccaaagagcctcctggctcagagccgtcagctttcgcgttcctgaacgcctgacccgatggcctggccctggagtcttcagcttcagctgctgtctggggcggtctgtgcttcctgagcagcctcaaccgtagctgctacagtctccaggcagcttgacttgagaggacgaccctagggctacctcagtttcccccatctcctctgccagaggctctggctatttggacttgaatccctacgagggatggcaggtggcagggcttcagaaatgtcgatctcagggctctcagggggcagtccctgcctgtcttgccctcagacatgaggtttcttgtatgaatgcggaagcgactaccaggttccttatttcattttgatctcagctccctccttccccaggaggtcatgagcagcaacaagccactgctcccccgtcccatcggggtgggctaggtgctgaggctgggtttggtgcatgtgggttgagggtgtcttgtccgggctgccttgtgctgtctggcctgaggccatttcaagtctcagatccctacgtgatccttccctggctctcacctgctcctttaggctgtaattgcttcctacacacgaagcctctgattggagcctctggtccatctcagaaaaaccttccaagagcgctggggtttatgctttctgaataaacactactgtttacatgaa

SEQ ID NO: 285137 - DNA, 2101 bp, Homo sapiens
ggcctggcggaagcggggcagaccgggaggggacctggatcatggctgccgcgccgccgctacgggaccgcctgagctttctacaccgggtgagtgagggcggtccgcccgggccccggtcccacggctcctctcgagcgccgcattccccggactcgccccgggccggagccattgaccttgcgtctccgcgccgggtagctgctcctggccccttcgcccgcgccgacgcccctgagctgcccgcccgccgcgccgtcccggggccttccaagccgggccttccaagccggacccgccgagcgcaagggcgatgggcacagccagaccctgggggaacgaacaggcctcggccagcattcagtggcctccgacgggagggaaggagcggcggacccggtggacgtggagccgctgtgtccgtgctgctggcgcccaggtgggctggcagcccgccgtcctccctgacggtggcgtttcagaggactccggtcctggagaggcacccctgggttgcagagaacacagacgtctcgaagggacagagaaggacgcaccattgtaagcccctcttagtaaaccctctgagaagtagaggccggggcgagttcccaggtgtcgtcctgagcaaactgccctcttttgtcagccctgagctttcctgggctggacctcagagggggctgggtggtcccaggacgcgaccttgggctgccagaagccacgctagggttggtcaaggctctcagtgcaaggtttcgacatagtcgttctgtgctgcgttctgcagttgtcagctgtcacctgcaaacctcagcagctccccttagggcgtggtgggcaaacagtgtcagtgatgcgtgtccacagcctcgggaaacacttcaggtccacgttttcgtatgttgtcactagatctcggcccttccgaccgaaaggcttcggcacctcacgcggtgggtcccatgcttgtcctgttaaatactcttgaactctattctgtcctgatactgaataatgcaagaatgggtggttccagttttcatccctataaaccgtacatctttgtgccagtaagtaagcatgaaacaaataagtacgtctgcgctaagcgaacgtaaaacacacgacatcagtcggttctcggggagcgatggagctagtcacgctgagcggctgtcactctgccattccggcctctggggaggtggaacgattcatagtcccctgtgtggaaaaggggcttgcctgggccttgtttggctttgctagtcagtaggtaggtacaggagaggtaccttcaaatagccttacatgctggtaagtgcagggaggctgggggctgtgtcccttcttaacccaagtggcgcagctcctccgtggagaaccaccattgatttgcctcttctccgaggctgttcatccctgactgttgagagaggaccctgctgcagcctccctgtggccagtagcacagttctcatcccttcccagtcctctctccggccatgtcaacagtgagaggtgggtcgtttccatcccctttggggggctgcggattcacccctgtgggaaatggcacctcatcatggtaggggctcttgttccctttcagctcccgattctcctgaaggggacgtccgatgatgatgtcccgtgtccgggctacctgtttgaagagattgctaaaatctcccacgagtctccgggcagcagccagtgcctgctggagtacctcctgagccgcctgcacagcagctccggccacgggaagctcaaggtgagcccctgggtggtcaagggtcaggcctgaggcccggcccacggtggtgaggatggaggagcagacgagcggcccagggtggcaggcagctctgtgcccttggggtgcccccgggccctgccctgggtgtcccgtgtccggcctgcccagcactgctgaccgccccactccccaggtgctgaagatcctgctctatctgtgcagccacggctcctccttcttcctgctcatcctcaaacgcaactctgccttcatccaggaagctgcaggtacaggggccgcgcacgcgctcaggaagagccagggctttggagaatg

SEQ ID NO: 285138 - DNA, 787 bp, Homo sapiens
gggcgctgggctgggctgcatccagcccccctggaaagcaggattgctcagcagtgaagggttctagagcttgcctgtctggcttcacatcttggccatcatagttaaactgtgtgatcttggacaagtcccctaacttctaagtgcctcagagaccaaagaccaagggtactagtgctatatctttgagaaggatactataagaatgataataggaggtaccatgtggagtgtagtgaggattaaatgagctagtccacgtgaaacacttggcatgagaagcctgccatacaagaagccctcagtgaacaccagccattacagtggctaccgtgagagcagatgacgggggaaagagtcagggctctgaaacttacactggattcttgtttgtttcagggtctcggattgcgagctggctgccgagtttttcggttgaagtgatgcacaccaccaacattcttggcattacgcaggccagcaactcccagctcaatgcaatggtaaggtctgctagctgctttaagaagatcactgggaattaggagggaaagaacagctagagcgtgtgtgccgggtatatgaccttgttggtcttactctgctctggcagagtggaaggatttttaggggcttctttttatttactgggaccatttacattcctgtgttttaaattttgaaacgttcattttatttctgtggcggataatctaaccttttctgaacactactaggttcactctgttgtgatctaggcctaccttgggactccttcgattttagc

SEQ ID NO: 285139 - DNA, 160 bp, Homo sapiens
gggctcggtccccatcctttcctttttcacgttacacgaaatggcagaaattttgaaacgttcattttatttctgtggcggataatctaaccttttctgaacactactaggttcactctgttgtgatctaggcctaccttgggactccttcgattttagc

SEQ ID NO: 285140 - DNA, 3591 bp, Homo sapiens
caggggcagcagcgggagcagcgcggggcggagcggcgccagcagccaggagcggcccggcccggcccggcgcggcggcggcggcggcagcggcagcggcagcgacgccagagcccgtgggcgccgttcgcgaggccgccgcagaggcccggccgcagcgcagggaagcctgggggccagaggtcgccgctgccgccatgccgctgctcttcctcgagcgcttcccctggcccagcctccgcacctacacgggcctcagcggcctggccctgctgggcaccatcatcagcgcctaccgcgcgctcagccagcccgaggccggccccggcgagccggaccagctaacggcctcgctgcagcctgagccgccggcgcccgcccggccgagcgccgggggaccccgggcccgcgatgtggcccagtacctgctctcagacagcctcttcgtgtgggttctagtaaataccgcttgctgtgttttgatgttggtggctaagctcatccagtgtattgtgtttggccctcttcgagtgagtgagagacagcatctcaaagacaaattttggaattttattttctacaagttcattttcatctttggtgtgctgaatgtccagacagtggaagaggtggtcatgtggtgcctctggtttgccggacttgtctttctgcacctgatggttcagctctgcaaggatcgatttgaatatctttccttctcgcccaccacgccgatgagcagccacggtcgagtcctgtccctgttggttgccatgctgctttcctgctgtggactggcggccgtctgctccatcaccggctacacccacggaatgcacaccttggctttcatggctgcagagtctcttcttgtgacagtgaggactgctcatgtgattttacgatacgtaattcacctctgggacctcaaccacgaagggacgtgggaaggaaaggggacgtatgtctattacacagactttgtcatggagctcactctcctgtccctggacctcatgcaccatattcacatgttgttatttggcaacatctggttatccatggccagcctggtcatctttatgcagctgcgttacctgtttcatgaggtgcaacgtcgaattcgtcggcacaagaactatctacgtgtggttggaaacatggaggccaggtttgcagttgcaactccagaggagctggctgtcaacaatgacgactgtgccatctgttgggactccatgcaggctgcgcggaaactgccctgtggacatcttttccacaactcctgtcttcgttcctggctagaacaagacacctcctgtccaacatgcagaatgtctcttaatattgccgacaataatcgtgtcagggaagaacatcaaggagagaacttggatgagaatttggttcctgtagcagcagccgaagggagacctcgcttaaaccaacacaatcacttcttccatttcgatgggtctcggattgcgagctggctgccgagtttttcggttgaagtgatgcacaccaccaacattcttggcattacgcaggccagcaactcccagctcaatgcaatggctcatcagattcaagagatgtttccccaggttccataccatctggtactgcaggacctccagctgacacgctcagttgaaataacaacagacaatattttagaaggacggattcaagtaccttttcctacacagcggtcagatagcatcagacctgcattgaacagtcctgtggaaaggccaagcagtgaccaggaagagggagaaacttctgctcagaccgagcgtgtgccactggacctcagtcctcgcctggaggagacgctggacttcggcgaggtggaagtggagcccagtgaggtggaagacttcgaggctcgtgggagccgcttctccaagtctgctgatgagagacagcgcatgctggtgcagcgtaaggacgaactcctccagcaagctcgcaaacgtttcttgaacaaaagttctgaagatgatgcggcctcagagagcttcctcccctcggaaggtgcgtcctctgaccccgtgaccctgcgtcgaaggatgctggctgccgccgcggaacggaggcttcagaagcagcagacctcctagcgctcccttgccttcctcagctgcctcctgcgccctgtgcccgactgactggaggaggcctgtcccaattctgcccgctccatggaaaagcgggcttgactgcattgccgctgtataaagcatgtggtcttatagtgtttggacagctgataaatttaatccttctttgtaatactttctatgtgacatttctcttccccttagaaacactgcaaattttaactgtaggtatgatctcttctggtgttgactggactgcttggggtgggggacgatcaggaggaagtgagcagtcgcctgcctgcagcaggcagcttctactcctgcctcatgcatacgtcccacaaatgcaggtgtcctgagcaccacacccagtgggaagagtgtgggggaggcgcacagtgtgagcccgcccccacgtcgtggggtaacatctgttatcaaactgctgtcgttgttgtggaagcatgtagactgtgccagaggccagacccacgggctcatgcacccctgagccagcagggcatcttggaaaaggaactcttggttcgatacctggagcagaggaggggaaagtccagggctatagggtgtgatgaagtcacccctttctgtcccactacatctgggactgactttccgagcctccagtccaaagccggcttgatttccgtgaactctggtgctcctgcatctcatgagtgtgccccatgggtcccctcccctctcagcatttccttgtcccgtctggacctggggagtggttaggcagcaagctttggtttatggttttcattcattggtgaagtaaattaggcagtgctaaagcctgtgggtttggtccttgaacaagatgtgggccttgcaagatgggagagtaaaccttgaagggctttattaaagaaataaaaaagaacttttgtatcttttatcctgggagcactgcgttttcctagctgtgttattcctggtttaattcagcagagaaggtaaggtgtgaacctacctgccttggagagggcccaggtcccaaatctcttcaaattcttcacatgtttaactttaaggatttgaaccatgaagtcataggttacagacctcagttttatgccccattggattactttttttttttttttttttttactctttgaaagctttgttttgtggtagtccttttgggaagaatccagtattatctacaattattggcaaagtttaaatgtattttacataacggaaagtttttagaatgttgaaaagtaattgaaaaaggtgataggtaaatttttaggcaaagataatttatttcaataaatctttcaaaagccttaccttgaaatgctgttagtaaatttctgtgattttttttttttaatttgttttgctgagagcatagctatttgtttttattgtaaaacaataataataataaaaagcaaactctaattggtgtgttgtg

SEQ ID NO: 285141 - DNA, 3079 bp, Homo sapiens
caggggcagcagcgggagcagcgcggggcggagcggcgccagcagccaggagcggcccggcccggcccggcgcggcggcggcggcggcagcggcagcggcagcgacgccagagcccgtgggcgccgttcgcgaggccgccgcagaggcccggccgcagcgcagggaagcctgggggccagaggtcgccgctgccgccatgccgctgctcttcctcgagcgcttcccctggcccagcctccgcacctacacgggcctcagcggcctggccctgctgggcaccatcatcagcgcctaccgcgcgctcagccagcccgaggccggccccggcgagccggaccagctaacggcctcgctgcagcctgagccgccggcgcccgcccggccgagcgccgggggaccccgggcccgcgatgtggcccagtacctgctctcagacagcctcttcgtgtgggttctagtaaataccgcttgctgtgttttgatgttggtggctaagctcatccagtgtattgtgtttggccctcttcgagtgagtgagagacagcatctcaaagacaaattttggaattttattttctacaagttcattttcatctttggtgtgctgaatgtccagacagtggaagaggtggtcatgtggtgcctctggtttgccggacttgtctttctgcacctgatggttcagctctgcaaggatcgatttgaatatctttccttctcgcccaccacgccgatgagcagccacggtcgagtcctgtccctgttggttgccatgctgctttcctgctgtggactggcggccgtctgctccatcaccggctacacccacggaatgcacaccttggctttcatggctgcagagtctcttcttgtgacagtgaggactgctcatgtgattttacgatacgtaattcacctctgggacctcaaccacgaagggacgtgggaaggaaaggggacgtatgtctattacacagactttgtcatggagctcactctcctgtccctggacctcatgcaccatattcacatgttgttatttggcaacatctggttatccatggccagcctggtcatctttatgcagctgcgttacctgtttcatgaggtgcaacgtcgaattcgtcggcacaagaactatctacgtgtggttggaaacatggaggccaggtttgcagttgcaactccagaggagctggctgtcaacaatgacgactgtgccatctgttgggactccatgcaggctgcgcggaaactgccctgtggacatcttttccacaactcctgtcttcgttcctggctagaacaagacacctcctgtccaacatgcagaatgtctcttaatattgccgacaataatcgtgtcagggaagaacatcaaggagagaacttggatgagaatttggttcctgtagcagcagccgaagggagacctcgcttaaaccaacacaatcacttcttccatttcgatgggtctcggattgcgagctggctgccgagtttttcggttgaagtgatgcacaccaccaacattcttggcattacgcaggccagcaactcccagctcaatgcaatggctcatcagattcaagagatgtttccccaggttccataccatctggtactgcaggacctccagctgacacgctcagttgaaataacaacagacaatattttagaaggacggattcaagtaccttttcctacacagcggtcagatagcatcagacctgcattgaacagtcctgtggaaaggccaagcagtgaccaggaagagggagaaacttctgctcagaccgagcgtgtgccactggacctcagtcctcgcctggaggagacgctggacttcggcgaggtggaagtggagcccagtgaggtggaagacttcgaggctcgtgggagccgcttctccaagtctgctgatgagagacagcgcatgctggtgcagcgtaaggacgaactcctccagcaagctcgcaaacgtttcttgaacaaaagttctgaagatgatgcggcctcagagagcttcctcccctcggaaggtgcgtcctctgaccccgtgaccctgcgtcgaaggatgctggctgccgccgcggaacggaggcttcagaagcagcagacctcctagcgctcccttgccttcctcagctgcctcctgcgccctgtgcccgactgactggaggaggcctgtcccaattctgcccgctccatggaaaagcgggcttgactgcattgccgctgtataaagcatgtggtcttatagtgtttggacagctgataaatttaatccttctttgtaatactttctatgtgacatttctcttccccttagaaacactgcaaattttaactgtaggtatgatctcttctggtgttgactggactgcttggggtgggggacgatcaggaggaagtgagcagtcgcctgcctgcagcaggcagcttctactcctgcctcatgcatacgtcccacaaatgcaggtgtcctgagcaccacacccagtgggaagagtgtgggggaggcgcacagtgtgagcccgcccccacgtcgtggggtaacatctgttatcaaactgctgtcgttgttgtggaagcatgtagactgtgccagaggccagacccacgggctcatgcacccctgagccagcagggcatcttggaaaaggaactcttggttcgatacctggagcagaggaggggaaagtccagggctatagggtgtgatgaagtcacccctttctgtcccactacatctgggactgactttccgagcctccagtccaaagccggcttgatttccgtgaactctggtgctcctgcatctcatgagtgtgccccatgggtcccctcccctctcagcatttccttgtcccgtctggacctggggagtggttaggcagcaagctttggtttatggttttcattcattggtgaagtaaattaggcagtgctaaagcctgtgggtttggtccttgaacaagatgtgggccttgcaagatgggagagtaaaccttgaagggctttattaaagaaataaaaaagaacttttgtatcttttatcctgggagcactgcgttt

SEQ ID NO: 285142 - DNA, 3400 bp, Homo sapiens
caggggcagcagcgggagcagcgcggggcggagcggcgccagcagccaggagcggcccggcccggcccggcgcggcggcggcggcggcagcggcagcggcagcgacgccagagcccgtgggcgccgttcgcgaggccgccgcagaggcccggccgcagcgcagggaagcctgggggccagaggtcgccgctgccgccatgccgctgctcttcctcgagcgcttcccctggcccagcctccgcacctacacgggcctcagcggcctggccctgctgggcaccatcatcagcgcctaccgcgcgctcagccagcccgaggccggccccggcgagccggaccagctaacggcctcgctgcagcctgagccgccggcgcccgcccggccgagcgccgggggaccccgggcccgcgatgtggcccagtacctgctctcagacagcctcttcgtgtgggttctagtaaataccgcttgctgtgttttgatgttggtggctaagctcatccagtgtattgtgtttggccctcttcgagtgagtgagagacagcatctcaaagacaaattttggaattttattttctacaagttcattttcatctttggtgtgctgaatgtccagacagtggaagaggtggtcatgtggtgcctctggtttgccggacttgtctttctgcacctgatggttcagctctgcaaggatcgatttgaatatctttccttctcgcccaccacgccgatgagcagccacggtcgagtcctgtccctgttggttgccatgctgctttcctgctgtggactggcggccgtctgctccatcaccggctacacccacggaatgcacaccttggctttcatggctgcagagtctcttcttgtgacagtgaggactgctcatgtgattttacgatacgtaattcacctctgggacctcaaccacgaagggacgtgggaaggaaaggggacgtatgtctattacacagactttgtcatggagctcactctcctgtccctggacctcatgcaccatattcacatgttgttatttggcaacatctggttatccatggccagcctggtcatctttatgcagctgcgttacctgtttcatgaggtgcaacgtcgaattcgtcggcacaagaactatctacgtgtggttggaaacatggaggccaggtttgcagttgcaactccagaggagctggctgtcaacaatgacgactgtgccatctgttgggactccatgcaggctgcgcggaaactgccctgtggacatcttttccacaaggtctcggattgcgagctggctgccgagtttttcggttgaagtgatgcacaccaccaacattcttggcattacgcaggccagcaactcccagctcaatgcaatggctcatcagattcaagagatgtttccccaggttccataccatctggtactgcaggacctccagctgacacgctcagttgaaataacaacagacaatattttagaaggacggattcaagtaccttttcctacacagcggtcagatagcatcagacctgcattgaacagtcctgtggaaaggccaagcagtgaccaggaagagggagaaacttctgctcagaccgagcgtgtgccactggacctcagtcctcgcctggaggagacgctggacttcggcgaggtggaagtggagcccagtgaggtggaagacttcgaggctcgtgggagccgcttctccaagtctgctgatgagagacagcgcatgctggtgcagcgtaaggacgaactcctccagcaagctcgcaaacgtttcttgaacaaaagttctgaagatgatgcggcctcagagagcttcctcccctcggaaggtgcgtcctctgaccccgtgaccctgcgtcgaaggatgctggctgccgccgcggaacggaggcttcagaagcagcagacctcctagcgctcccttgccttcctcagctgcctcctgcgccctgtgcccgactgactggaggaggcctgtcccaattctgcccgctccatggaaaagcgggcttgactgcattgccgctgtataaagcatgtggtcttatagtgtttggacagctgataaatttaatccttctttgtaatactttctatgtgacatttctcttccccttagaaacactgcaaattttaactgtaggtatgatctcttctggtgttgactggactgcttggggtgggggacgatcaggaggaagtgagcagtcgcctgcctgcagcaggcagcttctactcctgcctcatgcatacgtcccacaaatgcaggtgtcctgagcaccacacccagtgggaagagtgtgggggaggcgcacagtgtgagcccgcccccacgtcgtggggtaacatctgttatcaaactgctgtcgttgttgtggaagcatgtagactgtgccagaggccagacccacgggctcatgcacccctgagccagcagggcatcttggaaaaggaactcttggttcgatacctggagcagaggaggggaaagtccagggctatagggtgtgatgaagtcacccctttctgtcccactacatctgggactgactttccgagcctccagtccaaagccggcttgatttccgtgaactctggtgctcctgcatctcatgagtgtgccccatgggtcccctcccctctcagcatttccttgtcccgtctggacctggggagtggttaggcagcaagctttggtttatggttttcattcattggtgaagtaaattaggcagtgctaaagcctgtgggtttggtccttgaacaagatgtgggccttgcaagatgggagagtaaaccttgaagggctttattaaagaaataaaaaagaacttttgtatcttttatcctgggagcactgcgttttcctagctgtgttattcctggtttaattcagcagagaaggtaaggtgtgaacctacctgccttggagagggcccaggtcccaaatctcttcaaattcttcacatgtttaactttaaggatttgaaccatgaagtcataggttacagacctcagttttatgccccattggattactttttttttttttttttttttactctttgaaagctttgttttgtggtagtccttttgggaagaatccagtattatctacaattattggcaaagtttaaatgtattttacataacggaaagtttttagaatgttgaaaagtaattgaaaaaggtgataggtaaatttttaggcaaagataatttatttcaataaatctttcaaaagccttaccttgaaatgctgttagtaaatttctgtgattttttttttttaatttgttttgctgagagcatagctatttgtttttattgtaaaacaataataataataaaaagcaaactctaattggtgtgttgtg

SEQ ID NO: 285143 - DNA, 3057 bp, Homo sapiens
caggggcagcagcgggagcagcgcggggcggagcggcgccagcagccaggagcggcccggcccggcccggcgcggcggcggcggcggcagcggcagcggcagcgacgccagagcccgtgggcgccgttcgcgaggccgccgcagaggcccggccgcagcgcagggaagcctgggggccagaggtcgccgctgccgccatgccgctgctcttcctcgagcgcttcccctggcccagcctccgcacctacacgggcctcagcggcctggccctgctgggcaccatcatcagcgcctaccgcgcgctcagccagcccgaggccggccccggcgagccggaccagctaacggcctcgctgcagcctgagccgccggcgcccgcccggccgagcgccgggggaccccgggcccgcgatgtggcccagtacctgctctcagacagcctcttcgtgtgggttctagtaaataccgcttgctgtgttttgatgttggtggctaagctcatccagtgtattgtgtttggccctcttcgagtgagtgagagacagcatctcaaagacaaattttggaattttattttctacaagttcattttcatctttggtgtgctgaatgtccagacagtggaagaggtggtcatgtggtgcctctggtttgccggacttgtctttctgcacctgatggttcagctctgcaaggatcgatttgaatatctttccttctcgcccaccacgccgatgagcagccacggtcgagtcctgtccctgttggttgccatgctgctttcctgctgtggactggcggccgtctgctccatcaccggctacacccacggaatgcacaccttggctttcatggctgcagagtctcttcttgtgacagtgaggactgctcatgtgattttacgatacgtaattcacctctgggacctcaaccacgaagggacgtgggaaggaaaggggacgtatgtctattacacagactttgtcatggagctcactctcctgtccctggacctcatgcaccatattcacatgttgttatttggcaacatctggttatccatggccagcctggtcatctttatgcagctgcgttacctgtttcatgaggtgcaacgtcgaattcgtcggcacaagaactatctacgtgtggttggaaacatggaggccaggtttgcagttgcaactccagaggagctggctgtcaacaatgacgactgtgccatctgttgggactccatgcaggctgcgcggaaactgccctgtggacatcttttccacaactcctgtcttcgttcctggctagaacaagacacctcctgtccaacatgcagaatgtctcttaatattgccgacaataatcgtgtcagggaagaacatcaaggagagaacttggatgagaatttggttcctgtagcagcagccgaagggagacctcgcttaaaccaacacaatcacttcttccatttcgatgggtctcggattgcgagctggctgccgagtttttcggttgaagtgatgcacaccaccaacattcttggcattacgcaggccagcaactcccagctcaatgcaatggctcatcagattcaagagatgtttccccaggttccataccatctggtactgcaggacctccagctgacacgctcagttgaaataacaacagacaatattttagaaggacggattcaagtaccttttcctacacagcggtcagatagcatcagacctgcattgaacagtcctgtggaaaggccaagcagtgaccaggaagagggagaaacttctgctcagaccgagcgtgtgccactggacctcagtcctcgcctggaggagacgctggacttcggcgaggtggaagtggagcccagtgaggtggaagacttcgaggctcgtgggagccgcttctccaagtctgctgatgagagacagcgcatgctggtgcagcgtaaggacgaactcctccagcaagctcgcaaacgtttcttgaacaaaagttctgaagatgatgcggcctcagagagcttcctcccctcggaaggtgcgtcctctgaccccgtgaccctgcgtcgaaggatgctggctgccgccgcggaacggaggcttcagaagcagcagacctcctagcgctcccttgccttcctcagctgcctcctgcgccctgtgcccgactgactggaggaggcctgtcccaattctgcccgctccatggaaaagcgggcttgactgcattgccgctgtataaagcatgtggtcttatagtgtttggacagctgataaatttaatccttctttgtaatactttctatgtgacatttctcttccccttagaaacactgcaaattttaactgtaggtatgatctcttctggtgttgactggactgcttggggtgggggacgatcaggaggaagtgagcagtcgcctgcctgcagcaggcagcttctactcctgcctcatgcatacgtcccacaaatgcaggtgtcctgagcaccacacccagtgggaagagtgtgggggaggcgcacagtgtgagcccgcccccacgtcgtggggtaacatctgttatcaaactgctgtcgttgttgtggaagcatgtagactgtgccagaggccagacccacgggctcatgcacccctgagccagcagggcatcttggaaaaggaactcttggttcgatacctggagcagaggaggggaaagtccagggctatagggtgtgatgaagtcacccctttctgtcccactacatctgggactgactttccgagcctccagtccaaagccggcttgatttccgtgaactctggtgctcctgcatctcatgagtgtgccccatgggtcccctcccctctcagcatttccttgtcccgtctggacctggggagtggttaggcagcaagctttggtttatggttttcattcattggtgaagtaaattaggcagtgctcccaggataaaagatacaaaagttctttttatttctttaataaagcccttcaaggtttactctcccagtcgatccggccgcgaatttagtagtagtagtcgacc

SEQ ID NO: 285144 - DNA, 2855 bp, Homo sapiens
caggggcagcagcgggagcagcgcggggcggagcggcgccagcagccaggagcggcccggcccggcccggcgcggcggcggcggcggcagcggcagcggcagcgacgccagagcccgtgggcgccgttcgcgaggccgccgcagaggcccggccgcagcgcagggaagcctgggggccagaggtcgccgctgccgccatgccgctgctcttcctcgagcgcttcccctggcccagcctccgcacctacacgggcctcagcggcctggccctgctgggcaccatcatcagcgcctaccgcgcgctcagccagcccgaggccggccccggcgagccggaccagctaacggcctcgctgcagcctgagccgccggcgcccgcccggccgagcgccgggggaccccgggcccgcgatgtggcccagtacctgctctcagacagcctcttcgtgtgggttctagtaaataccgcttgctgtgttttgatgttggtggctaagctcatccagtgtattgtgtttggccctcttcgagtgagtgagagacagcatctcaaagacaaattttggaattttattttctacaagttcattttcatctttggtgtgctgaatgtccagacagtggaagaggtggtcatgtggtgcctctggtttgccggacttgtctttctgcacctgatggttcagctctgcaaggatcgatttgaatatctttccttctcgcccaccacgccgatgagcagccacggtcgagtcctgtccctgttggttgccatgctgctttcctgctgtggactggcggccgtctgctccatcaccggctacacccacggaatgcacaccttggctttcatggctgcagagtctcttcttgtgacagtgaggactgctcatgtgattttacgatacgtaattcacctctgggacctcaaccacgaagggacgtgggaaggaaaggggacgtatgtctattacacagactttgtcatggagctcactctcctgtccctggacctcatgcaccatattcacatgttgttatttggcaacatctggttatccatggccagcctggtcatctttatgcagctgcgttacctgtttcatgaggtgcaacgtcgaattcgtcggcacaagaactatctacgtgtggttggaaacatggaggccaggtttgcagttgcaactccagaggagctggctgtcaacaatgacgactgtgccatctgttgggactccatgcaggctgcgcggaaactgccctgtggacatcttttccacaactcctgtcttcgttcctggctagaacaagacacctcctgtccaacatgcagaatgtctcttaatattgccgacaataatcgtgtcagggaagaacatcaaggagagaacttggatgagaatttggttcctgtagcagcagccgaagggagacctcgcttaaaccaacacaatcacttcttccatttcgatgggtctcggattgcgagctggctgccgagtttttcggttgaagtgatgcacaccaccaacattcttggcattacgcaggccagcaactcccagctcaatgcaatggctcatcagattcaagagatgtttccccaggttccataccatctggtactgcaggacctccagctgacacgctcagttgaaataacaacagacaatattttagaaggacggattcaagtaccttttcctacacagcggtcagatagcatcagacctgcattgaacagtcctgtggaaaggccaagcagtgaccaggaagagggagaaacttctgctcagaccgagcgtgtgccactggacctcagtcctcgcctggaggagacgctggacttcggcgaggtggaagtggagcccagtgaggtggaagacttcgaggctcgtgggagccgcttctccaagtctgctgatgagagacagcgcatgctggtgcagcgtaaggacgaaggcctgtcccaattctgcccgctccatggaaaagcgggcttgactgcattgccgctgtataaagcatgtggtcttatagtgtttggacagctgataaatttaatccttctttgtaatactttctatgtgacatttctcttccccttagaaacactgcaaattttaactgtaggtatgatctcttctggtgttgactggactgcttggggtgggggacgatcaggaggaagtgagcagtcgcctgcctgcagcaggcagcttctactcctgcctcatgcatacgtcccacaaatgcaggtgtcctgagcaccacacccagtgggaagagtgtgggggaggcgcacagtgtgagcccgcccccacgtcgtggggtaacatctgttatcaaactgctgtcgttgttgtggaagcatgtagactgtgccagaggccagacccacgggctcatgcacccctgagccagcagggcatcttggaaaaggaactcttggttcgatacctggagcagaggaggggaaagtccagggctatagggtgtgatgaagtcacccctttctgtcccactacatctgggactgactttccgagcctccagtccaaagccggcttgatttccgtgaactctggtgctcctgcatctcatgagtgtgccccatgggtcccctcccctctcagcatttccttgtcccgtctggacctggggagtggttaggcagcaagctttggtttatggttttcattcattggtgaagtaaattaggcagtgctaaagcctgtgggtttggtccttgaacaagatgtgggccttgcaagatgggagagtaaaccttgaagggctttattaaagaaataaaaaagaacttttgtatcttttatcctgggagcactgcgttt

SEQ ID NO: 285145 - DNA, 2729 bp, Homo sapiens
caggggcagcagcgggagcagcgcggggcggagcggcgccagcagccaggagcggcccggcccggcccggcgcggcggcggcggcggcagcggcagcggcagcgacgccagagcccgtgggcgccgttcgcgaggccgccgcagaggcccggccgcagcgcagggaagcctgggggccagaggtcgccgctgccgccatgccgctgctcttcctcgagcgcttcccctggcccagcctccgcacctacacgggcctcagcggcctggccctgctgggcaccatcatcagcgcctaccgcgcgctcagccagcccgaggccggccccggcgagccggaccagctaacggcctcgctgcagcctgagccgccggcgcccgcccggccgagcgccgggggaccccgggcccgcgatgtggcccagtacctgctctcagacagcctcttcgtgtgggttctagtaaataccgcttgctgtgttttgatgttggtggctaagctcatccagtgtattgtgtttggccctcttcgagtgagtgagagacagcatctcaaagacaaattttggaattttattttctacaagttcattttcatctttggtgtgctgaatgtccagacagtggaagaggtggtcatgtggtgcctctggtttgccggacttgtctttctgcacctgatggttcagctctgcaaggatcgatttgaatatctttccttctcgcccaccacgccgatgagcagccacggtcgagtcctgtccctgttggttgccatgctgctttcctgctgtggactggcggccgtctgctccatcaccggctacacccacggaatgcacaccttggctttcatggctgcagagtctcttcttgtgacagtgaggactgctcatgtgattttacgatacgtaattcacctctgggacctcaaccacgaagggacgtgggaaggaaaggggacgtatgtctattacacagactttgtcatggagctcactctcctgtccctggacctcatgcaccatattcacatgttgttatttggcaacatctggttatccatggccagcctggtcatctttatgcagctgcgttacctgtttcatgaggtgcaacgtcgaattcgtcggcacaagaactatctacgtgtggttggaaacatggaggccaggtttgcagttgcaactccagaggagctggctgtcaacaatgacgactgtgccatctgttgggactccatgcaggctgcgcggaaactgccctgtggacatcttttccacaactcctgtcttcgttcctggctagaacaagacacctcctgtccaacatgcagaatgtctcttaatattgccgacaataatcgtgtcagggaagaacatcaaggagagaacttggatgagaatttggttcctgtagcagcagccgaagggagacctcgcttaaaccaacacaatcacttcttccatttcgatgggtctcggattgcgagctggctgccgagtttttcggttgaagtgatgcacaccaccaacattcttggcattacgcaggccagcaactcccagctcaatgcaatggctcatcagattcaagagatgtttccccaggttccataccatctggtactgcaggacctccagctgacacgctcagttgaaataacaacagacaatattttagaaggacggattcaagtaccttttcctacacagcggtcagatagcatcagacctgcattgaacagtcctgtggaaaggccaagcagtgaccaggaagagggagaaacttctgctcagaccgagcgtgtgccactggacctcagtcctcgcctggagggcctgtcccaattctgcccgctccatggaaaagcgggcttgactgcattgccgctgtataaagcatgtggtcttatagtgtttggacagctgataaatttaatccttctttgtaatactttctatgtgacatttctcttccccttagaaacactgcaaattttaactgtaggtatgatctcttctggtgttgactggactgcttggggtgggggacgatcaggaggaagtgagcagtcgcctgcctgcagcaggcagcttctactcctgcctcatgcatacgtcccacaaatgcaggtgtcctgagcaccacacccagtgggaagagtgtgggggaggcgcacagtgtgagcccgcccccacgtcgtggggtaacatctgttatcaaactgctgtcgttgttgtggaagcatgtagactgtgccagaggccagacccacgggctcatgcacccctgagccagcagggcatcttggaaaaggaactcttggttcgatacctggagcagaggaggggaaagtccagggctatagggtgtgatgaagtcacccctttctgtcccactacatctgggactgactttccgagcctccagtccaaagccggcttgatttccgtgaactctggtgctcctgcatctcatgagtgtgccccatgggtcccctcccctctcagcatttccttgtcccgtctggacctggggagtggttaggcagcaagctttggtttatggttttcattcattggtgaagtaaattaggcagtgctaaagcctgtgggtttggtccttgaacaagatgtgggccttgcaagatgggagagtaaaccttgaagggctttattaaagaaataaaaaagaacttttgtatcttttatcctgggagcactgcgttt

SEQ ID NO: 285146 - DNA, 2361 bp, Homo sapiens
caggggcagcagcgggagcagcgcggggcggagcggcgccagcagccaggagcggcccggcccggcccggcgcggcggcggcggcggcagcggcagcggcagcgacgccagagcccgtgggcgccgttcgcgaggccgccgcagaggcccggccgcagcgcagggaagcctgggggccagaggtcgccgctgccgccatgccgctgctcttcctcgagcgcttcccctggcccagcctccgcacctacacgggcctcagcggcctggccctgctgggcaccatcatcagcgcctaccgcgcgctcagccagcccgaggccggccccggcgagccggaccagctaacggcctcgctgcagcctgagccgccggcgcccgcccggccgagcgccgggggaccccgggcccgcgatgtggcccagtacctgctctcagacagcctcttcgtgtgggttctagtaaataccgcttgctgtgttttgatgttggtggctaagctcatccagtgtattgtgtttggccctcttcgagtgagtgagagacagcatctcaaagacaaattttggaattttattttctacaagttcattttcatctttggtgtgctgaatgtccagacagtggaagaggtggtcatgtggtgcctctggtttgccggacttgtctttctgcacctgatggttcagctctgcaaggatcgatttgaatatctttccttctcgcccaccacgccgatgagcagccacggtcgagtcctgtccctgttggttgccatgctgctttcctgctgtggactggcggccgtctgctccatcaccggctacacccacggaatgcacaccttggctttcatggctgcagagtctcttcttgtgacagtgaggactgctcatgtgattttacgatacgtaattcacctctgggacctcaaccacgaagggacgtgggaaggaaaggggacgtatgtctattacacagactttgtcatggagctcactctcctgtccctggacctcatgcaccatattcacatgttgttatttggcaacatctggttatccatggccagcctggtcatctttatgcagctgcgttacctgtttcatgaggtgcaacgtcgaattcgtcggcacaagaactatctacgtgtggttggaaacatggaggccaggtttgcagttgcaactccagaggagctggctgtcaacaatgacgactgtgccatctgttgggactccatgcaggctgcgcggaaactgccctgtggacatcttttccacaactcctgtcttcgttcctggctagaacaagacacctcctgtccaacatgcagaatgtctcttaatattgccgacaataatcgtgtcagggaagaacatcaaggagagaacttggatgagaatttggttcctgtagcagcagccgaagggagacctcgcttaaaccaacacaatcacttcttccatttcgatgggtctcggattgcgagctggctgccgagtttttcggttgaagtgatgcacaccaccaacattcttggcattacgcaggccagcaactcccagctcaatgcaatggctcatcagattcaagagatgtttccccaggttccataccatctggtactgcaggacctccagctgacacgctcagttgaaataacaacagacaatattttagaaggacggattcaagtaccttttcctacacagcggtcagatagcatcagacctgcattgaacagtcctgtggaaaggccaagcagtgaccaggaagagggagaaacttctgctcagaccgagcgtgtgccactggacctcagtcctcgcctggaggagacgctggacttcggcgaggtggaagtggagcccagtgaggtggaagacttcgaggctcgtgggagccgcttctccaagtctgctgatgagagacagcgcatgctggtgcagcgtaaggacgaactcctccagcaagctcgcaaacgtttcttgaacaaaagttctgaagatgatgcggcctcagagagcttcctcccctcggaaggtgcgtcctctgaccccgtgaccctgcgtcgaaggatgctggctgccgccgcggaacggaggcttcagaagcagcagacctcctagcgctcccttgccttcctcagctgcctcctgcgccctgtgcccgactgactggaggaggcctgtcccaattctgcccgctccatggaaagggttgatggatgcgtgataagatgggctataggttggaggcgtaataactttggaaatttaggaatttttccctaaaatgaattaaggggagacaggggaggagggggggaaaaggagagaagtgtggaggaaaagagggaac

SEQ ID NO: 285147 - DNA, 879 bp, Homo sapiens
aatcagctcgcgtaccgttaacatctcgcgcacacatctcatctgggactgactttccgagcctccagtccaaagccggcttgatttccgtgaactctggtgctcctgcatctcatgagtgtgccccatgggtcccctcccctctcagcatttccttgtcccgtctggacctggggagtggttaggcagcaagctttggtttatggttttcattcattggtgaagtaaattaggcagtgctaaagcctgtgggtttggtccttgaacaagatgtgggccttgcaagatgggagagtaaaccttgaagggctttattaaagaaataaaaaagaacttttgtatcttttatcctgggagcactgcgttttcctagctgtgttattcctggtttaattcagcagagaaggtaaggtgtgaacctacctgccttggagagggcccaggtcccaaatctcttcaaattcttcacatgtttaactttaaggatttgaaccatgaagtcataggttacagacctcagttttatgccccattggattactttttttttttttttttttttactctttgaaagctttgttttgtggtagtccttttgggaagaatccagtattatctacaattattggcaaagtttaaatgtattttacataacggaaagtttttagaatgttgaaaagtaattgaaaaaggtgataggtaaatttttaggcaaagataatttatttcaataaatctttcaaaagccttaccttgaaatgctgttagtaaatttctgtgattttttttttttaatttgttttgctgagagcatagctatttgtttttattgtaaaacaataataataataaaaagcaaactctaattggtgtgttgtg

SEQ ID NO: 285148 - DNA, 1768 bp, Homo sapiens
caggggcagcagcgggagcagcgcggggcggagcggcgccagcagccaggagcggcccggcccggcccggcgcggcggcggcggcggcagcggcagcggcagcgacgccagagcccgtgggcgccgttcgcgaggccgccgcagaggcccggccgcagcgcagggaagcctgggggccagaggtcgccgctgccgccatgccgctgctcttcctcgagcgcttcccctggcccagcctccgcacctacacgggcctcagcggcctggccctgctgggcaccatcatcagcgcctaccgcgcgctcagccagcccgaggccggccccggcgagccggaccagctaacggcctcgctgcagcctgagccgccggcgcccgcccggccgagcgccgggggaccccgggcccgcgatgtggcccagtacctgctctcagacagcctcttcgtgtgggttctagtaaataccgcttgctgtgttttgatgttggtggctaagctcatccagtgtattgtgtttggccctcttcgagtgagtgagagacagcatctcaaagacaaattttggaattttattttctacaagttcattttcatctttggtgtgctgaatgtccagacagtggaagaggtggtcatgtggtgcctctggtttgccggacttgtctttctgcacctgatggttcagctctgcaaggatcgatttgaatatctttccttctcgcccaccacgccgatgagcagccacggtcgagtcctgtccctgttggttgccatgctgctttcctgctgtggactggcggccgtctgctccatcaccggctacacccacggaatgcacaccttggctttcatggctgcagagtctcttcttgtgacagtgaggactgctcatgtgattttacgatacgtaattcacctctgggacctcaaccacgaagggacgtgggaaggaaaggggacgtatgtctattacacagactttgtcatggagctcactctcctgtccctggacctcatgcaccatattcacatgttgttatttggcaacatctggttatccatggccagcctggtcatctttatgcagctgcgttacctgtttcatgaggtgcaacgtcgaattcgtcggcacaagaactatctacgtgtggttggaaacatggaggccaggtttgcagttgcaactccagaggagctggctgtcaacaatgacgactgtgccatctgttgggactccatgcaggctgcgcggaaatcctagctgtgttattcctggtttaattcagcagagaaggtaaggtgtgaacctacctgccttggagagggcccaggtcccaaatctcttcaaattcttcacatgtttaactttaaggatttgaaccatgaagtcataggttacagacctcagttttatgccccattggattactttttttttttttttttttttactctttgaaagctttgttttgtggtagtccttttgggaagaatccagtattatctacaattattggcaaagtttaaatgtattttacataacggaaagtttttagaatgttgaaaagtaattgaaaaaggtgataggtaaatttttaggcaaagataatttatttcaataaatctttcaaaagccttaccttgaaatgctgttagtaaatttctgtgattttttttttttaatttgttttgctgagagcatagctatttgtttttattgtaaaacaataataataataaaaagcaaactctaattggtgtgttgtg

SEQ ID NO: 285149 - DNA, 1670 bp, Homo sapiens
caggggcagcagcgggagcagcgcggggcggagcggcgccagcagccaggagcggcccggcccggcccggcgcggcggcggcggcggcagcggcagcggcagcgacgccagagcccgtgggcgccgttcgcgaggccgccgcagaggcccggccgcagcgcagggaagcctgggggccagaggtcgccgctgccgccatgccgctgctcttcctcgagcgcttcccctggcccagcctccgcacctacacgggcctcagcggcctggccctgctgggcaccatcatcagcgcctaccgcgcgctcagccagcccgaggccggccccggcgagccggaccagctaacggcctcgctgcagcctgagccgccggcgcccgcccggccgagcgccgggggaccccgggcccgcgatgtggcccagtacctgctctcagacagcctcttcgtgtgggttctagtaaataccgcttgctgtgttttgatgttggtggctaagctcatccagtgtattgtgtttggccctcttcgagtgagtgagagacagcatctcaaagacaaattttggaattttattttctacaagttcattttcatctttggtgtgctgaatgtccagacagtggaagaggtggtcatgtggtgcctctggtttgccggacttgtctttctgcacctgatggttcagctctgcaaggatcgatttgaatatctttccttctcgcccaccacgccgatgagcagccacggtcgagtcctgtccctgttggttgccatgctgctttcctgctgtggactggcggccgtctgctccatcaccggctacacccacggaatgcacaccttggctttcatggctgcagagtctcttcttgtgacagtgaggactgctcatgtgattttacgatacgtaattcacctctgggacctcaaccacgaagggacgtgggaaggaaaggggacgtatgtctattacacagactttgtcatggagctcactctcctgtccctggacctcatgcaccatattcacatgttgttatttggcaacatctggttatccatggccagcctggtcatctttatgcagctgcgttacctgtttcatgaggtgcaacgtcgaattcgtcggcacaagaactatctacgtgtggttggaaacatggaggccaggtttgcagttgcaactccagaggagctggctgtcaacaatgacgactgtgccatctgttgggactccatgcaggctgcgcggaaactgccctgtggacatcttttccacaaggtctcggattgcgagctggctgccgagtttttcggttgaagtgatgcacaccaccaacattcttggcattacgcaggccagcaactcccagctcaatgcaatggtaaggtctgctagctgctttaagaagatcactgggaattaggagggaaagaacagctagagcgtgtgtgccgggtatatgaccttgttggtcttactctgctctggcagagtggaaggatttttaggggcttctttttatttactgggaccatttacattcctgtgttttaaattttgaaacgttcattttatttctgtggcggataatctaaccttttctgaacactactaggttcactctgttgtgatctaggcctaccttgggactccttcgattttagc

SEQ ID NO: 285150 - DNA, 1575 bp, Homo sapiens
caggggcagcagcgggagcagcgcggggcggagcggcgccagcagccaggagcggcccggcccggcccggcgcggcggcggcggcggcagcggcagcggcagcgacgccagagcccgtgggcgccgttcgcgaggccgccgcagaggcccggccgcagcgcagggaagcctgggggccagaggtcgccgctgccgccatgccgctgctcttcctcgagcgcttcccctggcccagcctccgcacctacacgggcctcagcggcctggccctgctgggcaccatcatcagcgcctaccgcgcgctcagccagcccgaggccggccccggcgagccggaccagctaacggcctcgctgcagcctgagccgccggcgcccgcccggccgagcgccgggggaccccgggcccgcgatgtggcccagtacctgctctcagacagcctcttcgtgtgggttctagtaaataccgcttgctgtgttttgatgttggtggctaagctcatccagtgtattgtgtttggccctcttcgagtgagtgagagacagcatctcaaagacaaattttggaattttattttctacaagttcattttcatctttggtgtgctgaatgtccagacagtggaagaggtggtcatgtggtgcctctggtttgccggacttgtctttctgcacctgatggttcagctctgcaaggatcgatttgaatatctttccttctcgcccaccacgccgatgagcagccacggtcgagtcctgtccctgttggttgccatgctgctttcctgctgtggactggcggccgtctgctccatcaccggctacacccacggaatgcacaccttggctttcatggctgcagagtctcttcttgtgacagtgaggactgctcatgtgattttacgatacgtaattcacctctgggacctcaaccacgaagggacgtgggaaggaaaggggacgtatgtctattacacagactttgtcatggagctcactctcctgtccctggacctcatgcaccatattcacatgttggtaagtttcctcagaaggagctctaacagagggcaagcctttcagaatcaggaacagtaatggttcttcagttaaaaaatgaaactttagaaataagatgtggatggactacttaaagactaaaaatgaatgtggctgcaaaccctccctctttttgccactgggtgtaaggcagtgccatggaactgctttggctggtgcctaactcaggaggtgtttgctgtcctgggagacttagttaactctgctgaccaagtcaatagattattcttttagcatgaaattaaggagctgcctttccccatagtttctatggctttaaatatttagcaggtactttgtaggtggtaatgggaattcctgcagtgttagctacttcacagatttatacattttccatctttgtaattaaaaaaagtctttacacttaattcctacattcctactaccatcattgtttacattttactttggtatgttagacgttacggtgtcgtagatctgcttcattggttggcccttcagtgatctaataatg

SEQ ID NO: 285151 - DNA, 252 bp, Homo sapiens
accaaattcagtagtaacagtaaattactaaggtgttttctctcttcattacagatacgtaattcacctctgggacctcaaccacgaagggacgtgggaaggaaaggggacgtatgtctattacacagactttgtcatggagctcactctcctgtccctggacctcatgcaccatattcacatgttggtaagtttcctcagaaggagctctaacagagggcaagcctttcagaatcaggaacagtaatggtt

SEQ ID NO: 285152 - DNA, 3227 bp, Homo sapiens
ggcctaggggcccctccgccagggacccccgagggcgagcgcctggggggcgcggccttgctcgcgggagcgctgctgagggagagtggttctagtaaataccgcttgctgtgttttgatgttggtggctaagctcatccagtgtattgtgtttggccctcttcgagtgagtgagagacagcatctcaaagacaaattttggaattttattttctacaagttcattttcatctttggtgtgctgaatgtccagacagtggaagaggtggtcatgtggtgcctctggtttgccggacttgtctttctgcacctgatggttcagctctgcaaggatcgatttgaatatctttccttctcgcccaccacgccgatgagcagccacggtcgagtcctgtccctgttggttgccatgctgctttcctgctgtggactggcggccgtctgctccatcaccggctacacccacggaatgcacaccttggctttcatggctgcagagtctcttcttgtgacagtgaggactgctcatgtgattttacgatacgtaattcacctctgggacctcaaccacgaagggacgtgggaaggaaaggggacgtatgtctattacacagactttgtcatggagctcactctcctgtccctggacctcatgcaccatattcacatgttgttatttggcaacatctggttatccatggccagcctggtcatctttatgcagctgcgttacctgtttcatgaggtgcaacgtcgaattcgtcggcacaagaactatctacgtgtggttggaaacatggaggccaggtttgcagttgcaactccagaggagctggctgtcaacaatgacgactgtgccatctgttgggactccatgcaggctgcgcggaaactgccctgtggacatcttttccacaactcctgtcttcgttcctggctagaacaagacacctcctgtccaacatgcagaatgtctcttaatattgccgacaataatcgtgtcagggaagaacatcaaggagagaacttggatgagaatttggttcctgtagcagcagccgaagggagacctcgcttaaaccaacacaatcacttcttccatttcgatgggtctcggattgcgagctggctgccgagtttttcggttgaagtgatgcacaccaccaacattcttggcattacgcaggccagcaactcccagctcaatgcaatggctcatcagattcaagagatgtttccccaggttccataccatctggtactgcaggacctccagctgacacgctcagttgaaataacaacagacaatattttagaaggacggattcaagtaccttttcctacacagcggtcagatagcatcagacctgcattgaacagtcctgtggaaaggccaagcagtgaccaggaagagggagaaacttctgctcagaccgagcgtgtgccactggacctcagtcctcgcctggaggagacgctggacttcggcgaggtggaagtggagcccagtgaggtggaagacttcgaggctcgtgggagccgcttctccaagtctgctgatgagagacagcgcatgctggtgcagcgtaaggacgaactcctccagcaagctcgcaaacgtttcttgaacaaaagttctgaagatgatgcggcctcagagagcttcctcccctcggaaggtgcgtcctctgaccccgtgaccctgcgtcgaaggatgctggctgccgccgcggaacggaggcttcagaagcagcagacctcctagcgctcccttgccttcctcagctgcctcctgcgccctgtgcccgactgactggaggaggcctgtcccaattctgcccgctccatggaaaagcgggcttgactgcattgccgctgtataaagcatgtggtcttatagtgtttggacagctgataaatttaatccttctttgtaatactttctatgtgacatttctcttccccttagaaacactgcaaattttaactgtaggtatgatctcttctggtgttgactggactgcttggggtgggggacgatcaggaggaagtgagcagtcgcctgcctgcagcaggcagcttctactcctgcctcatgcatacgtcccacaaatgcaggtgtcctgagcaccacacccagtgggaagagtgtgggggaggcgcacagtgtgagcccgcccccacgtcgtggggtaacatctgttatcaaactgctgtcgttgttgtggaagcatgtagactgtgccagaggccagacccacgggctcatgcacccctgagccagcagggcatcttggaaaaggaactcttggttcgatacctggagcagaggaggggaaagtccagggctatagggtgtgatgaagtcacccctttctgtcccactacatctgggactgactttccgagcctccagtccaaagccggcttgatttccgtgaactctggtgctcctgcatctcatgagtgtgccccatgggtcccctcccctctcagcatttccttgtcccgtctggacctggggagtggttaggcagcaagctttggtttatggttttcattcattggtgaagtaaattaggcagtgctaaagcctgtgggtttggtccttgaacaagatgtgggccttgcaagatgggagagtaaaccttgaagggctttattaaagaaataaaaaagaacttttgtatcttttatcctgggagcactgcgttttcctagctgtgttattcctggtttaattcagcagagaaggtaaggtgtgaacctacctgccttggagagggcccaggtcccaaatctcttcaaattcttcacatgtttaactttaaggatttgaaccatgaagtcataggttacagacctcagttttatgccccattggattactttttttttttttttttttttactctttgaaagctttgttttgtggtagtccttttgggaagaatccagtattatctacaattattggcaaagtttaaatgtattttacataacggaaagtttttagaatgttgaaaagtaattgaaaaaggtgataggtaaatttttaggcaaagataatttatttcaataaatctttcaaaagccttaccttgaaatgctgttagtaaatttctgtgattttttttttttaatttgttttgctgagagcatagctatttgtttttattgtaaaacaataataataataaaaagcaaactctaattggtgtgttgtg

SEQ ID NO: 285153 - DNA, 3687 bp, Homo sapiens
caggggcagcagcgggagcagcgcggggcggagcggcgccagcagccaggagcggcccggcccggcccggcgcggcggcggcggcggcagcggcagcggcagcgacgccagagcccgtgggcgccgttcgcgaggccgccgcagaggcccggccgcagcgcagggaagcctgggggccagaggtcgccgctgccgccatgccgctgctcttcctcgagcgcttcccctggcccagcctccgcacctacacgggcctcagcggcctggccctgctgggcaccatcatcagcgcctaccgcgcgctcagccagcccgaggccggccccggcgagccggaccagctaacggcctcgctgcagcctgagccgccggcgcccgcccggccgagcgccgggggaccccgggcccgcgatgtggcccagtacctgctctcagacagcctcttcgtgtgggttctagtaaataccgcttgctgtgttttgatgttggtggctaagctcatccagtgtattgtgtttggccctcttcgagtgagtgagagacagcatctcaaagacaaattttggaattttattttctacaagttcattttcatctttggtgtgctgaatgtccagacagtggaagaggtggtcatgtggtgcctctggtttgccggacttgtctttctgcacctgatggttcagctctgcaaggatcgatttgaatatctttccttctcgcccaccacgccgatgagcagccacggtcgagtcctgtccctgttggttgccatgctgctttcctgctgtggactggcggccgtctgctccatcaccggctacacccacggaatgcacaccttggctttcatggctgcagagtctcttcttgtgacagtgaggactgctcatgtgattttacgatacgtaattcacctctgggacctcaaccacgaagggacgtgggaaggaaaggggacgtatgtctattacacagactttgtcatggagctcactctcctgtccctggacctcatgcaccatattcacatgttgttatttggcaacatctggttatccatggccagcctggtcatctttatgcagctgcgttacctgtttcatgaggtgcaacgtcgaattcgtcggcacaagaactatctacgtgtggttggaaacatggaggccaggtttgcagttgcaactccagaggagctggctgtcaacaatgacgactgtgccatctgttgggactccatgcaggctgcgcggaaactgccctgtggacatcttttccacaactcctgtcttcgttcctggctagaacaagacacctcctgtccaacatgcagaatgtctcttaatattgccgacaataatcgtgtcagggaagaacatcaaggagagaacttggatgagaatttggttcctgtagcagcagccgaagggagacctcgcttaaaccaacacaatcacttcttccatttcgatggagatgacagctccatgcgtgttactgcccctgaagacgttccagtgggacaggaggtggaggtggtcgacagtgatactgatgctcctgacctgtggtctcggattgcgagctggctgccgagtttttcggttgaagtgatgcacaccaccaacattcttggcattacgcaggccagcaactcccagctcaatgcaatggctcatcagattcaagagatgtttccccaggttccataccatctggtactgcaggacctccagctgacacgctcagttgaaataacaacagacaatattttagaaggacggattcaagtaccttttcctacacagcggtcagatagcatcagacctgcattgaacagtcctgtggaaaggccaagcagtgaccaggaagagggagaaacttctgctcagaccgagcgtgtgccactggacctcagtcctcgcctggaggagacgctggacttcggcgaggtggaagtggagcccagtgaggtggaagacttcgaggctcgtgggagccgcttctccaagtctgctgatgagagacagcgcatgctggtgcagcgtaaggacgaactcctccagcaagctcgcaaacgtttcttgaacaaaagttctgaagatgatgcggcctcagagagcttcctcccctcggaaggtgcgtcctctgaccccgtgaccctgcgtcgaaggatgctggctgccgccgcggaacggaggcttcagaagcagcagacctcctagcgctcccttgccttcctcagctgcctcctgcgccctgtgcccgactgactggaggaggcctgtcccaattctgcccgctccatggaaaagcgggcttgactgcattgccgctgtataaagcatgtggtcttatagtgtttggacagctgataaatttaatccttctttgtaatactttctatgtgacatttctcttccccttagaaacactgcaaattttaactgtaggtatgatctcttctggtgttgactggactgcttggggtgggggacgatcaggaggaagtgagcagtcgcctgcctgcagcaggcagcttctactcctgcctcatgcatacgtcccacaaatgcaggtgtcctgagcaccacacccagtgggaagagtgtgggggaggcgcacagtgtgagcccgcccccacgtcgtggggtaacatctgttatcaaactgctgtcgttgttgtggaagcatgtagactgtgccagaggccagacccacgggctcatgcacccctgagccagcagggcatcttggaaaaggaactcttggttcgatacctggagcagaggaggggaaagtccagggctatagggtgtgatgaagtcacccctttctgtcccactacatctgggactgactttccgagcctccagtccaaagccggcttgatttccgtgaactctggtgctcctgcatctcatgagtgtgccccatgggtcccctcccctctcagcatttccttgtcccgtctggacctggggagtggttaggcagcaagctttggtttatggttttcattcattggtgaagtaaattaggcagtgctaaagcctgtgggtttggtccttgaacaagatgtgggccttgcaagatgggagagtaaaccttgaagggctttattaaagaaataaaaaagaacttttgtatcttttatcctgggagcactgcgttttcctagctgtgttattcctggtttaattcagcagagaaggtaaggtgtgaacctacctgccttggagagggcccaggtcccaaatctcttcaaattcttcacatgtttaactttaaggatttgaaccatgaagtcataggttacagacctcagttttatgccccattggattactttttttttttttttttttttactctttgaaagctttgttttgtggtagtccttttgggaagaatccagtattatctacaattattggcaaagtttaaatgtattttacataacggaaagtttttagaatgttgaaaagtaattgaaaaaggtgataggtaaatttttaggcaaagataatttatttcaataaatctttcaaaagccttaccttgaaatgctgttagtaaatttctgtgattttttttttttaatttgttttgctgagagcatagctatttgtttttattgtaaaacaataataataataaaaagcaaactctaattggtgtgttgtg

SEQ ID NO: 285154 - DNA, 2713 bp, Homo sapiens
caggggcagcagcgggagcagcgcggggcggagcggcgccagcagccaggagcggcccggcccggcccggcgcggcggcggcggcggcagcggcagcggcagcgacgccagagcccgtgggcgccgttcgcgaggccgccgcagaggcccggccgcagcgcagggaagcctgggggccagaggtcgccgctgccgccatgccgctgctcttcctcgagcgcttcccctggcccagcctccgcacctacacgggcctcagcggcctggccctgctgggcaccatcatcagcgcctaccgcgcgctcagccagcccgaggccggccccggcgagccggaccagctaacggcctcgctgcagcctgagccgccggcgcccgcccggccgagcgccgggggaccccgggcccgcgatgtggcccagtacctgctctcagacagcctcttcgtgtgggttctagtaaataccgcttgctgtgttttgatgttggtggctaagctcatccagtgtattgtgtttggccctcttcgagtgagtgagagacagcatctcaaagacaaattttggaattttattttctacaagttcattttcatctttggtgtgctgaatgtccagacagtggaagaggtggtcatgtggtgcctctggtttgccggacttgtctttctgcacctgatggttcagctctgcaaggatcgatttgaatatctttccttctcgcccaccacgccgatgagcagccacggtcgagtcctgtccctgttggttgccatgctgctttcctgctgtggactggcggccgtctgctccatcaccggctacacccacggaatgcacaccttggctttcatggctgcagagtctcttcttgtgacagtgaggactgctcatgtgattttacgatacgtaattcacctctgggacctcaaccacgaagggacgtgggaaggaaaggggacgtatgtctattacacagactttgtcatggagctcactctcctgtccctggacctcatgcaccatattcacatgttgttatttggcaacatctggttatccatggccagcctggtcatctttatgcagctgcgttacctgtttcatgaggtgcaacgtcgaattcgtcggcacaagaactatctacgtgtggttggaaacatggaggccaggtttgcagttgcaactccagaggagctggctgtcaacaatgacgactgtgccatctgttgggactccatgcaggctgcgcggaaactgccctgtggacatcttttccacaactcctgtcttcgttcctggctagaacaagacacctcctgtccaacatgcagaatgtctcttaatattgccgacaataatcgtgtcagggaagaacatcaaggagagaacttggatgagaatttggttcctgtagcagcagccgaagggagacctcgcttaaaccaacacaatcacttcttccatttcgatgggtctcggattgcgagctggctgccgagtttttcggttgaagtgatgcacaccaccaacattcttggcattacgcaggccagcaactcccagctcaatgcaatggctcatcagattcaagagatgtttccccaggttccataccatctggtactgcaggacctccagctgacacgctcagttgaaataacaacagacaatattttagaaggacggattcaagtaccttttcctacacagcggtcagatagcatcagacctgcattgaacagtcctgtggaaaggccaagcagtgaccaggaagagggagaaacttctgctcagaccgagcgtgtgccactggacctcagtcctcgcctggaggagacgctggacttcggcgaggtggaagtggagcccagtgaggtggaagacttcgaggctcgtgggagccgcttctccaagtctgctgatgagagacagcgcatgctggtgcagcgtaaggacgaactcctccagcaagctcgcaaacgtttcttgaacaaaagttctgaagatgatgcggcctcagagagcttcctcccctcggaaggtgcgtcctctgaccccgtgaccctgcgtcgaaggatgctggctgccgccgcggaacggaggcttcagaagcagcagacctcctagcgctcccttgccttcctcagctgcctcctgcgccctgtgcccgactgactggaggaggcctgtcccaattctgcccgctccatggaaaagcgggcttgactgcattgccgctgtataaagcatgtggtcttatagtgtttggacagctgataaatttaatccttctttgtaatactttctatgtgacatttctcttccccttagaaacactgcaaattttaactgtaggtatgatctcttctggtgttgactggactgcttggggtgggggacgatcaggaggaagtgagcagtcgcctgcctgcagcaggcagcttctactcctgcctcatgcatacgtcccacaaatgcaggtgtcctgagcaccacacccagtgggaagagtgtgggggaggcgcacagtgtgagcccgcccccacgtcgtggggtaacatctgttatcaaactgctgtcgttgtaaagcctgtgggtttggtccttgaacaagatgtgggccttgcaagatgggagagtaaaccttgaagggctttattaaagaaataaaaaagaacttttgtatcttttatcctgggagcactgcgttt

SEQ ID NO: 285155 - DNA, 2363 bp, Homo sapiens
caggggcagcagcgggagcagcgcggggcggagcggcgccagcagccaggagcggcccggcccggcccggcgcggcggcggcggcggcagcggcagcggcagcgacgccagagcccgtgggcgccgttcgcgaggccgccgcagaggcccggccgcagcgcagggaagcctgggggccagaggtcgccgctgccgccatgccgctgctcttcctcgagcgcttcccctggcccagcctccgcacctacacgggcctcagcggcctggccctgctgggcaccatcatcagcgcctaccgcgcgctcagccagcccgaggccggccccggcgagccggaccagctaacggcctcgctgcagcctgagccgccggcgcccgcccggccgagcgccgggggaccccgggcccgcgatgtggcccagtacctgctctcagacagcctcttcgtgtgggttctagtaaataccgcttgctgtgttttgatgttggtggctaagctcatccagtgtattgtgtttggccctcttcgagtgagtgagagacagcatctcaaagacaaattttggaattttattttctacaagttcattttcatctttggtgtgctgaatgtccagacagtggaagaggtggtcatgtggtgcctctggtttgccggacttgtctttctgcacctgatggttcagctctgcaaggatcgatttgaatatctttccttctcgcccaccacgccgatgagcagccacggtcgagtcctgtccctgttggttgccatgctgctttcctgctgtggactggcggccgtctgctccatcaccggctacacccacggaatgcacaccttggctttcatggctgcagagtctcttcttgtgacagtgaggactgctcatgtgattttacgatacgtaattcacctctgggacctcaaccacgaagggacgtgggaaggaaaggggacgtatgtctattacacagactttgtcatggagctcactctcctgtccctggacctcatgcaccatattcacatgttgttatttggcaacatctggttatccatggccagcctggtcatctttatgcagctgcgttacctgtttcatgaggtgcaacgtcgaattcgtcggcacaagaactatctacgtgtggttggaaacatggaggccaggtttgcagttgcaactccagaggagctggctgtcaacaatgacgactgtgccatctgttgggactccatgcaggctgcgcggaaactgccctgtggacatcttttccacaactcctgtcttcgttcctggctagaacaagacacctcctgtccaacatgcagaatgtctcttaatattgccgacaataatcgtgtcagggaagaacatcaaggagagaacttggatgagaatttggttcctgtagcagcagccgaagggagacctcgcttaaaccaacacaatcacttcttccatttcgatgggtctcggattgcgagctggctgccgagtttttcggttgaagtgatgcacaccaccaacattcttggcattacgcaggccagcaactcccagctcaatgcaatggctcatcagattcaagagatgtttccccaggttccataccatctggtactgcaggacctccagctgacacgctcagttgaaataacaacagacaatattttagaaggacggattcaagtaccttttcctacacagcggtcagatagcatcagacctgcattgaacagtcctgtggaaaggccaagcagtgaccaggaagagggagaaacttctgctcagaccgagcgtgtgccactggacctcagtcctcgcctggaggagacgctggacttcggcgaggtggaagtggagcccagtgaggtggaagacttcgaggctcgtgggagccgcttctccaagtctgctgatgagagacagcgcatgctggtgcagcgtaaggacgaactcctccagcaagctcgcaaacgtttcttgaacaaaagttctgaagatgatgcggcctcagagagcttcctcccctcggaaggtgcgtcctctgaccccgtgaccctgcgtcgaaggatgctggctgccgccgcggaacggaggcttcagaagcagcagacctcctagcgctcccttgccttcctcagctgcctcctgcgccctgtgcccgactgactggaggaggcctgtcccaattctgcccgctccatggaaaagcgggcttgactgcattgccgctgtataaagcatgtggtcttatagtgtttggacagctgctgtctacctgtccacctgcaaggattcaaagaagaaagcagagtgagggcactcactgccatcctgtggaagccacatcagcct

SEQ ID NO: 285156 - DNA, 614 bp, Homo sapiens
cgagctcggtaccctgcacacgccgaggccccgacccagtgggaagagtgtgggggaggcgcacagtgtgagcccgcccccacgtcgtggggtaacatctgttatcaaactgctgtcgttgttgtggaagcatgtagactgtgccagaggccagacccacgggctcatgcacccctgagccagcagggcatcttggaaaaggaactcttggttcgatacctggagcagaggaggggaaagtccagggctatagggtgtgatgaagtcacccctttctgtcccactacatctgggactgactttccgagcctccagtccaaagccggcttgatttccgtgaactctggtgctcctgcatctcatgagtgtgccccatgggtcccctcccctctcagcatttccttgtcccgtctggacctggggagtggttaggcagcaagctttggtttatggttttcattcattggtgaagtaaattaggcagtgctaaagcctgtgggtttggtccttgaacaagatgtgggccttgcaagatgggagagtaaaccttgaagggctttattaaagaaataaaaaagaacttttgtatcttttatcctgggagcactgcgttt

SEQ ID NO: 285157 - DNA, 1957 bp, Homo sapiens
caggggcagcagcgggagcagcgcggggcggagcggcgccagcagccaggagcggcccggcccggcccggcgcggcggcggcggcggcagcggcagcggcagcgacgccagagcccgtgggcgccgttcgcgaggccgccgcagaggcccggccgcagcgcagggaagcctgggggccagaggtcgccgctgccgccatgccgctgctcttcctcgagcgcttcccctggcccagcctccgcacctacacgggcctcagcggcctggccctgctgggcaccatcatcagcgcctaccgcgcgctcagccagcccgaggccggccccggcgagccggaccagctaacggcctcgctgcagcctgagccgccggcgcccgcccggccgagcgccgggggaccccgggcccgcgatgtggcccagtacctgctctcagacagcctcttcgtgtgggttctagtaaataccgcttgctgtgttttgatgttggtggctaagctcatccagtgtattgtgtttggccctcttcgagtgagtgagagacagcatctcaaagacaaattttggaattttattttctacaagttcattttcatctttggtgtgctgaatgtccagacagtggaagaggtggtcatgtggtgcctctggtttgccggacttgtctttctgcacctgatggttcagctctgcaaggatcgatttgaatatctttccttctcgcccaccacgccgatgagcagccacggtcgagtcctgtccctgttggttgccatgctgctttcctgctgtggactggcggccgtctgctccatcaccggctacacccacggaatgcacaccttggctttcatggctgcagagtctcttcttgtgacagtgaggactgctcatgtgattttacgatacgtaattcacctctgggacctcaaccacgaagggacgtgggaaggaaaggggacgtatgtctattacacagactttgtcatggagctcactctcctgtccctggacctcatgcaccatattcacatgttgttatttggcaacatctggttatccatggccagcctggtcatctttatgcagctgcgttacctgtttcatgaggtgcaacgtcgaattcgtcggcacaagaactatctacgtgtggttggaaacatggaggccaggtttgcagttgcaactccagaggagctggctgtcaacaatgacgactgtgccatctgttgggactccatgcaggctgcgcggaaactgccctgtggacatcttttccacaactcctgtcttcgttcctggctagaacaagacacctcctgtccaacatgcagaatgtctcttaatattgccgacaataatcgtgtcagggaagaacatcaaggagagaacttggatgagaatttggttcctgtagcagcagccgaagggagacctcgcttaaaccaacacaatcacttcttccatttcgatggagatgacagctccatgcgtgttactgcccctgaagacgttccagtgggacaggaggtggaggtggtcgacagtgatactgatgctcctgacctgtggtctcggattgcgagctggctgccgagtttttcggttgaagtgatgcacaccaccaacattcttggcattacgcaggccagcaactcccagctcaatgcaatggtaaggtctgctagctgctttaagaagatcactgggaattaggagggaaagaacagctagagcgtgtgtgccgggtatatgaccttgttggtcttactctgctctggcagagtggaaggatttttaggggcttctttttatttactgggaccatttacattcctgtgttttaaattttgaaacgttcattttatttctgtggcggataatctaaccttttctgaacactactaggttcactctgttgtgatctaggcctaccttgggactccttcgattttagc

SEQ ID NO: 285158 - DNA, 1221 bp, Homo sapiens
acaggggacacccactcctgccaccttgggagcggttgccagacagagccgcactgggtgctggtgtcatccagggaccccacacacttccttaaatgtgatcctgcttccctctgggcagctgcatcctctcctcctgcaggaccgtctggaaacttggctctcagtttgatctcccttctctcctctgcctgccccaagcccctctttctaaaaaagtgatggaatattcatggggttatttcttgaaaatacttggcggcctccatgcttctgttttctttgagccaggtggtcaggagggtttacaaagaatgcctgggctcccccgcaggtgccggcagatggggtagcgaatggtcctgtgcctccacctgctccgggagggagtctcccgtctctaggcctggccccttcctaaccctccacgtatcctgttctccagagacttcagaacccactcctgagaacagcggagccaggcgcttagaggaagaccaaatgctgccaggacacggattgtccagggattacattccagcatcttattaggtatctggatctgttcggaaaaaaattagaaactatgtataaaacttaaaaatattcaagtatcaaaaggttatttaggatgaaagttttaaaacaagtcatcagcaagctgctgccaccaagtggagacttatacaaaagatgagcgagtccactgagctgagaggacagaaatgaagtcacctgtgctggggcaggggcagggacactgggggcagggagtgtgtgggcagagaagccagagaagtccaggcctgtggaagccaaacaggagagcgtgggccggaagggcggtcaggatcgggggacgaggtcgctctccctggagaacgaaccctaaagtgcgtagcctgggattccctccctgggggtcctgtcccccgacatttcacaggccttctgagctgccttccaaggaggactaacacggcaacaaaagacccatttctgcacaaaaatccttctggaaagaaaaagaagaaagccaagaatggagtcaaaacgctacccagtgctgaccaagcctctcaaaccctgttagaagtggagtgtggtttctaagtcagggaaatggaagaggccccacccacacagggacagggccacggcccccacaggatgaagcagcagcgtttattcaagatacaacagtgagggaatccagtcacg

SEQ ID NO: 285159 - DNA, 1323 bp, Homo sapiens
acaggggacacccactcctgccaccttgggagcggttgccagacagagccgcactgggtgctggtgtcatccagggaccccacacacttccttaaatgtgatcctgcttccctctgggcagctgcatcctctcctcctgcaggaccgtctggaaacttggctctcagtttgatctcccttctctcctctgcctgccccaagcccctctttctaaaaaagtgatggaatattcatggggttatttcttgaaaatacttggcggcctccatgcttctgttttctttgagccaggtggtcaggagggtttacaaagaatgcctgggctcccccgcaggtgccggcagatggggtagcgaatggtcctgtgcctccacctgctccgggagggagtctcccgtctctaggcctggccccttcctaaccctccacgtatcctgttctccagagacttcagaacccactcctgagaacagcggagccaggcgcttagaggaagaccaaatgctgccaggacacggattgtccagggattacattccagcatcttattaggctggagtacagtggctccatcatggatcactgcagcctctaactcctgggctcaagcaatcctcctgtgtcagcctcccagatacctaggattacagatggaccgaagcagagggtgctgtttcaacgccaccaccaggagagaggcagaggggctgtgccgtgctagagtcctcagggagggagtgacctcgaccctggctgtgctgcaagctgactccagccttggggtcagcagcacccggcgaacagcagcaggaggagccgctagagcagctgctcatgggcagagctgccctcgggcaactcctgccaccaccccctccccagggagcccaaggcaggggaggctcagcatggaatgaaacaggggagtgagggacacaaggaggtgggaagtgggagggtcccagccccaccaagtacacagagaccccctcgtcgtcctggacaccacaggggcacctgcaggctgggagaccaggtcctctgtgcatgggcccgggaggcagacctgccctaagggtgatgcagaggccacaggtgctgcacgcaccagcacccgctctagacatcagcctccaggttgactaagggtcaggtcatgtttgaaaccatgcttggctggaccaggacccatggcaagagcacccaggcaccctccttcagccctggtctgcaggaaggaggacagcagactttaggaccccatagcacagcagtgctgactatttcagcctcttggtctccttgaggagtagggatggggag

SEQ ID NO: 285160 - DNA, 867 bp, Homo sapiens
gtttgctacattgcccagactggtctcaaacacctgggttcagttgtcctgcctcggcctcccaaagtgctgggattacaggcatgagccaccacacccgaacacttggggtggttttaagcccccagcaaggtgcaccagcaggaccaggaggtggcctgggcaccccctatcactcccatccatgcaaacctagggaccgaagcagagggtgctgtttcaacgccaccaccaggagagaggcagaggggctgtgccgtgctagagtcctcagggagggagtgacctcgaccctggctgtgctgcaagctgactccagccttggggtcagcagcacccggcgaacagcagcaggaggagccgctagagcagctgctcatgggcagagctgccctcgggcaactcctgccaccaccccctccccagggagcccaaggcaggggaggctcagcatggaatgaaacaggggagtgagggacacaaggaggtgggaagtgggagggtcccagccccaccaagtacacagagaccccctcgtcgtcctggacaccacaggggcacctgcaggctgggagaccaggtcctctgtgcatgggcccgggaggcagacctgccctaagggtgatgcagaggccacaggtgctgcacgcaccagcacccgctctagacatcagcctccaggttgactaagggtcaggtcatgtttgaaaccatgcttggctggaccaggacccatggcaagagcacccaggcaccctccttcagccctggtctgcaggaaggaggacagcagactttaggaccccatagcacagcagtgctgactatttcagcctcttggtctccttgaggagtagggatggggag

SEQ ID NO: 285161 - DNA, 558 bp, Homo sapiens
cactttctccaggccgggccgggcttggtaaacctcagccgtgcctgggtagaggacgccgggctgggccgagcgggggtggaatgagggcgtctagaacagagaaaactaagatggggtcgtccccccagtaatctggaaaacagttacagcaacaggctcctctcatcagacggcagtgctggtcgtttcctcactggtttgcggggaaggctgggcagaaaaaggatgcaaccttgttctcaaccacttgctatctcgtgattcagggattggatgagtctctatggtttgttttgccctgaagagcagaaggcttctgtcccaactggtgttgccaaagcaacatattaattccatgccatgatcctgggtcaagatctgcacaatctgattgggcatgtcacctcggatggcaagggagtggaagtggtcaaaatcatggagtcccagctttcggagacgccttgcagctgcccggtgaagaaaatgcacaatggaaaccacccagatgtccagtgatagtggcatggacaaataaatgtggtataatcatga

SEQ ID NO: 285162 - DNA, 682 bp, Homo sapiens
cactttctccaggccgggccgggcttggtaaacctcagccgtgcctgggtagaggacgccgggctgggccgagcgggggtggaatgagggcgtctagaacagagaaaactaagatggggtcgtccccccagtaatctggaaaacagttacagcaacaggctcctctcatcagacggcagtgctggtcgtttcctcactggtttgcggggaaggctgggcagaaaaaggatgcaaccttgttctcaaccacttgctatctcgtgattcagggattggatgagtctctatggtttgttttgccctgaagagcagaaggcttctgtcccaactggtgttgccaaagcaacatattaattccatgccatgatcctgggtcaagatctgcacaatctgattgggcatgtcacctcggatggcaagggagtggaagtggtcaaaatcatggagtcccagctttcggagacgccttgcagctgcccggtaacacttccagggttggggctccacaaggaggtagtggcagagggaggaaagatgggccaggaactcccataggccatggtctccatgattcagatgaatccacatggttattgacatgcagaagccaatgtcaaaaactgaacgtccaaattggcttaagaaagagctcaagagaaccttccgggtcctttgattcatg

SEQ ID NO: 285163 - DNA, 2829 bp, Homo sapiens
catgttcgtccatcacccctcccccctttcccaaggacaatctgcaagaaagcagcggcggaggagagctaagactaaaagagtggatcatgacccatgaagagcaccatgcagccaaaaccctggggattggcaaagccattgctgtcttaacctctggtggagatgcccaaggtatgaatgctgctgtcagggctgtggttcgagttggtatcttcaccggtgcccgtgtcttctttgtccatgagggttatcaaggcctggtggatggtggagatcacatcaaggaagccacctgggagagcgtttcgatgatgcttcagctgggaggcacggtgattggaagtgcccggtgcaaggactttcgggaacgagaaggacgactccgagctgcctacaacctggtgaagcgtgggatcaccaatctctgtgtcattgggggtgatggcagcctcactggggctgacaccttccgttctgagtggagtgacttgttgagtgacctccagaaagcaggtaagatcacagatgaggaggctacgaagtccagctacctgaacattgtgggcctggttgggtcaattgacaatgacttctgtggcaccgatatgaccattggcactgactctgccctgcatcggatcatggaaattgtagatgccatcactaccactgcccagagccaccagaggacatttgtgttagaagtaatgggccgccactgtggatacctggcccttgtcacctctctgtcctgtggggccgactgggtttttattcctgaatgtccaccagatgacgactgggaggaacacctttgtcgccgactcagcgagacaaggacccgtggttctcgtctcaacatcatcattgtggctgagggtgcaattgacaagaatggaaaaccaatcacctcagaagacatcaagaatctggtggttaagcgtctgggatatgacacccgggttactgtcttggggcatgtgcagaggggtgggacgccatcagcctttgacagaattctgggcagcaggatgggtgtggaagcagtgatggcacttttggaggggaccccagataccccagcctgtgtagtgagcctctctggtaaccaggctgtgcgcctgcccctcatggaatgtgtccaggtgaccaaagatgtgaccaaggccatggatgagaagaaatttgacgaagccctgaagctgagaggccggagcttcatgaacaactgggaggtgtacaagcttctagctcatgtcagacccccggtatctaagagtggttcgcacacagtggctgtgatgaacgtgggggctccggctgcaggcatgaatgctgctgttcgctccactgtgaggattggccttatccagggcaaccgagtgctcgttgtccatgatggtttcgagggcctggccaaggggcagatagaggaagctggctggagctatgttgggggctggactggccaaggtggctctaaacttgggactaaaaggactctacccaagaagagctttgaacagatcagtgccaatataactaagtttaacattcagggccttgtcatcattgggggctttgaggcttacacagggggcctggaactgatggagggcaggaagcagtttgatgagctctgcatcccatttgtggtcattcctgctacagtctccaacaatgtccctggctcagacttcagcgttggggctgacacagcactcaatactatctgcacaacctgtgaccgcatcaagcagtcagcagctggcaccaagcgtcgggtgtttatcattgagactatgggtggctactgtggctacctggctaccatggctggactggcagctggggccgatgctgcctacatttttgaggagcccttcaccattcgagacctgcaggcaaatgttgaacatctggtgcaaaagatgaaaacaactgtgaaaaggggcttggtgttaaggaatgaaaagtgcaatgagaactataccactgacttcattttcaacctgtactctgaggaggggaagggcatcttcgacagcaggaagaatgtgcttggtcacatgcagcagggtgggagcccaaccccatttgataggaattttgccactaagatgggcgccaaggctatgaactggatgtctgggaaaatcaaagagagttaccgtaatgggcggatctttgccaatactccagattcgggctgtgttctggggatgcgtaagagggctctggtcttccaaccagtggctgagctgaaggaccagacagattttgagcatcgaatccccaaggaacagtggtggctgaaactgaggcccatcctcaaaatcctagccaagtacgagattgacttggacacttcagaccatgcccacctggagcacatcacccggaagcggtccggggaagctgccgtctaaacctctctggagtgaggggaatagattacctgatcatggtcagctcacaccctaataagtccacatcttctcagtgttttagctgtttttttcattaggtttccttttattctgtaccttgcagccatgaccagttctggccaggagctggaggagcaggcagtgggtgggagctccttttaggtagaatttaacatgacttctgccccagctttatctgtcacacaaggctgggcacctctagtgctactgctagatatcacttactcagttagaattttcctaaaaataagctttatttatttctttgtgataacaaagagtcttggttcctctactacttttactacagtgacaaattgtaactacactaataaatgccaactggtcactgtga

SEQ ID NO: 285164 - DNA, 2797 bp, Homo sapiens
catgttcgtccatcacccctcccccctttcccaaggacaatctgcaagaaagcagcggcggaggagagctaagactaaaagagtggatcatgacccatgaagagcaccatgcagccaaaaccctggggattggcaaagccattgctgtcttaacctctggtggagatgcccaaggtatgaatgctgctgtcagggctgtggttcgagttggtatcttcaccggtgcccgtgtcttctttgtccatgagggttatcaaggcctggtggatggtggagatcacatcaaggaagccacctgggagagcgtttcgatgatgcttcagctgggaggcacggtgattggaagtgcccggtgcaaggactttcgggaacgagaaggacgactccgagctgcctacaacctggtgaagcgtgggatcaccaatctctgtgtcattgggggtgatggcagcctcactggggctgacaccttccgttctgagtggagtgacttgttgagtgacctccagaaagcaggtaagatcacagatgaggaggctacgaagtccagctacctgaacattgtgggcctggttgggtcaattgacaatgacttctgtggcaccgatatgaccattggcactgactctgccctgcatcggatcatggaaattgtagatgccatcactaccactgcccagagccaccagaggacatttgtgttagaagtaatgggccgccactgtggatacctggcccttgtcacctctctgtcctgtggggccgactgggtttttattcctgaatgtccaccagatgacgactgggaggaacacctttgtcgccgactcagcgagacaaggacccgtggttctcgtctcaacatcatcattgtggctgagggtgcaattgacaagaatggaaaaccaatcacctcagaagacatcaagaatctggtggttaagcgtctgggatatgacacccgggttactgtcttggggcatgtgcagagggggcagcaggatgggtgtggaagcagtgatggcacttttggaggggaccccagataccccagcctgtgtagtgagcctctctggtaaccaggctgtgcgcctgcccctcatggaatgtgtccaggtgaccaaagatgtgaccaaggccatggatgagaagaaatttgacgaagccctgaagctgagaggccggagcttcatgaacaactgggaggtgtacaagcttctagctcatgtcagacccccggtatctaagagtggttcgcacacagtggctgtgatgaacgtgggggctccggctgcaggcatgaatgctgctgttcgctccactgtgaggattggccttatccagggcaaccgagtgctcgttgtccatgatggtttcgagggcctggccaaggggcagatagaggaagctggctggagctatgttgggggctggactggccaaggtggctctaaacttgggactaaaaggactctacccaagaagagctttgaacagatcagtgccaatataactaagtttaacattcagggccttgtcatcattgggggctttgaggcttacacagggggcctggaactgatggagggcaggaagcagtttgatgagctctgcatcccatttgtggtcattcctgctacagtctccaacaatgtccctggctcagacttcagcgttggggctgacacagcactcaatactatctgcacaacctgtgaccgcatcaagcagtcagcagctggcaccaagcgtcgggtgtttatcattgagactatgggtggctactgtggctacctggctaccatggctggactggcagctggggccgatgctgcctacatttttgaggagcccttcaccattcgagacctgcaggcaaatgttgaacatctggtgcaaaagatgaaaacaactgtgaaaaggggcttggtgttaaggaatgaaaagtgcaatgagaactataccactgacttcattttcaacctgtactctgaggaggggaagggcatcttcgacagcaggaagaatgtgcttggtcacatgcagcagggtgggagcccaaccccatttgataggaattttgccactaagatgggcgccaaggctatgaactggatgtctgggaaaatcaaagagagttaccgtaatgggcggatctttgccaatactccagattcgggctgtgttctggggatgcgtaagagggctctggtcttccaaccagtggctgagctgaaggaccagacagattttgagcatcgaatccccaaggaacagtggtggctgaaactgaggcccatcctcaaaatcctagccaagtacgagattgacttggacacttcagaccatgcccacctggagcacatcacccggaagcggtccggggaagctgccgtctaaacctctctggagtgaggggaatagattacctgatcatggtcagctcacaccctaataagtccacatcttctcagtgttttagctgtttttttcattaggtttccttttattctgtaccttgcagccatgaccagttctggccaggagctggaggagcaggcagtgggtgggagctccttttaggtagaatttaacatgacttctgccccagctttatctgtcacacaaggctgggcacctctagtgctactgctagatatcacttactcagttagaattttcctaaaaataagctttatttatttctttgtgataacaaagagtcttggttcctctactacttttactacagtgacaaattgtaactacactaataaatgccaactggtcactgtga

SEQ ID NO: 285165 - DNA, 2361 bp, Homo sapiens
catgttcgtccatcacccctcccccctttcccaaggacaatctgcaagaaagcagcggcggaggagagctaagactaaaagagtggatcatgacccatgaagagcaccatgcagccaaaaccctggggattggcaaagccattgctgtcttaacctctggtggagatgcccaaggtatgaatgctgctgtcagggctgtggttcgagttggtatcttcaccggtgcccgtgtcttctttgtccatgagggttatcaaggcctggtggatggtggagatcacatcaaggaagccacctgggagagcgtttcgatgatgcttcagctgggaggcacggtgattggaagtgcccggtgcaaggactttcgggaacgagaaggacgactccgagctgcctacaacctggtgaagcgtgggatcaccaatctctgtgtcattgggggtgatggcagcctcactggggctgacaccttccgttctgagtggagtgacttgttgagtgacctccagaaagcaggtaagatcacagatgaggaggctacgaagtccagctacctgaacattgtgggcctggttgggtcaattgacaatgacttctgtggcaccgatatgaccattggcactgactctgccctgcatcggatcatggaaattgtagatgccatcactaccactgcccagagccaccagaggacatttgtgttagaagtaatgggccgccactgtggatacctggcccttgtcacctctctgtcctgtggggccgactgggtttttattcctgaatgtccaccagatgacgactgggaggaacacctttgtcgccgactcagcgagacaaggacccgtggttctcgtctcaacatcatcattgtggctgagggtgcaattgacaagaatggaaaaccaatcacctcagaagacatcaagaatctggtggttaagcgtctgggatatgacacccgggttactgtcttggggcatgtgcagaggggtgggacgccatcagcctttgacagaattctgactaaaaggactctacccaagaagagctttgaacagatcagtgccaatataactaagtttaacattcagggccttgtcatcattgggggctttgaggcttacacagggggcctggaactgatggagggcaggaagcagtttgatgagctctgcatcccatttgtggtcattcctgctacagtctccaacaatgtccctggctcagacttcagcgttggggctgacacagcactcaatactatctgcacaacctgtgaccgcatcaagcagtcagcagctggcaccaagcgtcgggtgtttatcattgagactatgggtggctactgtggctacctggctaccatggctggactggcagctggggccgatgctgcctacatttttgaggagcccttcaccattcgagacctgcaggcaaatgttgaacatctggtgcaaaagatgaaaacaactgtgaaaaggggcttggtgttaaggaatgaaaagtgcaatgagaactataccactgacttcattttcaacctgtactctgaggaggggaagggcatcttcgacagcaggaagaatgtgcttggtcacatgcagcagggtgggagcccaaccccatttgataggaattttgccactaagatgggcgccaaggctatgaactggatgtctgggaaaatcaaagagagttaccgtaatgggcggatctttgccaatactccagattcgggctgtgttctggggatgcgtaagagggctctggtcttccaaccagtggctgagctgaaggaccagacagattttgagcatcgaatccccaaggaacagtggtggctgaaactgaggcccatcctcaaaatcctagccaagtacgagattgacttggacacttcagaccatgcccacctggagcacatcacccggaagcggtccggggaagctgccgtctaaacctctctggagtgaggggaatagattacctgatcatggtcagctcacaccctaataagtccacatcttctcagtgttttagctgtttttttcattaggtttccttttattctgtaccttgcagccatgaccagttctggccaggagctggaggagcaggcagtgggtgggagctccttttaggtagaatttaacatgacttctgccccagctttatctgtcacacaaggctgggcacctctagtgctactgctagatatcacttactcagttagaattttcctaaaaataagctttatttatttctttgtgataacaaagagtcttggttcctctactacttttactacagtgacaaattgtaactacactaataaatgccaactggtcactgtga

SEQ ID NO: 285166 - DNA, 2691 bp, Homo sapiens
tagggcgatcgcgaccgcgcgccgcggacgctggggagtggatcatgacccatgaagagcaccatgcagccaaaaccctggggattggcaaagccattgctgtcttaacctctggtggagatgcccaaggtatgaatgctgctgtcagggctgtggttcgagttggtatcttcaccggtgcccgtgtcttctttgtccatgagggttatcaaggcctggtggatggtggagatcacatcaaggaagccacctgggagagcgtttcgatgatgcttcagctgggaggcacggtgattggaagtgcccggtgcaaggactttcgggaacgagaaggacgactccgagctgcctacaacctggtgaagcgtgggatcaccaatctctgtgtcattgggggtgatggcagcctcactggggctgacaccttccgttctgagtggagtgacttgttgagtgacctccagaaagcaggtaagatcacagatgaggaggctacgaagtccagctacctgaacattgtgggcctggttgggtcaattgacaatgacttctgtggcaccgatatgaccattggcactgactctgccctgcatcggatcatggaaattgtagatgccatcactaccactgcccagagccaccagaggacatttgtgttagaagtaatgggccgccactgtggatacctggcccttgtcacctctctgtcctgtggggccgactgggtttttattcctgaatgtccaccagatgacgactgggaggaacacctttgtcgccgactcagcgagacaaggacccgtggttctcgtctcaacatcatcattgtggctgagggtgcaattgacaagaatggaaaaccaatcacctcagaagacatcaagaatggcagcaggatgggtgtggaagcagtgatggcacttttggaggggaccccagataccccagcctgtgtagtgagcctctctggtaaccaggctgtgcgcctgcccctcatggaatgtgtccaggtgaccaaagatgtgaccaaggccatggatgagaagaaatttgacgaagccctgaagctgagaggccggagcttcatgaacaactgggaggtgtacaagcttctagctcatgtcagacccccggtatctaagagtggttcgcacacagtggctgtgatgaacgtgggggctccggctgcaggcatgaatgctgctgttcgctccactgtgaggattggccttatccagggcaaccgagtgctcgttgtccatgatggtttcgagggcctggccaaggggcagatagaggaagctggctggagctatgttgggggctggactggccaaggtggctctaaacttgggactaaaaggactctacccaagaagagctttgaacagatcagtgccaatataactaagtttaacattcagggccttgtcatcattgggggctttgaggcttacacagggggcctggaactgatggagggcaggaagcagtttgatgagctctgcatcccatttgtggtcattcctgctacagtctccaacaatgtccctggctcagacttcagcgttggggctgacacagcactcaatactatctgcacaacctgtgaccgcatcaagcagtcagcagctggcaccaagcgtcgggtgtttatcattgagactatgggtggctactgtggctacctggctaccatggctggactggcagctggggccgatgctgcctacatttttgaggagcccttcaccattcgagacctgcaggcaaatgttgaacatctggtgcaaaagatgaaaacaactgtgaaaaggggcttggtgttaaggaatgaaaagtgcaatgagaactataccactgacttcattttcaacctgtactctgaggaggggaagggcatcttcgacagcaggaagaatgtgcttggtcacatgcagcagggtgggagcccaaccccatttgataggaattttgccactaagatgggcgccaaggctatgaactggatgtctgggaaaatcaaagagagttaccgtaatgggcggatctttgccaatactccagattcgggctgtgttctggggatgcgtaagagggctctggtcttccaaccagtggctgagctgaaggaccagacagattttgagcatcgaatccccaaggaacagtggtggctgaaactgaggcccatcctcaaaatcctagccaagtacgagattgacttggacacttcagaccatgcccacctggagcacatcacccggaagcggtccggggaagctgccgtctaaacctctctggagtgaggggaatagattacctgatcatggtcagctcacaccctaataagtccacatcttctcagtgttttagctgtttttttcattaggtttccttttattctgtaccttgcagccatgaccagttctggccaggagctggaggagcaggcagtgggtgggagctccttttaggtagaatttaacatgacttctgccccagctttatctgtcacacaaggctgggcacctctagtgctactgctagatatcacttactcagttagaattttcctaaaaataagctttatttatttctttgtgataacaaagagtcttggttcctctactacttttactacagtgacaaattgtaactacactaataaatgccaactggtcactgtga

SEQ ID NO: 285167 - DNA, 2662 bp, Homo sapiens
gccttcacagcaccggaagagtcgctaggtggctgaagaggagggggctggggcaggaggtcaaagaacagagaggcagccatgcataaagacgagtttcatctgaaatttttcatgtgtgtgattcagtctcgccagttagtcaggactcctcagagaacagctggggaagcttctacttccagcatgctcataccaaagccaccaccaaagacagacatcttgaagagtctagatactatggatgatccagacaccgtgggaagcatacctgttttcaaaactgagtggatcatgacccatgaagagcaccatgcagccaaaaccctggggattggcaaagccattgctgtcttaacctctggtggagatgcccaaggtatgaatgctgctgtcagggctgtggttcgagttggtatcttcaccggtgcccgtgtcttctttgtccatgagggttatcaaggcctggtggatggtggagatcacatcaaggaagccacctgggagagcgtttcgatgatgcttcagctgggaggcacggtgattggaagtgcccggtgcaaggactttcgggaacgagaaggacgactccgagctgcctacaacctggtgaagcgtgggatcaccaatctctgtgtcattgggggtgatggcagcctcactggggctgacaccttccgttctgagtggagtgacttgttgagtgacctccagaaagcagatgacgactgggaggaacacctttgtcgccgactcagcgagacaaggacccgtggttctcgtctcaacatcatcattgtggctgagggtgcaattgacaagaatggaaaaccaatcacctcagaagacatcaagaatggcagcaggatgggtgtggaagcagtgatggcacttttggaggggaccccagataccccagcctgtgtagtgagcctctctggtaaccaggctgtgcgcctgcccctcatggaatgtgtccaggtgaccaaagatgtgaccaaggccatggatgagaagaaatttgacgaagccctgaagctgagaggccggagcttcatgaacaactgggaggtgtacaagcttctagctcatgtcagacccccggtatctaagagtggttcgcacacagtggctgtgatgaacgtgggggctccggctgcaggcatgaatgctgctgttcgctccactgtgaggattggccttatccagggcaaccgagtgctcgttgtccatgatggtttcgagggcctggccaaggggcagatagaggaagctggctggagctatgttgggggctggactggccaaggtggctctaaacttgggactaaaaggactctacccaagaagagctttgaacagatcagtgccaatataactaagtttaacattcagggccttgtcatcattgggggctttgaggcttacacagggggcctggaactgatggagggcaggaagcagtttgatgagctctgcatcccatttgtggtcattcctgctacagtctccaacaatgtccctggctcagacttcagcgttggggctgacacagcactcaatactatctgcacaacctgtgaccgcatcaagcagtcagcagctggcaccaagcgtcgggtgtttatcattgagactatgggtggctactgtggctacctggctaccatggctggactggcagctggggccgatgctgcctacatttttgaggagcccttcaccattcgagacctgcaggcaaatgttgaacatctggtgcaaaagatgaaaacaactgtgaaaaggggcttggtgttaaggaatgaaaagtgcaatgagaactataccactgacttcattttcaacctgtactctgaggaggggaagggcatcttcgacagcaggaagaatgtgcttggtcacatgcagcagggtgggagcccaaccccatttgataggaattttgccactaagatgggcgccaaggctatgaactggatgtctgggaaaatcaaagagagttaccgtaatgggcggatctttgccaatactccagattcgggctgtgttctggggatgcgtaagagggctctggtcttccaaccagtggctgagctgaaggaccagacagattttgagcatcgaatccccaaggaacagtggtggctgaaactgaggcccatcctcaaaatcctagccaagtacgagattgacttggacacttcagaccatgcccacctggagcacatcacccggaagcggtccggggaagctgccgtctaaacctctctggagtgaggggaatagattacctgatcatggtcagctcacaccctaataagtccacatcttctcagtgttttagctgtttttttcattaggtttccttttattctgtaccttgcagccatgaccagttctggccaggagctggaggagcaggcagtgggtgggagctccttttaggtagaatttaacatgacttctgccccagctttatctgtcacacaaggctgggcacctctagtgctactgctagatatcacttactcagttagaattttcctaaaaataagctttatttatttctttgtgataacaaagagtcttggttcctctactacttttactacagtgacaaattgtaactacactaataaatgccaactggtcactgtga

SEQ ID NO: 285168 - DNA, 2238 bp, Homo sapiens
cacaccacctgagtccacacagagctgaaggggttgggagatgtctcccaactgctgattaatgctgagtttctcaaaattaacttttgttcctttggcttaaagctctggccccagctgggccctcctgctgctcagcagtgcttccatgcattctcaatcaacatttgctggcccctaccctttgggtctatttattgagtgcttactatgtaccacgtaccatgatgagtgaataacacattatctcatttaatcctcttggttctacatttaataataggtcctagtatcctaattttacacagaaggagaaaccaaggttcagagacatcaagaatctggtggttaagcgtctgggatatgacacccgggttactgtcttggggcatgtgcagaggggtgggacgccatcagcctttgacagaattctgggcagcaggatgggtgtggaagcagtgatggcacttttggaggggaccccagataccccagcctgtgtagtgagcctctctggtaaccaggctgtgcgcctgcccctcatggaatgtgtccaggtgaccaaagatgtgaccaaggccatggatgagaagaaatttgacgaagccctgaagctgagaggccggagcttcatgaacaactgggaggtgtacaagcttctagctcatgtcagacccccggtatctaagagtggttcgcacacagtggctgtgatgaacgtgggggctccggctgcaggcatgaatgctgctgttcgctccactgtgaggattggccttatccagggcaaccgagtgctcgttgtccatgatggtttcgagggcctggccaaggggcagatagaggaagctggctggagctatgttgggggctggactggccaaggtggctctaaacttgggactaaaaggactctacccaagaagagctttgaacagatcagtgccaatataactaagtttaacattcagggccttgtcatcattgggggctttgaggcttacacagggggcctggaactgatggagggcaggaagcagtttgatgagctctgcatcccatttgtggtcattcctgctacagtctccaacaatgtccctggctcagacttcagcgttggggctgacacagcactcaatactatctgcacaacctgtgaccgcatcaagcagtcagcagctggcaccaagcgtcgggtgtttatcattgagactatgggtggctactgtggctacctggctaccatggctggactggcagctggggccgatgctgcctacatttttgaggagcccttcaccattcgagacctgcaggcaaatgttgaacatctggtgcaaaagatgaaaacaactgtgaaaaggggcttggtgttaaggaatgaaaagtgcaatgagaactataccactgacttcattttcaacctgtactctgaggaggggaagggcatcttcgacagcaggaagaatgtgcttggtcacatgcagcagggtgggagcccaaccccatttgataggaattttgccactaagatgggcgccaaggctatgaactggatgtctgggaaaatcaaagagagttaccgtaatgggcggatctttgccaatactccagattcgggctgtgttctggggatgcgtaagagggctctggtcttccaaccagtggctgagctgaaggaccagacagattttgagcatcgaatccccaaggaacagtggtggctgaaactgaggcccatcctcaaaatcctagccaagtacgagattgacttggacacttcagaccatgcccacctggagcacatcacccggaagcggtccggggaagctgccgtctaaacctctctggagtgaggggaatagattacctgatcatggtcagctcacaccctaataagtccacatcttctcagtgttttagctgtttttttcattaggtttccttttattctgtaccttgcagccatgaccagttctggccaggagctggaggagcaggcagtgggtgggagctccttttaggtagaatttaacatgacttctgccccagctttatctgtcacacaaggctgggcacctctagtgctactgctagatatcacttactcagttagaattttcctaaaaataagctttatttatttctttgtgataacaaagagtcttggttcctctactacttttactacagtgacaaattgtaactacactaataaatgccaactggtcactgtga

SEQ ID NO: 285169 - DNA, 1972 bp, Homo sapiens
ctgctcaccagccgcagccagcggcccagctgcaccgcaccaccaactttttcatcgacaacatcctgaggccggacttcggctgcaaaaaggagcagccgccaccgcagcttctggtggctgcggcggccagagaaggcgcaggaggaggaggctgacagaattctgggcagcaggatgggtgtggaagcagtgatggcacttttggaggggaccccagataccccagcctgtgtagtgagcctctctggtaaccaggctgtgcgcctgcccctcatggaatgtgtccaggtgaccaaagatgtgaccaaggccatggatgagaagaaatttgacgaagccctgaagctgagaggccggagcttcatgaacaactgggaggtgtacaagcttctagctcatgtcagacccccggtatctaagagtggttcgcacacagtggctgtgatgaacgtgggggctccggctgcaggcatgaatgctgctgttcgctccactgtgaggattggccttatccagggcaaccgagtgctcgttgtccatgatggtttcgagggcctggccaaggggcagatagaggaagctggctggagctatgttgggggctggactggccaaggtggctctaaacttgggactaaaaggactctacccaagaagagctttgaacagatcagtgccaatataactaagtttaacattcagggccttgtcatcattgggggctttgaggcttacacagggggcctggaactgatggagggcaggaagcagtttgatgagctctgcatcccatttgtggtcattcctgctacagtctccaacaatgtccctggctcagacttcagcgttggggctgacacagcactcaatactatctgcacaacctgtgaccgcatcaagcagtcagcagctggcaccaagcgtcgggtgtttatcattgagactatgggtggctactgtggctacctggctaccatggctggactggcagctggggccgatgctgcctacatttttgaggagcccttcaccattcgagacctgcaggcaaatgttgaacatctggtgcaaaagatgaaaacaactgtgaaaaggggcttggtgttaaggaatgaaaagtgcaatgagaactataccactgacttcattttcaacctgtactctgaggaggggaagggcatcttcgacagcaggaagaatgtgcttggtcacatgcagcagggtgggagcccaaccccatttgataggaattttgccactaagatgggcgccaaggctatgaactggatgtctgggaaaatcaaagagagttaccgtaatgggcggatctttgccaatactccagattcgggctgtgttctggggatgcgtaagagggctctggtcttccaaccagtggctgagctgaaggaccagacagattttgagcatcgaatccccaaggaacagtggtggctgaaactgaggcccatcctcaaaatcctagccaagtacgagattgacttggacacttcagaccatgcccacctggagcacatcacccggaagcggtccggggaagctgccgtctaaacctctctggagtgaggggaatagattacctgatcatggtcagctcacaccctaataagtccacatcttctcagtgttttagctgtttttttcattaggtttccttttattctgtaccttgcagccatgaccagttctggccaggagctggaggagcaggcagtgggtgggagctccttttaggtagaatttaacatgacttctgccccagctttatctgtcacacaaggctgggcacctctagtgctactgctagatatcacttactcagttagaattttcctaaaaataagctttatttatttctttgtgataacaaagagtcttggttcctctactacttttactacagtgacaaattgtaactacactaataaatgccaactggtcactgtga

SEQ ID NO: 285170 - DNA, 2794 bp, Homo sapiens
caagaaagagacggttcaagggaattaccaggaggcgatgagccagagtggatcatgacccatgaagagcaccatgcagccaaaaccctggggattggcaaagccattgctgtcttaacctctggtggagatgcccaaggtatgaatgctgctgtcagggctgtggttcgagttggtatcttcaccggtgcccgtgtcttctttgtccatgagggttatcaaggcctggtggatggtggagatcacatcaaggaagccacctgggagagcgtttcgatgatgcttcagctgggaggcacggtgattggaagtgcccggtgcaaggactttcgggaacgagaaggacgactccgagctgcctacaacctggtgaagcgtgggatcaccaatctctgtgtcattgggggtgatggcagcctcactggggctgacaccttccgttctgagtggagtgacttgttgagtgacctccagaaagcaggtaagatcacagatgaggaggctacgaagtccagctacctgaacattgtgggcctggttgggtcaattgacaatgacttctgtggcaccgatatgaccattggcactgactctgccctgcatcggatcatggaaattgtagatgccatcactaccactgcccagagccaccagaggacatttgtgttagaagtaatgggccgccactgtggatacctggcccttgtcacctctctgtcctgtggggccgactgggtttttattcctgaatgtccaccagatgacgactgggaggaacacctttgtcgccgactcagcgagacaaggacccgtggttctcgtctcaacatcatcattgtggctgagggtgcaattgacaagaatggaaaaccaatcacctcagaagacatcaagaatctggtggttaagcgtctgggatatgacacccgggttactgtcttggggcatgtgcagaggggtgggacgccatcagcctttgacagaattctgggcagcaggatgggtgtggaagcagtgatggcacttttggaggggaccccagataccccagcctgtgtagtgagcctctctggtaaccaggctgtgcgcctgcccctcatggaatgtgtccaggtgaccaaagatgtgaccaaggccatggatgagaagaaatttgacgaagccctgaagctgagaggccggagcttcatgaacaactgggaggtgtacaagcttctagctcatgtcagacccccggtatctaagagtggttcgcacacagtggctgtgatgaacgtgggggctccggctgcaggcatgaatgctgctgttcgctccactgtgaggattggccttatccagggcaaccgagtgctcgttgtccatgatggtttcgagggcctggccaaggggcagatagaggaagctggctggagctatgttgggggctggactggccaaggtggctctaaacttgggactaaaaggactctacccaagaagagctttgaacagatcagtgccaatataactaagtttaacattcagggccttgtcatcattgggggctttgaggcttacacagggggcctggaactgatggagggcaggaagcagtttgatgagctctgcatcccatttgtggtcattcctgctacagtctccaacaatgtccctggctcagacttcagcgttggggctgacacagcactcaatactatctgcacaacctgtgaccgcatcaagcagtcagcagctggcaccaagcgtcgggtgtttatcattgagactatgggtggctactgtggctacctggctaccatggctggactggcagctggggccgatgctgcctacatttttgaggagcccttcaccattcgagacctgcaggcaaatgttgaacatctggtgcaaaagatgaaaacaactgtgaaaaggggcttggtgttaaggaatgaaaagtgcaatgagaactataccactgacttcattttcaacctgtactctgaggaggggaagggcatcttcgacagcaggaagaatgtgcttggtcacatgcagcagggtgggagcccaaccccatttgataggaattttgccactaagatgggcgccaaggctatgaactggatgtctgggaaaatcaaagagagttaccgtaatgggcggatctttgccaatactccagattcgggctgtgttctggggatgcgtaagagggctctggtcttccaaccagtggctgagctgaaggaccagacagattttgagcatcgaatccccaaggaacagtggtggctgaaactgaggcccatcctcaaaatcctagccaagtacgagattgacttggacacttcagaccatgcccacctggagcacatcacccggaagcggtccggggaagctgccgtctaaacctctctggagtgaggggaatagattacctgatcatggtcagctcacaccctaataagtccacatcttctcagtgttttagctgtttttttcattaggtttccttttattctgtaccttgcagccatgaccagttctggccaggagctggaggagcaggcagtgggtgggagctccttttaggtagaatttaacatgacttctgccccagctttatctgtcacacaaggctgggcacctctagtgctactgctagatatcacttactcagttagaattttcctaaaaataagctttatttatttctttgtgataacaaagagtcttggttcctctactacttttactacagtgacaaattgtaactacactaataaatgccaactggtcactgtga

SEQ ID NO: 285171 - DNA, 2842 bp, Homo sapiens
tggctaggtacgaggccgggtgttaatcggccgaggccctttcccaaggacaatctgcaagaaagcagcggcggaggagagctaagactaaaagagtggatcatgacccatgaagagcaccatgcagccaaaaccctggggattggcaaagccattgctgtcttaacctctggtggagatgcccaaggtatgaatgctgctgtcagggctgtggttcgagttggtatcttcaccggtgcccgtgtcttctttgtccatgagggttatcaaggcctggtggatggtggagatcacatcaaggaagccacctgggagagcgtttcgatgatgcttcagctgggaggcacggtgattggaagtgcccggtgcaaggactttcgggaacgagaaggacgactccgagctgcctacaacctggtgaagcgtgggatcaccaatctctgtgtcattgggggtgatggcagcctcactggggctgacaccttccgttctgagtggagtgacttgttgagtgacctccagaaagcaggtaagatcacagatgaggaggctacgaagtccagctacctgaacattgtgggcctggttgggtcaattgacaatgacttctgtggcaccgatatgaccattggcactgactctgccctgcatcggatcatggaaattgtagatgccatcactaccactgcccagagccaccagaggacatttgtgttagaagtaatgggccgccactgtggatacctggcccttgtcacctctctgtcctgtggggccgactgggtttttattcctgaatgtccaccagatgacgactgggaggaacacctttgtcgccgactcagcgagacaaggacccgtggttctcgtctcaacatcatcattgtggctgagggtgcaattgacaagaatggaaaaccaatcacctcagaagacatcaagaatctggtggttaagcgtctgggatatgacacccgggttactgtcttggggcatgtgcagaggggtgggacgccatcagcctttgacagaattctgggcagcaggatgggtgtggaagcagtgatggcacttttggaggggaccccagataccccagcctgtgtagtgagcctctctggtaaccaggctgtgcgcctgcccctcatggaatgtgtccaggtgaccaaagatgtgaccaaggccatggatgagaagaaatttgacgaagccctgaagctgagaggccggagcttcatgaacaactgggaggtgtacaagcttctagctcatgtcagacccccggtatctaagagtggttcgcacacagtggctgtgatgaacgtgggggctccggctgcaggcatgaatgctgctgttcgctccactgtgaggattggccttatccagggcaaccgagtgctcgttgtccatgatggtttcgagggcctggccaaggggcagatagaggaagctggctggagctatgttgggggctggactggccaaggtggctctaaacttgggactaaaaggactctacccaagaagagctttgaacagatcagtgccaatataactaagtttaacattcagggccttgtcatcattgggggctttgaggcttacacagggggcctggaactgatggagggcaggaagcagtttgatgagctctgcatcccatttgtggtcattcctgctacagtctccaacaatgtccctggctcagacttcagcgttggggctgacacagcactcaatactatctgcacaacctgtgaccgcatcaagcagtcagcagctggcaccaagcgtcgggtgtttatcattgagactatgggtggctactgtggctacctggctaccatggctggactggcagctggggccgatgctgcctacatttttgaggagcccttcaccattcgagacctgcaggcaaatgttgaacatctggtgcaaaagatgaaaacaactgtgaaaaggggcttggtgttaaggaatgaaaagtgcaatgagaactataccactgacttcattttcaacctgtactctgaggaggggaagggcatcttcgacagcaggaagaatgtgcttggtcacatgcagcagggtgggagcccaaccccatttgataggaattttgccactaagatgggcgccaaggctatgaactggatgtctgggaaaatcaaagagagttaccgtaatgggcggatctttgccaatactccagattcgggctgtgttctggggatgcgtaagagggctctggtcttccaaccagtggctgagctgaaggaccagacagattttgagcatcgaatccccaaggaacagtggtggctgaaactgaggcccatcctcaaaatcctagccaagtacgagattgacttggacacttcagaccatgcccacctggagcacatcacccggaagcggtccggggaagctgccgtctaaacctctctggagtgaggggaatagattacctgatcatggtcagctcacaccctaataagtccacatcttctcagtgttttagctgtttttttcattaggtttccttttattctgtaccttgcagccatgaccagttctggccaggagctggaggagcaggcagtgggtgggagctccttttaggtagaatttaacatgacttctgccccagctttatctgtcacacaaggctgggcacctctagtgctactgctagatatcacttactcagttagaattttcctaaaaataagctttatttatttctttgtgataacaaagagtcttggttcctctactacttttactacagtgacaaattgtaactacactaataaatgccaactggtcactgtga

SEQ ID NO: 285172 - DNA, 2736 bp, Homo sapiens
catgttcgtccatcacccctcccccctttcccaaggacaatctgcaagaaagcagcggcggaggagagctaagactaaaagagtggatcatgacccatgaagagcaccatgcagccaaaaccctggggattggcaaagccattgctgtcttaacctctggtggagatgcccaaggtatgaatgctgctgtcagggctgtggttcgagttggtatcttcaccggtgcccgtgtcttctttgtccatgagggttatcaaggcctggtggatggtggagatcacatcaaggaagccacctgggagagcgtttcgatgatgcttcagctgggaggcacggtgattggaagtgcccggtgcaaggactttcgggaacgagaaggacgactccgagctgcctacaacctggtgaagcgtgggatcaccaatctctgtgtcattgggggtgatggcagcctcactggggctgacaccttccgttctgagtggagtgacttgttgagtgacctccagaaagcaggtaagatcacagatgaggaggctacgaagtccagctacctgaacattgtgggcctggttgggtcaattgacaatgacttctgtggcaccgatatgaccattggcactgactctgccctgcatcggatcatggaaattgtagatgccatcactaccactgcccagagccaccagaggacatttgtgttagaagtaatgggccgccactgtggatacctggcccttgtcacctctctgtcctgtggggccgactgggtttttattcctgaatgtccaccagatgacgactgggaggaacacctttgtcgccgactcagcgagacaaggacccgtggttctcgtctcaacatcatcattgtggctgagggtgcaattgacaagaatggaaaaccaatcacctcagaagacatcaagaatggcagcaggatgggtgtggaagcagtgatggcacttttggaggggaccccagataccccagcctgtgtagtgagcctctctggtaaccaggctgtgcgcctgcccctcatggaatgtgtccaggtgaccaaagatgtgaccaaggccatggatgagaagaaatttgacgaagccctgaagctgagaggccggagcttcatgaacaactgggaggtgtacaagcttctagctcatgtcagacccccggtatctaagagtggttcgcacacagtggctgtgatgaacgtgggggctccggctgcaggcatgaatgctgctgttcgctccactgtgaggattggccttatccagggcaaccgagtgctcgttgtccatgatggtttcgagggcctggccaaggggcagatagaggaagctggctggagctatgttgggggctggactggccaaggtggctctaaacttgggactaaaaggactctacccaagaagagctttgaacagatcagtgccaatataactaagtttaacattcagggccttgtcatcattgggggctttgaggcttacacagggggcctggaactgatggagggcaggaagcagtttgatgagctctgcatcccatttgtggtcattcctgctacagtctccaacaatgtccctggctcagacttcagcgttggggctgacacagcactcaatactatctgcacaacctgtgaccgcatcaagcagtcagcagctggcaccaagcgtcgggtgtttatcattgagactatgggtggctactgtggctacctggctaccatggctggactggcagctggggccgatgctgcctacatttttgaggagcccttcaccattcgagacctgcaggcaaatgttgaacatctggtgcaaaagatgaaaacaactgtgaaaaggggcttggtgttaaggaatgaaaagtgcaatgagaactataccactgacttcattttcaacctgtactctgaggaggggaagggcatcttcgacagcaggaagaatgtgcttggtcacatgcagcagggtgggagcccaaccccatttgataggaattttgccactaagatgggcgccaaggctatgaactggatgtctgggaaaatcaaagagagttaccgtaatgggcggatctttgccaatactccagattcgggctgtgttctggggatgcgtaagagggctctggtcttccaaccagtggctgagctgaaggaccagacagattttgagcatcgaatccccaaggaacagtggtggctgaaactgaggcccatcctcaaaatcctagccaagtacgagattgacttggacacttcagaccatgcccacctggagcacatcacccggaagcggtccggggaagctgccgtctaaacctctctggagtgaggggaatagattacctgatcatggtcagctcacaccctaataagtccacatcttctcagtgttttagctgtttttttcattaggtttccttttattctgtaccttgcagccatgaccagttctggccaggagctggaggagcaggcagtgggtgggagctccttttaggtagaatttaacatgacttctgccccagctttatctgtcacacaaggctgggcacctctagtgctactgctagatatcacttactcagttagaattttcctaaaaataagctttatttatttctttgtgataacaaagagtcttggttcctctactacttttactacagtgacaaattgtaactacactaataaatgccaactggtcactgtga

SEQ ID NO: 285173 - DNA, 3081 bp, Homo sapiens
catgttcgtccatcacccctcccccctttcccaaggacaatctgcaagaaagcagcggcggaggagagctaagactaaaagagtggatcatgacccatgaagagcaccatgcagccaaaaccctggggattggcaaagccattgctgtcttaacctctggtggagatgcccaaggtatgaatgctgctgtcagggctgtggttcgagttggtatcttcaccggtgcccgtgtcttctttgtccatgagggttatcaaggcctggtggatggtggagatcacatcaaggaagccacctgggagagcgtttcgatgatgcttcagctgggaggcacggtgattggaagtgcccggtgcaaggactttcgggaacgagaaggacgactccgagctgcctacaacctggtgaagcgtgggatcaccaatctctgtgtcattgggggtgatggcagcctcactggggctgacaccttccgttctgagtggagtgacttgttgagtgacctccagaaagcaggtaagatcacagatgaggaggctacgaagtccagctacctgaacattgtgggcctggttgggtcaattgacaatgacttctgtggcaccgatatgaccattggcactgactctgccctgcatcggatcatggaaattgtagatgccatcactaccactgcccagagccaccagaggacatttgtgttagaagtaatgggccgccactgtggatacctggcccttgtcacctctctgtcctgtggggccgactgggtttttattcctgaatgtccaccagatgacgactgggaggaacacctttgtcgccgactcagcgagacaaggacccgtggttctcgtctcaacatcatcattgtggctgagggtgcaattgacaagaatggaaaaccaatcacctcagaagacatcaagaatgttcgtatgaatgaagccagagaggccttagaatccatagcccattcccttctggcttctgagtctcctgacattgcttctccccttggtccttctgcacatctctccctggttccctgcccctgattgcctcccacaaagaaccattacaagacaagaggctgagctgtccatggtttacccaagtctctgcttgttttcttcctttgactctgcgtaaccctctctctgtccctctgttggtcccttcagctggtggttaagcgtctgggatatgacacccgggttactgtcttggggcatgtgcagaggggtgggacgccatcagcctttgacagaattctgggcagcaggatgggtgtggaagcagtgatggcacttttggaggggaccccagataccccagcctgtgtagtgagcctctctggtaaccaggctgtgcgcctgcccctcatggaatgtgtccaggtgaccaaagatgtgaccaaggccatggatgagaagaaatttgacgaagccctgaagctgagaggccggagcttcatgaacaactgggaggtgtacaagcttctagctcatgtcagacccccggtatctaagagtggttcgcacacagtggctgtgatgaacgtgggggctccggctgcaggcatgaatgctgctgttcgctccactgtgaggattggccttatccagggcaaccgagtgctcgttgtccatgatggtttcgagggcctggccaaggggcagatagaggaagctggctggagctatgttgggggctggactggccaaggtggctctaaacttgggactaaaaggactctacccaagaagagctttgaacagatcagtgccaatataactaagtttaacattcagggccttgtcatcattgggggctttgaggcttacacagggggcctggaactgatggagggcaggaagcagtttgatgagctctgcatcccatttgtggtcattcctgctacagtctccaacaatgtccctggctcagacttcagcgttggggctgacacagcactcaatactatctgcacaacctgtgaccgcatcaagcagtcagcagctggcaccaagcgtcgggtgtttatcattgagactatgggtggctactgtggctacctggctaccatggctggactggcagctggggccgatgctgcctacatttttgaggagcccttcaccattcgagacctgcaggcaaatgttgaacatctggtgcaaaagatgaaaacaactgtgaaaaggggcttggtgttaaggaatgaaaagtgcaatgagaactataccactgacttcattttcaacctgtactctgaggaggggaagggcatcttcgacagcaggaagaatgtgcttggtcacatgcagcagggtgggagcccaaccccatttgataggaattttgccactaagatgggcgccaaggctatgaactggatgtctgggaaaatcaaagagagttaccgtaatgggcggatctttgccaatactccagattcgggctgtgttctggggatgcgtaagagggctctggtcttccaaccagtggctgagctgaaggaccagacagattttgagcatcgaatccccaaggaacagtggtggctgaaactgaggcccatcctcaaaatcctagccaagtacgagattgacttggacacttcagaccatgcccacctggagcacatcacccggaagcggtccggggaagctgccgtctaaacctctctggagtgaggggaatagattacctgatcatggtcagctcacaccctaataagtccacatcttctcagtgttttagctgtttttttcattaggtttccttttattctgtaccttgcagccatgaccagttctggccaggagctggaggagcaggcagtgggtgggagctccttttaggtagaatttaacatgacttctgccccagctttatctgtcacacaaggctgggcacctctagtgctactgctagatatcacttactcagttagaattttcctaaaaataagctttatttatttctttgtgataacaaagagtcttggttcctctactacttttactacagtgacaaattgtaactacactaataaatgccaactggtcactgtga

SEQ ID NO: 285174 - DNA, 2703 bp, Homo sapiens
catgttcgtccatcacccctcccccctttcccaaggacaatctgcaagaaagcagcggcggaggagagctaagactaaaagagtggatcatgacccatgaagagcaccatgcagccaaaaccctggggattggcaaagccattgctgtcttaacctctggtggagatgcccaaggtatgaatgctgctgtcagggctgtggttcgagttggtatcttcaccggtgcccgtgtcttctttgtccatgagggttatcaaggcctggtggatggtggagatcacatcaaggaagccacctgggagagcgtttcgatgatgcttcagctgggaggcacggtgattggaagtgcccggtgcaaggactttcgggaacgagaaggacgactccgagctgcctacaacctggtgaagcgtgggatcaccaatctctgtgtcattgggggtgatggcagcctcactggggctgacaccttccgttctgagtggagtgacttgttgagtgacctccagaaagcaggtaagatcacagatgaggaggctacgaagtccagctacctgaacattgtgggcctggttgggtcaattgacaatgacttctgtggcaccgatatgaccattggcactgactctgccctgcatcggatcatggaaattgtagatgccatcactaccactgcccagagccaccagaggacatttgtgttagaagtaatgggccgccactgtggatacctggcccttgtcacctctctgtcctgtggggccgactgggtttttattcctgaatgtccaccagatgacgactgggaggaacacctttgtcgccgactcagcgagacaaggacccgtggttctcgtctcaacatcatcattgtggctgagggtgcaattgacaagaatggaaaaccaatcacctcagaagacatcaagaatctggtggttaagcgtctgggatatgacacccgggttactgtcttggggcatgtgcagaggggtgggacgccatcagcctttgacagaattctgaccaaagatgtgaccaaggccatggatgagaagaaatttgacgaagccctgaagctgagaggccggagcttcatgaacaactgggaggtgtacaagcttctagctcatgtcagacccccggtatctaagagtggttcgcacacagtggctgtgatgaacgtgggggctccggctgcaggcatgaatgctgctgttcgctccactgtgaggattggccttatccagggcaaccgagtgctcgttgtccatgatggtttcgagggcctggccaaggggcagatagaggaagctggctggagctatgttgggggctggactggccaaggtggctctaaacttgggactaaaaggactctacccaagaagagctttgaacagatcagtgccaatataactaagtttaacattcagggccttgtcatcattgggggctttgaggcttacacagggggcctggaactgatggagggcaggaagcagtttgatgagctctgcatcccatttgtggtcattcctgctacagtctccaacaatgtccctggctcagacttcagcgttggggctgacacagcactcaatactatctgcacaacctgtgaccgcatcaagcagtcagcagctggcaccaagcgtcgggtgtttatcattgagactatgggtggctactgtggctacctggctaccatggctggactggcagctggggccgatgctgcctacatttttgaggagcccttcaccattcgagacctgcaggcaaatgttgaacatctggtgcaaaagatgaaaacaactgtgaaaaggggcttggtgttaaggaatgaaaagtgcaatgagaactataccactgacttcattttcaacctgtactctgaggaggggaagggcatcttcgacagcaggaagaatgtgcttggtcacatgcagcagggtgggagcccaaccccatttgataggaattttgccactaagatgggcgccaaggctatgaactggatgtctgggaaaatcaaagagagttaccgtaatgggcggatctttgccaatactccagattcgggctgtgttctggggatgcgtaagagggctctggtcttccaaccagtggctgagctgaaggaccagacagattttgagcatcgaatccccaaggaacagtggtggctgaaactgaggcccatcctcaaaatcctagccaagtacgagattgacttggacacttcagaccatgcccacctggagcacatcacccggaagcggtccggggaagctgccgtctaaacctctctggagtgaggggaatagattacctgatcatggtcagctcacaccctaataagtccacatcttctcagtgttttagctgtttttttcattaggtttccttttattctgtaccttgcagccatgaccagttctggccaggagctggaggagcaggcagtgggtgggagctccttttaggtagaatttaacatgacttctgccccagctttatctgtcacacaaggctgggcacctctagtgctactgctagatatcacttactcagttagaattttcctaaaaataagctttatttatttctttgtgataacaaagagtcttggttcctctactacttttactacagtgacaaattgtaactacactaataaatgccaactggtcactgtga

SEQ ID NO: 285175 - DNA, 2941 bp, Homo sapiens
gccttcacagcaccggaagagtcgctaggtggctgaagaggagggggctggggcaggaggtcaaagaacagagaggcagccatgcataaagacgagtttcatctgaaatttttcatgtgtgtgattcagtctcgccagttagtcaggactcctcagagaacagctggggaagcttctacttccagcatgctcataccaaagccaccaccaaagacagacatcttgaagagtctagatactatggatgatccagacaccgtgggaagcatacctgttttcaaaactgagtggatcatgacccatgaagagcaccatgcagccaaaaccctggggattggcaaagccattgctgtcttaacctctggtggagatgcccaaggtatgaatgctgctgtcagggctgtggttcgagttggtatcttcaccggtgcccgtgtcttctttgtccatgagggttatcaaggcctggtggatggtggagatcacatcaaggaagccacctgggagagcgtttcgatgatgcttcagctgggaggcacggtgattggaagtgcccggtgcaaggactttcgggaacgagaaggacgactccgagctgcctacaacctggtgaagcgtgggatcaccaatctctgtgtcattgggggtgatggcagcctcactggggctgacaccttccgttctgagtggagtgacttgttgagtgacctccagaaagcaggtaagatcacagatgaggaggctacgaagtccagctacctgaacattgtgggcctggttgggtcaattgacaatgacttctgtggcaccgatatgaccattggcactgactctgccctgcatcggatcatggaaattgtagatgccatcactaccactgcccagagccaccagaggacatttgtgttagaagtaatgggccgccactgtggatacctggcccttgtcacctctctgtcctgtggggccgactgggtttttattcctgaatgtccaccagatgacgactgggaggaacacctttgtcgccgactcagcgagacaaggacccgtggttctcgtctcaacatcatcattgtggctgagggtgcaattgacaagaatggaaaaccaatcacctcagaagacatcaagaatggcagcaggatgggtgtggaagcagtgatggcacttttggaggggaccccagataccccagcctgtgtagtgagcctctctggtaaccaggctgtgcgcctgcccctcatggaatgtgtccaggtgaccaaagatgtgaccaaggccatggatgagaagaaatttgacgaagccctgaagctgagaggccggagcttcatgaacaactgggaggtgtacaagcttctagctcatgtcagacccccggtatctaagagtggttcgcacacagtggctgtgatgaacgtgggggctccggctgcaggcatgaatgctgctgttcgctccactgtgaggattggccttatccagggcaaccgagtgctcgttgtccatgatggtttcgagggcctggccaaggggcagatagaggaagctggctggagctatgttgggggctggactggccaaggtggctctaaacttgggactaaaaggactctacccaagaagagctttgaacagatcagtgccaatataactaagtttaacattcagggccttgtcatcattgggggctttgaggcttacacagggggcctggaactgatggagggcaggaagcagtttgatgagctctgcatcccatttgtggtcattcctgctacagtctccaacaatgtccctggctcagacttcagcgttggggctgacacagcactcaatactatctgcacaacctgtgaccgcatcaagcagtcagcagctggcaccaagcgtcgggtgtttatcattgagactatgggtggctactgtggctacctggctaccatggctggactggcagctggggccgatgctgcctacatttttgaggagcccttcaccattcgagacctgcaggcaaatgttgaacatctggtgcaaaagatgaaaacaactgtgaaaaggggcttggtgttaaggaatgaaaagtgcaatgagaactataccactgacttcattttcaacctgtactctgaggaggggaagggcatcttcgacagcaggaagaatgtgcttggtcacatgcagcagggtgggagcccaaccccatttgataggaattttgccactaagatgggcgccaaggctatgaactggatgtctgggaaaatcaaagagagttaccgtaatgggcggatctttgccaatactccagattcgggctgtgttctggggatgcgtaagagggctctggtcttccaaccagtggctgagctgaaggaccagacagattttgagcatcgaatccccaaggaacagtggtggctgaaactgaggcccatcctcaaaatcctagccaagtacgagattgacttggacacttcagaccatgcccacctggagcacatcacccggaagcggtccggggaagctgccgtctaaacctctctggagtgaggggaatagattacctgatcatggtcagctcacaccctaataagtccacatcttctcagtgttttagctgtttttttcattaggtttccttttattctgtaccttgcagccatgaccagttctggccaggagctggaggagcaggcagtgggtgggagctccttttaggtagaatttaacatgacttctgccccagctttatctgtcacacaaggctgggcacctctagtgctactgctagatatcacttactcagttagaattttcctaaaaataagctttatttatttctttgtgataacaaagagtcttggttcctctactacttttactacagtgacaaattgtaactacactaataaatgccaactggtcactgtga

SEQ ID NO: 285176 - DNA, 2976 bp, Homo sapiens
cgcggtgtggcgaggcccgagaagcgaagggagcatttaagactagtcgtaatttctcagtacccttttcagtctgggctttttcgctttctcgtactcggaatactgaggcagccatgcataaagacgagtttcatctgaaatttttcatgtgtgtgattcagtctcgccagttagtcaggactcctcagagaacagctggggaagcttctacttccagcatgctcataccaaagccaccaccaaagacagacatcttgaagagtctagatactatggatgatccagacaccgtgggaagcatacctgttttcaaaactgagtggatcatgacccatgaagagcaccatgcagccaaaaccctggggattggcaaagccattgctgtcttaacctctggtggagatgcccaaggtatgaatgctgctgtcagggctgtggttcgagttggtatcttcaccggtgcccgtgtcttctttgtccatgagggttatcaaggcctggtggatggtggagatcacatcaaggaagccacctgggagagcgtttcgatgatgcttcagctgggaggcacggtgattggaagtgcccggtgcaaggactttcgggaacgagaaggacgactccgagctgcctacaacctggtgaagcgtgggatcaccaatctctgtgtcattgggggtgatggcagcctcactggggctgacaccttccgttctgagtggagtgacttgttgagtgacctccagaaagcaggtaagatcacagatgaggaggctacgaagtccagctacctgaacattgtgggcctggttgggtcaattgacaatgacttctgtggcaccgatatgaccattggcactgactctgccctgcatcggatcatggaaattgtagatgccatcactaccactgcccagagccaccagaggacatttgtgttagaagtaatgggccgccactgtggatacctggcccttgtcacctctctgtcctgtggggccgactgggtttttattcctgaatgtccaccagatgacgactgggaggaacacctttgtcgccgactcagcgagacaaggacccgtggttctcgtctcaacatcatcattgtggctgagggtgcaattgacaagaatggaaaaccaatcacctcagaagacatcaagaatggcagcaggatgggtgtggaagcagtgatggcacttttggaggggaccccagataccccagcctgtgtagtgagcctctctggtaaccaggctgtgcgcctgcccctcatggaatgtgtccaggtgaccaaagatgtgaccaaggccatggatgagaagaaatttgacgaagccctgaagctgagaggccggagcttcatgaacaactgggaggtgtacaagcttctagctcatgtcagacccccggtatctaagagtggttcgcacacagtggctgtgatgaacgtgggggctccggctgcaggcatgaatgctgctgttcgctccactgtgaggattggccttatccagggcaaccgagtgctcgttgtccatgatggtttcgagggcctggccaaggggcagatagaggaagctggctggagctatgttgggggctggactggccaaggtggctctaaacttgggactaaaaggactctacccaagaagagctttgaacagatcagtgccaatataactaagtttaacattcagggccttgtcatcattgggggctttgaggcttacacagggggcctggaactgatggagggcaggaagcagtttgatgagctctgcatcccatttgtggtcattcctgctacagtctccaacaatgtccctggctcagacttcagcgttggggctgacacagcactcaatactatctgcacaacctgtgaccgcatcaagcagtcagcagctggcaccaagcgtcgggtgtttatcattgagactatgggtggctactgtggctacctggctaccatggctggactggcagctggggccgatgctgcctacatttttgaggagcccttcaccattcgagacctgcaggcaaatgttgaacatctggtgcaaaagatgaaaacaactgtgaaaaggggcttggtgttaaggaatgaaaagtgcaatgagaactataccactgacttcattttcaacctgtactctgaggaggggaagggcatcttcgacagcaggaagaatgtgcttggtcacatgcagcagggtgggagcccaaccccatttgataggaattttgccactaagatgggcgccaaggctatgaactggatgtctgggaaaatcaaagagagttaccgtaatgggcggatctttgccaatactccagattcgggctgtgttctggggatgcgtaagagggctctggtcttccaaccagtggctgagctgaaggaccagacagattttgagcatcgaatccccaaggaacagtggtggctgaaactgaggcccatcctcaaaatcctagccaagtacgagattgacttggacacttcagaccatgcccacctggagcacatcacccggaagcggtccggggaagctgccgtctaaacctctctggagtgaggggaatagattacctgatcatggtcagctcacaccctaataagtccacatcttctcagtgttttagctgtttttttcattaggtttccttttattctgtaccttgcagccatgaccagttctggccaggagctggaggagcaggcagtgggtgggagctccttttaggtagaatttaacatgacttctgccccagctttatctgtcacacaaggctgggcacctctagtgctactgctagatatcacttactcagttagaattttcctaaaaataagctttatttatttctttgtgataacaaagagtcttggttcctctactacttttactacagtgacaaattgtaactacactaataaatgccaactggtcactgtga

SEQ ID NO: 285177 - DNA, 2463 bp, Homo sapiens
catgttcgtccatcacccctcccccctttcccaaggacaatctgcaagaaagcagcggcggaggagagctaagactaaaagagtggatcatgacccatgaagagcaccatgcagccaaaaccctggggattggcaaagccattgctgtcttaacctctggtggagatgcccaaggtatgaatgctgctgtcagggctgtggttcgagttggtatcttcaccggtgcccgtgtcttctttgtccatgagggttatcaaggcctggtggatggtggagatcacatcaaggaagccacctgggagagcgtttcgatgatgcttcagctgggaggcacggtgattggaagtgcccggtgcaaggactttcgggaacgagaaggacgactccgagctgcctacaacctggtgaagcgtgggatcaccaatctctgtgtcattgggggtgatggcagcctcactggggctgacaccttccgttctgagtggagtgacttgttgagtgacctccagaaagcaggtaagatcacagatgaggaggctacgaagtccagctacctgaacattgtgggcctggttgggtcaattgacaatgacttctgtggcaccgatatgaccattggcactgactctgccctgcatcggatcatggaaattgtagatggcagcaggatgggtgtggaagcagtgatggcacttttggaggggaccccagataccccagcctgtgtagtgagcctctctggtaaccaggctgtgcgcctgcccctcatggaatgtgtccaggtgaccaaagatgtgaccaaggccatggatgagaagaaatttgacgaagccctgaagctgagaggccggagcttcatgaacaactgggaggtgtacaagcttctagctcatgtcagacccccggtatctaagagtggttcgcacacagtggctgtgatgaacgtgggggctccggctgcaggcatgaatgctgctgttcgctccactgtgaggattggccttatccagggcaaccgagtgctcgttgtccatgatggtttcgagggcctggccaaggggcagatagaggaagctggctggagctatgttgggggctggactggccaaggtggctctaaacttgggactaaaaggactctacccaagaagagctttgaacagatcagtgccaatataactaagtttaacattcagggccttgtcatcattgggggctttgaggcttacacagggggcctggaactgatggagggcaggaagcagtttgatgagctctgcatcccatttgtggtcattcctgctacagtctccaacaatgtccctggctcagacttcagcgttggggctgacacagcactcaatactatctgcacaacctgtgaccgcatcaagcagtcagcagctggcaccaagcgtcgggtgtttatcattgagactatgggtggctactgtggctacctggctaccatggctggactggcagctggggccgatgctgcctacatttttgaggagcccttcaccattcgagacctgcaggcaaatgttgaacatctggtgcaaaagatgaaaacaactgtgaaaaggggcttggtgttaaggaatgaaaagtgcaatgagaactataccactgacttcattttcaacctgtactctgaggaggggaagggcatcttcgacagcaggaagaatgtgcttggtcacatgcagcagggtgggagcccaaccccatttgataggaattttgccactaagatgggcgccaaggctatgaactggatgtctgggaaaatcaaagagagttaccgtaatgggcggatctttgccaatactccagattcgggctgtgttctggggatgcgtaagagggctctggtcttccaaccagtggctgagctgaaggaccagacagattttgagcatcgaatccccaaggaacagtggtggctgaaactgaggcccatcctcaaaatcctagccaagtacgagattgacttggacacttcagaccatgcccacctggagcacatcacccggaagcggtccggggaagctgccgtctaaacctctctggagtgaggggaatagattacctgatcatggtcagctcacaccctaataagtccacatcttctcagtgttttagctgtttttttcattaggtttccttttattctgtaccttgcagccatgaccagttctggccaggagctggaggagcaggcagtgggtgggagctccttttaggtagaatttaacatgacttctgccccagctttatctgtcacacaaggctgggcacctctagtgctactgctagatatcacttactcagttagaattttcctaaaaataagctttatttatttctttgtgataacaaagagtcttggttcctctactacttttactacagtgacaaattgtaactacactaataaatgccaactggtcactgtga

SEQ ID NO: 285178 - DNA, 735 bp, Homo sapiens
cgcggtgtggcgaggcccgagaagcgaagggagcatttaagactagtcgtaatttctcagtacccttttcagtctgggctttttcgctttctcgtactcggaatactgaggcagccatgcataaagacgagtttcatctgaaatttttcatgtgtgtgattcagtctcgccagttagtcaggactcctcagagaacagctggggaagcttctacttccagcatgctcataccaaagccaccaccaaagacagacatcttgaagagtctagatactatggatgatccagacaccgtgggaagcatacctgttttcaaaactgagtggatcatgacccatgaagagcaccatgcagccaaaaccctggggattggcaaagccattgctgtcttaacctctggtggagatgcccaaggtatgaatgctgctgtcagggctgtggttcgagttggtatcttcaccggtgcccgtgtcttctttgtccatgagggttatcaaggcctggtggatggtggagatcacatcaaggaagccacctgggagagcgtttcgatgatgcttcagctggtatgttccagagaactccctgtcccatatttgctctgtccttgtttcatcccactctgttttgggctcatggtctcctaaattccctgtcatgtggtttcatgggaaggaattcagtgccaagagagggaccctatttgccctttactcttagcatttgaaaatacca

SEQ ID NO: 285179 - DNA, 651 bp, Homo sapiens
ggggctccagtgagctatgatcatgccactgcactctagcttgggtgatagagtgagaccctatctcaagtaaataaatacaagttatttatttattgggtgagctgctcttttgagggatcactcagatatagatgaaactgcatttaacacagttcatgttcacttagatgaccacagctgggaagttaaatctactgtctgtcacttggatgttgatgtggctatagttagttcatgtttgttaaatgactacaactgggaaattatgtctactgtccttttgtacaagttcaaaagatgacagccacccatctaaaaatcctgaggcctatagaagatgcatgaggagtccctgtctccaggtttaccacttatgcttcttattaggatggcttgttatacatagcacttaatagtagtttcttctcttttctcttttgcatataggatcacagtcaccttctatatagcaccatccccaggatgcaggagccggggcagattgtggagacctacacggaggaggatcctgagggagccatgtctgtagtctctgtggagacctcagatgatgggaccactcggcgcacagagaccacggtaaactaagacgtgtgtaagatctggaagtgataagaggtcttttct

SEQ ID NO: 285180 - DNA, 5404 bp, Homo sapiens
agatggcggtcttggcacctctaattgctctcgtgtattcggtgccgcgactttcacgatggctcgcccaaccttactaccttctgtcggccctgctctctgctgccttcctactcgtgaggaaactgccgccgctctgccacggtctgcccacccaacgcgaagacggtaacccgtgtgactttgactggagagaagtggagatcctgatgtttctcagtgccattgtgatgatgaagaaccgcagatccactctctccttcctgcttcctccttgctgtggtggctgggatgcttcttccatgattttttgaatctagactgggctgttctctgtgttaaaccaatcagttgcgaccttctcttaacagtgtgaagtgagggggtctctctccctccttctccttcctctgtgattcaccttcctttttaccctgccctgcggcggctccgccccttaccttcatggacgactcagaggtggagtcgaccgccagcatcttggcctctgtgaaggaacaagaggcccagtttgagaagctgacccgggcgctggaggaggaacggcgccacgtctcggcgcagctggaacgcgtccgggtctcaccacaagatgccaacccactcatggccaacggcacactcacccgccggcatcagaacggccggtttgtgggcgatgctgaccttgaaagacagaaattttcagatttgaaactcaacggaccccaggatcacagtcaccttctatatagcaccatccccaggatgcaggagccggggcagattgtggagacctacacggaggaggatcctgagggagccatgtctgtagtctctgtggagacctcagatgatgggaccactcggcgcacagagaccacggtcaagaaagtagtgaagactgtgacaacacggacagtacagccagtcgctatgggaccagacgggttgcctgtggatgcttcatcagtttctaacaactatatccagactttgggtcgtgatttccgcaagaatggcaatgggggacctggtccctatgtggggcaagctggcactgctacccttcctaggaacttccactaccctcctgatggttatagtcgccactatgaagatggttatccaggtggcagtgataactatggcagtctgtcccgggtgacccgcattgaggagcggtataggcccagcatggaaggctaccgggcacctagtagacaggatgtgtatgggccccaaccccaggttcgggtaggtgggagcagcgtggatctgcatcgctttcatccagagccttatgggctagaggatgaccagcgtagtatgggctatgatgacctggattatggtatgatgtctgattatggcactgcccgtcggactgggacaccctctgaccctcgtcggcgcctcaggagctatgaagacatgattggtgaggaggtgccatcggatcaatactactgggctcctttggcccagcatgagcgaggaagtttagcaagcttggatagcctgcgcaaaggagggcctccacctcctaattggagacagccagagctgccagaggtgatcgccatgcttggattccgcttggatgctgtcaagtccaatgcagctgcatacctgcaacacttatgctaccgcaatgacaaggtgaagactgacgtgcggaagctcaagggcatcccagtactggtgggattgttagaccatcccaaaaaggaagtgcaccttggagcctgtggagctctcaagaatatctcttttggacgtgaccaggataacaagattgccataaaaaactgtgatggtgtgcctgcccttgtgcgattgcttcgaaaggctcgtgatatggaccttactgaagttattaccggaaccctgtggaatctttcatcccatgactcaatcaaaatggagattgtggaccatgcactgcatgccttgacagatgaagtgatcattcctcattctggttgggagcgggaacctaatgaagactgtaagccacgccatattgagtgggaatcggtgctcaccaacacagctggctgccttaggaatgtaagctcagagaggagtgaagctcgccggaaacttcgggaatgtgatggtttagttgatgccctcattttcattgttcaggctgagattgggcagaaggattcagacagcaagcttgtagagaactgtgtttgccttcttcggaacttatcatatcaagttcaccgggagatcccacaggcagagcgttaccaagaggcagctcccaatgttgccaacaatactgggccacatgctgccagttgctttggggccaagaagggcaaagggaaaaaacctatagaggatccagcaaacgatacagtggatttccctaaaagaacgagtccagctcgaggctatgagctcttatttcagccagaggtggttcggatatacatctcacttcttaaggagagcaagactcctgccatcctagaagcctcagctggagctatccagaacttgtgtgctgggcgctggacgtatggtcgatacatccgctctgctctgcgtcaagagaaggctctttctgccatagctgacctcctgactaatgaacatgaacgggtggtgaaagctgcatctggagcactgagaaacctggctgtggatgctcgcaacaaagaattaattggtaaacatgctattcctaacttggtaaagaatctgccaggaggacagcagaactcctcttggaatttctctgaggacactgtcatctctattttgaacactatcaacgaggttatcgctgagaacttggaggctgccaaaaagcttcgagagacacagggtattgagaagctggtgttgatcaacaaatcagggaaccgctcagaaaaagaagttcgagcagcagcacttgtattacagacaatctggggatataaggaactgcggaagccactggaaaaagaaggatggaagaaatcagactttcaggtgaatctaaacaatgcttcccgaagccagagcagtcattcatatgatgatagtactctccctctcattgaccggaaccaaaaatcagataagaaacctgatcgggaagaaattcagatgagcaatatgggatcaaacacaaaatcactagataacaactattccacaccaaatgagagaggagaccacaatagaacactggatcgatcgggggatctaggcgacatggagccattgaagggaacaacacccttgatgcagaagatttagcaccactatctccgttccatctgggcttatatgtacttttattttttggtggtgaaattgactgatgattttcctttttcttcgctggactattgtgccaactgccaggctgcctcctgcccttacagccctaagtggctgccttctttccatcaactcccaacttcttcctgtgaagtttaattgtctcaacgcctccccctcccccattccctccatttttctcccaagaaacctgactcaattatttgcatattttgagaaactgctgcagattagttctttttgccagttttccctggaactcctggccttttgtggaggggagggatggagagaataggaatcttcactagaagccgtgggaagaattggaagttacatgctgtatatgcaatgtccagcagtctgataaactgacgattcttaatcaagatttttttcctgatggggaagggacttttattttcttttagagaggggaaagtgtgagctcttcccttattcctaatggctatttttgaagcaaagaaggccagcaacattggcacatgccacctggcaaaggacccttgagtaagtgaaggtctcctaaaactgggattaagaaaccttgctctcctcatctccaaggcagggaccatcaagaacctacagactccatctcttctgcaagcctcatgccaaccctgggctattgctgctgccccttaaacacaggctgtccttaacccacctctcctgccctgtgatatgtctgctgagttggcctggccatttccaagaggctgtagaaaggggagaatgtcaaggaagacttttggtagagaaggagcagaaagatgtgtttttgggaagaagaagacctctaggaggagctagtaggaatgtacatgaagcaattagtctgaaactggcttccccactcccccgtttctccttttcctatccttataggcctgtcccttgcctctgccctggattggttggcaaactaaaggacttgatgtacataactcctgtcccttttcccttacaaggtggggattgcccctggctttgcctcttctttgtgcctttggcctggggtgcatctcctcccgcccttccatgtgcctttctttgcctctgcagtctcatttctcataattttgcaaattatattttgttgctttcttacctactattggccctaaatagcagaaagaagagaagtgaccgagagaacctcagattcttcattgaggattggtatagccatgatttcagtcatagcaagcttttgctcaacagcatatgggtgggattttgcaaaaatcctattctgatgaatctcaaagtaaggctggtaagagaagtgagtggtgtgactcttactccttaggtgcccagaatttaccatcatctctgaaggagttacagggaagtggtctccccaattctcccctccctccagtattgccccctctcactttagcatatattaattagcaggttgggctagagaaatcagctgctatgcgggttgattattattattatttctaatccttttccttatttgccttctactccccttaatctaatctaaaagctctgttccatgcaactggagttccttatccctctcttccccttcccttatatattgaggctatggggtaggagaaaagtgcacaacccaccaccccctttactcgtgcattaaaatttcttatttacccttttcccccttcccatttcttcccactttcatctaccttttctggcaaaaaggagccttttgctctctgtgaccctaagagcacactgcacagggaaaattgccccatccagacctggctccactcttgatctctcttgtcctcttctgctcttttcctggtgctcttttttctcggtggggtgtgggtaatagaacagccgtgggcttttggggacctttaacttttttttctctcttttgtttataaaaaacactaaacattcaattccagagaaccaaaaatcccaccttcccaccgaacactactaaggggcttgtgttctgctccataccttttctcttttctttctgtcttgttaatgcttttaaaaacaaatgagttttttatataaataaagtttttaaagtgtg

SEQ ID NO: 285181 - DNA, 656 bp, Homo sapiens
gacacaactgcacccactgactgcagctgcatacctgcaacacttatgctaccgcaatgacaaggtgaagactgacgtgcggaagctcaagggcatcccagtactggtgggattgttagaccatcccaaaaaggaagtgcaccttggagcctgtggagctctcaagaatatctcttttggacgtgaccaggataacaagattgccataaaaaactgtgatggtgtgcctgcccttgtgcgattgcttcgaaaggctcgtgatatggaccttactgaagttattaccggaaccctgtggaatctttcatcccatgactcaatcaaaatggagattgtggaccatgcactgcatgccttgacagatgaagtgatcattcctcattctggttgggagcgggaacctaatgaagactgtaagccacgccatattgagtgggaatcggtgctcaccaacacagctggctgccttaggtaacagtagggactttgagaatatgaagatgaatttttgaggactgacttaaatttcctaaaaaaaaaaaaaattaaaattctttagcctattctttagcctccattcctatctgtattgcatactgtaactccaacctttctatctttgttgctattctctcatgtataccacatgtacctat

SEQ ID NO: 285182 - DNA, 534 bp, Homo sapiens
tcctgtacctggtaaagtaagagggatccacccaggaacagcagggctgaaaccgatacgggccgttcaaacgctctgggggaaaaacaataccatgtacactgcaaagctcccttgcctttggctgggtgcaacttccattttaggtgttggatctgagggggaaaaaaaagagagagggagagagagagaaagaagagcaggaaagatcccgaaaggaggaagaggtggcgaaaaatcaactgccctgctggatttgtctttctcagcaccttggcgaagccttgggtttctttcttaaaggactgatttttagaactccacatttgaggtgtgtggcttttgaagaaaatgtatgtactgacgggaaaaggaagataagcaagtcgaatttttgtcttacggtaaccggagggaattaaaaaacgggagagtctgttatgctgatgagtaacttttaagcaattatttttcttttctactttcagtactttggcgggggagattttggtattttattatatttaaaaaggt

SEQ ID NO: 285183 - DNA, 6234 bp, Homo sapiens
ctgccagatcagtttgtcaccacccaggctcccttgcctttggctgggtgcaacttccattttaggtgttggatctgagggggaaaaaaaagagagagggagagagagagaaagaagagcaggaaagatcccgaaaggaggaagaggtggcgaaaaatcaactgccctgctggatttgtctttctcagcaccttggcgaagccttgggtttctttcttaaaggactgatttttagaactccacatttgaggtgtgtggcttttgaagaaaatgtatgtactgacgggaaaaggaagataagcaagtcgaatttttgtcttacgctctctccttcctgcttcctccttgctgtggtggctgggatgcttcttccatgattttttgaatctagactgggctgttctctgtgttaaaccaatcagttgcgaccttctcttaacagtgtgaagtgagggggtctctctccctccttctccttcctctgtgattcaccttcctttttaccctgccctgcggcggctccgccccttaccttcatggacgactcagaggtggagtcgaccgccagcatcttggcctctgtgaaggaacaagaggcccagtttgagaagctgacccgggcgctggaggaggaacggcgccacgtctcggcgcagctggaacgcgtccgggtctcaccacaagatgccaacccactcatggccaacggcacactcacccgccggcatcagaacggccggtttgtgggcgatgctgaccttgaaagacagaaattttcagatttgaaactcaacggaccccaggatcacagtcaccttctatatagcaccatccccaggatgcaggagccggggcagattgtggagacctacacggaggaggatcctgagggagccatgtctgtagtctctgtggagacctcagatgatgggaccactcggcgcacagagaccacggtcaagaaagtagtgaagactgtgacaacacggacagtacagccagtcgctatgggaccagacgggttgcctgtggatgcttcatcagtttctaacaactatatccagactttgggtcgtgatttccgcaagaatggcaatgggggacctggtccctatgtggggcaagctggcactgctacccttcctaggaacttccactaccctcctgatggttatagtcgccactatgaagatggttatccaggtggcagtgataactatggcagtctgtcccgggtgacccgcattgaggagcggtataggcccagcatggaaggctaccgggcacctagtagacaggatgtgtatgggccccaaccccaggttcgggtaggtgggagcagcgtggatctgcatcgctttcatccagagccttatgggctagaggatgaccagcgtagtatgggctatgatgacctggattatggtatgatgtctgattatggcactgcccgtcggactgggacaccctctgaccctcgtcggcgcctcaggagctatgaagacatgattggtgaggaggtgccatcggatcaatactactgggctcctttggcccagcatgagcgaggaagtttagcaagcttggatagcctgcgcaaaggagggcctccacctcctaattggagacagccagagctgccagaggtgatcgccatgcttggattccgcttggatgctgtcaagtccaatgcagctgcatacctgcaacacttatgctaccgcaatgacaaggtgaagactgacgtgcggaagctcaagggcatcccagtactggtgggattgttagaccatcccaaaaaggaagtgcaccttggagcctgtggagctctcaagaatatctcttttggacgtgaccaggataacaagattgccataaaaaactgtgatggtgtgcctgcccttgtgcgattgcttcgaaaggctcgtgatatggaccttactgaagttattaccggaaccctgtggaatctttcatcccatgactcaatcaaaatggagattgtggaccatgcactgcatgccttgacagatgaagtgatcattcctcattctggttgggagcgggaacctaatgaagactgtaagccacgccatattgagtgggaatcggtgctcaccaacacagctggctgccttaggaatgtaagctcagagaggagtgaagctcgccggaaacttcgggaatgtgatggtttagttgatgccctcattttcattgttcaggctgagattgggcagaaggattcagacagcaagcttgtagagaactgtgtttgccttcttcggaacttatcatatcaagttcaccgggagatcccacaggcagagcgttaccaagaggcagctcccaatgttgccaacaatactgggccacatgctgccagttgctttggggccaagaagggcaaagggaaaaaacctatagaggatccagcaaacgatacagtggatttccctaaaagaacgagtccagctcgaggctatgagctcttatttcagccagaggtggttcggatatacatctcacttcttaaggagagcaagactcctgccatcctagaagcctcagctggagctatccagaacttgtgtgctgggcgctggacgtatggtcgatacatccgctctgctctgcgtcaagagaaggctctttctgccatagctgacctcctgactaatgaacatgaacgggtggtgaaagctgcatctggagcactgagaaacctggctgtggatgctcgcaacaaagaattaattggtaaacatgctattcctaacttggtaaagaatctgccaggaggacagcagaactcctcttggaatttctctgaggacactgtcatctctattttgaacactatcaacgaggttatcgctgagaacttggaggctgccaaaaagcttcgagagacacagggtattgagaagctggtgttgatcaacaaatcagggaaccgctcagaaaaagaagttcgagcagcagcacttgtattacagacaatctggggatataaggaactgcggaagccactggaaaaagaaggatggaagaaatcagactttcaggtgaatctaaacaatgcttcccgaagccagagcagtcattcatatgatgatagtactctccctctcattgaccggaaccaaaaatcagataacaactattccacaccaaatgagagaggagaccacaatagaacactggatcgatcgggggatctaggcgacatggagccattgaagggaacaacacccttgatgcaggacgaggggcaggaatctctggaggaagagttggatgtgttggttttggatgatgaggggggccaagtgtcttacccctccatgcagaagatttagcaccactatctccgttccatctgggcttatatgtacttttattttttggtggtgaaattgactgatgattttcctttttcttcgctggactattgtgccaactgccaggctgcctcctgcccttacagccctaagtggctgccttctttccatcaactcccaacttcttcctgtgaagtttaattgtctcaacgcctccccctcccccattccctccatttttctcccaagaaacctgactcaattatttgcatattttgagaaactgctgcagattagttctttttgccagttttccctggaactcctggccttttgtggaggggagggatggagagaataggaatcttcactagaagccgtgggaagaattggaagttacatgctgtatatgcaatgtccagcagtctgataaactgacgattcttaatcaagatttttttcctgatggggaagggacttttattttcttttagagaggggaaagtgtgagctcttcccttattcctaatggctatttttgaagcaaagaaggccagcaacattggcacatgccacctggcaaaggacccttgagtaagtgaaggtctcctaaaactgggattaagaaaccttgctctcctcatctccaaggcagggaccatcaagaacctacagactccatctcttctgcaagcctcatgccaaccctgggctattgctgctgccccttaaacacaggctgtccttaacccacctctcctgccctgtgatatgtctgctgagttggcctggccatttccaagaggctgtagaaaggggagaatgtcaaggaagacttttggtagagaaggagcagaaagatgtgtttttgggaagaagaagacctctaggaggagctagtaggaatgtacatgaagcaattagtctgaaactggcttccccactcccccgtttctccttttcctatccttataggcctgtcccttgcctctgccctggattggttggcaaactaaaggacttgatgtacataactcctgtcccttttcccttacaaggtggggattgcccctggctttgcctcttctttgtgcctttggcctggggtgcatctcctcccgcccttccatgtgcctttctttgcctctgcagtctcatttctcataattttgcaaattatattttgttgctttcttacctactattggccctaaatagcagaaagaagagaagtgaccgagagaacctcagattcttcattgaggattggtatagccatgatttcagtcatagcaagcttttgctcaacagcatatgggtgggattttgcaaaaatcctattctgatgaatctcaaagtaaggctggtaagagaagtgagtggtgtgactcttactccttaggtgcccagaatttaccatcatctctgaaggagttacagggaagtggtctccccaattctcccctccctccagtattgccccctctcactttagcatatattaattagcaggttgggctagagaaatcagctgctatgcgggttgattattattattatttctaatccttttccttatttgccttctactccccttaatctaatctaaaagctctgttccatgcaactggagttccttatccctctcttccccttcccttatatattgaggctatggggtaggagaaaagtgcacaacccaccaccccctttactcgtgcattaaaatttcttatttacccttttcccccttcccatttcttcccactttcatctaccttttctggcaaaaaggagccttttgctctctgtgaccctaagagcacactgcacagggaaaattgccccatccagacctggctccactcttgatctctcttgtcctcttctgctcttttcctggtgctcttttttctcggtggggtgtgggtaatagaacagccgtgggcttttggggacctttaacttttttttctctcttttgtttataaaaaacactaaacattcaattccagagaaccaaaaatcccaccttcccaccgaacactactaaggggcttgtgttctgctccataccttttctcttttctttctgtcttgttaatgcttttaaaaacaaatgagttttttatataaataaagtttttaaagtgtgtatgtggggggtctgtgtcatttcttcacttcaagctgttatttcttccctgctttgcatctttgttacttccttatgtatcagtgtcctttccagagcaaccagaaggaggttataccaggatttattttgagctcagccccaactctttatcaagcaacattcttgttaactatatgtgaaacattttttcttctgaagattcttaaaaattgaatgtggctgaagttgaacatgggagcttattgctaatttagagataggaaactgaagcataaagaattaatgacttactttaattactggaattcttctgcaacatttgacaaaactaaccttgaataaggcccactgtaatacgtagctctcttaaatataacacttaggactagaagattagaaactaccaatcccaactacgtaataggaaaatgtaggatcaaaaggcccatgtatataagtactgaccactgggccataatgttgcttctcaggctatatgcagtcctttagtcagaagtcaataggcctatttattaatattttacagaccatattacctggattaccagggactatctttgctgcagagatcaagggttaagatctatgggaagatacttatttttctgaggtccttatgtcctgtcatataattaaagactcaagagaatttatgtgaaatgctttctgtatgccccaatctttagattaaaattatatagctgctcctga

SEQ ID NO: 285184 - DNA, 4968 bp, Homo sapiens
ctgccagatcagtttgtcaccacccaggctcccttgcctttggctgggtgcaacttccattttaggtgttggatctgagggggaaaaaaaagagagagggagagagagagaaagaagagcaggaaagatcccgaaaggaggaagaggtggcgaaaaatcaactgccctgctggatttgtctttctcagcaccttggcgaagccttgggtttctttcttaaaggactgatttttagaactccacatttgaggagctatgaagacatgattggtgaggaggtgccatcggatcaatactactgggctcctttggcccagcatgagcgaggaagtttagcaagcttggatagcctgcgcaaaggagggcctccacctcctaattggagacagccagagctgccagaggtgatcgccatgcttggattccgcttggatgctgtcaagtccaatgcagctgcatacctgcaacacttatgctaccgcaatgacaaggtgaagactgacgtgcggaagctcaagggcatcccagtactggtgggattgttagaccatcccaaaaaggaagtgcaccttggagcctgtggagctctcaagaatatctcttttggacgtgaccaggataacaagattgccataaaaaactgtgatggtgtgcctgcccttgtgcgattgcttcgaaaggctcgtgatatggaccttactgaagttattaccggaaccctgtggaatctttcatcccatgactcaatcaaaatggagattgtggaccatgcactgcatgccttgacagatgaagtgatcattcctcattctggttgggagcgggaacctaatgaagactgtaagccacgccatattgagtgggaatcggtgctcaccaacacagctggctgccttaggaatgtaagctcagagaggagtgaagctcgccggaaacttcgggaatgtgatggtttagttgatgccctcattttcattgttcaggctgagattgggcagaaggattcagacagcaagcttgtagagaactgtgtttgccttcttcggaacttatcatatcaagttcaccgggagatcccacaggcagagcgttaccaagaggcagctcccaatgttgccaacaatactgggccacatgctgccagttgctttggggccaagaagggcaaagggaaaaaacctatagaggatccagcaaacgatacagtggatttccctaaaagaacgagtccagctcgaggctatgagctcttatttcagccagaggtggttcggatatacatctcacttcttaaggagagcaagactcctgccatcctagaagcctcagctggagctatccagaacttgtgtgctgggcgctggacgtatggtcgatacatccgctctgctctgcgtcaagagaaggctctttctgccatagctgacctcctgactaatgaacatgaacgggtggtgaaagctgcatctggagcactgagaaacctggctgtggatgctcgcaacaaagaattaattggtaaacatgctattcctaacttggtaaagaatctgccaggaggacagcagaactcctcttggaatttctctgaggacactgtcatctctattttgaacactatcaacgaggttatcgctgagaacttggaggctgccaaaaagcttcgagagacacagggtattgagaagctggtgttgatcaacaaatcagggaaccgctcagaaaaagaagttcgagcagcagcacttgtattacagacaatctggggatataaggaactgcggaagccactggaaaaagaaggatggaagaaatcagactttcaggtgaatctaaacaatgcttcccgaagccagagcagtcattcatatgatgatagtactctccctctcattgaccggaaccaaaaatcagataagaaacctgatcgggaagaaattcagatgagcaatatgggatcaaacacaaaatcactagataacaactattccacaccaaatgagagaggagaccacaatagaacactggatcgatcgggggatctaggcgacatggagccattgaagggaacaacacccttgatgcagaagatttagcaccactatctccgttccatctgggcttatatgtacttttattttttggtggtgaaattgactgatgattttcctttttcttcgctggactattgtgccaactgccaggctgcctcctgcccttacagccctaagtggctgccttctttccatcaactcccaacttcttcctgtgaagtttaattgtctcaacgcctccccctcccccattccctccatttttctcccaagaaacctgactcaattatttgcatattttgagaaactgctgcagattagttctttttgccagttttccctggaactcctggccttttgtggaggggagggatggagagaataggaatcttcactagaagccgtgggaagaattggaagttacatgctgtatatgcaatgtccagcagtctgataaactgacgattcttaatcaagatttttttcctgatggggaagggacttttattttcttttagagaggggaaagtgtgagctcttcccttattcctaatggctatttttgaagcaaagaaggccagcaacattggcacatgccacctggcaaaggacccttgagtaagtgaaggtctcctaaaactgggattaagaaaccttgctctcctcatctccaaggcagggaccatcaagaacctacagactccatctcttctgcaagcctcatgccaaccctgggctattgctgctgccccttaaacacaggctgtccttaacccacctctcctgccctgtgatatgtctgctgagttggcctggccatttccaagaggctgtagaaaggggagaatgtcaaggaagacttttggtagagaaggagcagaaagatgtgtttttgggaagaagaagacctctaggaggagctagtaggaatgtacatgaagcaattagtctgaaactggcttccccactcccccgtttctccttttcctatccttataggcctgtcccttgcctctgccctggattggttggcaaactaaaggacttgatgtacataactcctgtcccttttcccttacaaggtggggattgcccctggctttgcctcttctttgtgcctttggcctggggtgcatctcctcccgcccttccatgtgcctttctttgcctctgcagtctcatttctcataattttgcaaattatattttgttgctttcttacctactattggccctaaatagcagaaagaagagaagtgaccgagagaacctcagattcttcattgaggattggtatagccatgatttcagtcatagcaagcttttgctcaacagcatatgggtgggattttgcaaaaatcctattctgatgaatctcaaagtaaggctggtaagagaagtgagtggtgtgactcttactccttaggtgcccagaatttaccatcatctctgaaggagttacagggaagtggtctccccaattctcccctccctccagtattgccccctctcactttagcatatattaattagcaggttgggctagagaaatcagctgctatgcgggttgattattattattatttctaatccttttccttatttgccttctactccccttaatctaatctaaaagctctgttccatgcaactggagttccttatccctctcttccccttcccttatatattgaggctatggggtaggagaaaagtgcacaacccaccaccccctttactcgtgcattaaaatttcttatttacccttttcccccttcccatttcttcccactttcatctaccttttctggcaaaaaggagccttttgctctctgtgaccctaagagcacactgcacagggaaaattgccccatccagacctggctccactcttgatctctcttgtcctcttctgctcttttcctggtgctcttttttctcggtggggtgtgggtaatagaacagccgtgggcttttggggacctttaacttttttttctctcttttgtttataaaaaacactaaacattcaattccagagaaccaaaaatcccaccttcccaccgaacactactaaggggcttgtgttctgctccataccttttctcttttctttctgtcttgttaatgcttttaaaaacaaatgagttttttatataaataaagtttttaaagtgtgtatgtggggggtctgtgtcatttcttcacttcaagctgttatttcttccctgctttgcatctttgttacttccttatgtatcagtgtcctttccagagcaaccagaaggaggttataccaggatttattttgagctcagccccaactctttatcaagcaacattcttgttaactatatgtgaaacattttttcttctgaagattcttaaaaattgaatgtggctgaagttgaacatgggagcttattgctaatttagagataggaaactgaagcataaagaattaatgacttactttaattactggaattcttctgcaacatttgacaaaactaaccttgaataaggcccactgtaatacgtagctctcttaaatataacacttaggactagaagattagaaactaccaatcccaactacgtaataggaaaatgtaggatcaaaaggcccatgtatataagtactgaccactgggccataatgttgcttctcaggctatatgcagtcctttagtcagaagtcaataggcctatttattaatattttacagaccatattacctggattaccagggactatctttgctgcagagatcaagggttaagatctatgggaagatacttatttttctgaggtccttatgtcctgtcatataattaaagactcaagagaatttatgtgaaatgctttctgtatgccccaatctttagattaaaattatatagctgctcctga

SEQ ID NO: 285185 - DNA, 6366 bp, Homo sapiens
ctgccagatcagtttgtcaccacccaggctcccttgcctttggctgggtgcaacttccattttaggtgttggatctgagggggaaaaaaaagagagagggagagagagagaaagaagagcaggaaagatcccgaaaggaggaagaggtggcgaaaaatcaactgccctgctggatttgtctttctcagcaccttggcgaagccttgggtttctttcttaaaggactgatttttagaactccacatttgagtggagtcgaccgccagcatcttggcctctgtgaaggaacaagaggcccagtttgagaagctgacccgggcgctggaggaggaacggcgccacgtctcggcgcagctggaacgcgtccgggtctcaccacaagatgccaacccactcatggccaacggcacactcacccgccggcatcagaacggccggtttgtgggcgatgctgaccttgaaagacagaaattttcagatttgaaactcaacggaccccaggatcacagtcaccttctatatagcaccatccccaggatgcaggagccggggcagattgtggagacctacacggaggaggatcctgagggagccatgtctgtagtctctgtggagacctcagatgatgggaccactcggcgcacagagaccacggtcaagaaagtagtgaagactgtgacaacacggacagtacagccagtcgctatgggaccagacgggttgcctgtggatgcttcatcagtttctaacaactatatccagactttgggtcgtgatttccgcaagaatggcaatgggggacctggtccctatgtggggcaagctggcactgctacccttcctaggaacttccactaccctcctgatggttatagtcgccactatgaagatggttatccaggtggcagtgataactatggcagtctgtcccgggtgacccgcattgaggagcggtataggcccagcatggaaggctaccgggcacctagtagacaggatgtgtatgggccccaaccccaggttcgggtaggtgggagcagcgtggatctgcatcgctttcatccagagccttatgggctagaggatgaccagcgtagtatgggctatgatgacctggattatggtatgatgtctgattatggcactgcccgtcggactgggacaccctctgaccctcgtcggcgcctcaggagctatgaagacatgattggtgaggaggtgccatcggatcaatactactgggctcctttggcccagcatgagcgaggaagtttagcaagcttggatagcctgcgcaaaggagggcctccacctcctaattggagacagccagagctgccagaggtgatcgccatgcttggattccgcttggatgctgtcaagtccaatgcagctgcatacctgcaacacttatgctaccgcaatgacaaggtgaagactgacgtgcggaagctcaagggcatcccagtactggtgggattgttagaccatcccaaaaaggaagtgcaccttggagcctgtggagctctcaagaatatctcttttggacgtgaccaggataacaagattgccataaaaaactgtgatggtgtgcctgcccttgtgcgattgcttcgaaaggctcgtgatatggaccttactgaagttattaccggaaccctgtggaatctttcatcccatgactcaatcaaaatggagattgtggaccatgcactgcatgccttgacagatgaagtgatcattcctcattctggttgggagcgggaacctaatgaagactgtaagccacgccatattgagtgggaatcggtgctcaccaacacagctggctgccttaggaatgtaagctcagagaggagtgaagctcgccggaaacttcgggaatgtgatggtttagttgatgccctcattttcattgttcaggctgagattgggcagaaggattcagacagcaagcttgtagagaactgtgtttgccttcttcggaacttatcatatcaagttcaccgggagatcccacaggcagagcgttaccaagaggcagctcccaatgttgccaacaatactgggccacatgctgccagttgctttggggccaagaagggcaaagggaaaaaacctatagaggatccagcaaacgatacagtggatttccctaaaagaacgagtccagctcgaggctatgagctcttatttcagccagaggtggttcggatatacatctcacttcttaaggagagcaagactcctgccatcctagaagcctcagctggagctatccagaacttgtgtgctgggcgctggacgtatggtcgatacatccgctctgctctgcgtcaagagaaggctctttctgccatagctgacctcctgactaatgaacatgaacgggtggtgaaagctgcatctggagcactgagaaacctggctgtggatgctcgcaacaaagaattaattggtaaacatgctattcctaacttggtaaagaatctgccaggaggacagcagaactcctcttggaatttctctgaggacactgtcatctctattttgaacactatcaacgaggttatcgctgagaacttggaggctgccaaaaagcttcgagagacacagggtattgagaagctggtgttgatcaacaaatcagggaaccgctcagaaaaagaagttcgagcagcagcacttgtattacagacaatctggggatataaggaactgcggaagccactggaaaaagaaggatggaagaaatcagactttcaggtgaatctaaacaatgcttcccgaagccagagcagtcattcatatgatgatagtactctccctctcattgaccggaaccaaaaatcagataagaaacctgatcgggaagaaattcagatgagcaatatgggatcaaacacaaaatcactagataacaactattccacaccaaatgagagaggagaccacaatagaacactggatcgatcgggggatctaggcgacatggagccattgaagggaacaacacccttgatgcaggacgaggggcaggaatctctggaggaagagttggatgtgttggttttggatgatgaggggggccaagtgtcttacccctccatgcagaagatttagcaccactatctccgttccatctgggcttatatgtacttttattttttggtggtgaaattgactgatgattttcctttttcttcgctggactattgtgccaactgccaggctgcctcctgcccttacagccctaagtggctgccttctttccatcaactcccaacttcttcctgtgaagtttaattgtctcaacgcctccccctcccccattccctccatttttctcccaagaaacctgactcaattatttgcatattttgagaaactgctgcagattagttctttttgccagttttccctggaactcctggccttttgtggaggggagggatggagagaataggaatcttcactagaagccgtgggaagaattggaagttacatgctgtatatgcaatgtccagcagtctgataaactgacgattcttaatcaagatttttttcctgatggggaagggacttttattttcttttagagaggggaaagtgtgagctcttcccttattcctaatggctatttttgaagcaaagaaggccagcaacattggcacatgccacctggcaaaggacccttgagtaagtgaaggtctcctaaaactgggattaagaaaccttgctctcctcatctccaaggcagggaccatcaagaacctacagactccatctcttctgcaagcctcatgccaaccctgggctattgctgctgccccttaaacacaggctgtccttaacccacctctcctgccctgtgatatgtctgctgagttggcctggccatttccaagaggctgtagaaaggggagaatgtcaaggaagacttttggtagagaaggagcagaaagatgtgtttttgggaagaagaagacctctaggaggagctagtaggaatgtacatgaagcaattagtctgaaactggcttccccactcccccgtttctccttttcctatccttataggcctgtcccttgcctctgccctggattggttggcaaactaaaggacttgatgtacataactcctgtcccttttcccttacaaggtggggattgcccctggctttgcctcttctttgtgcctttggcctggggtgcatctcctcccgcccttccatgtgcctttctttgcctctgcagtctcatttctcataattttgcaaattatattttgttgctttcttacctactattggccctaaatagcagaaagaagagaagtgaccgagagaacctcagattcttcattgaggattggtatagccatgatttcagtcatagcaagcttttgctcaacagcatatgggtgggattttgcaaaaatcctattctgatgaatctcaaagtaaggctggtaagagaagtgagtggtgtgactcttactccttaggtgcccagaatttaccatcatctctgaaggagttacagggaagtggtctccccaattctcccctccctccagtattgccccctctcactttagcatatattaattagcaggttgggctagagaaatcagctgctatgcgggttgattattattattatttctaatccttttccttatttgccttctactccccttaatctaatctaaaagctctgttccatgcaactggagttccttatccctctcttccccttcccttatatattgaggctatggggtaggagaaaagtgcacaacccaccaccccctttactcgtgcattaaaatttcttatttacccttttcccccttcccatttcttcccactttcatctaccttttctggcaaaaaggagccttttgctctctgtgaccctaagagcacactgcacagggaaaattgccccatccagacctggctccactcttgatctctcttgtcctcttctgctcttttcctggtgctcttttttctcggtggggtgtgggtaatagaacagccgtgggcttttggggacctttaacttttttttctctcttttgtttataaaaaacactaaacattcaattccagagaaccaaaaatcccaccttcccaccgaacactactaaggggcttgtgttctgctccataccttttctcttttctttctgtcttgttaatgcttttaaaaacaaatgagttttttatataaataaagtttttaaagtgtgtatgtggggggtctgtgtcatttcttcacttcaagctgttatttcttccctgctttgcatctttgttacttccttatgtatcagtgtcctttccagagcaaccagaaggaggttataccaggatttattttgagctcagccccaactctttatcaagcaacattcttgttaactatatgtgaaacattttttcttctgaagattcttaaaaattgaatgtggctgaagttgaacatgggagcttattgctaatttagagataggaaactgaagcataaagaattaatgacttactttaattactggaattcttctgcaacatttgacaaaactaaccttgaataaggcccactgtaatacgtagctctcttaaatataacacttaggactagaagattagaaactaccaatcccaactacgtaataggaaaatgtaggatcaaaaggcccatgtatataagtactgaccactgggccataatgttgcttctcaggctatatgcagtcctttagtcagaagtcaataggcctatttattaatattttacagaccatattacctggattaccagggactatctttgctgcagagatcaagggttaagatctatgggaagatacttatttttctgaggtccttatgtcctgtcatataattaaagactcaagagaatttatgtgaaatgctttctgtatgccccaatctttagattaaaattatatagctgctcctgacctgatgatggtcctgtcttgttttattgaactaggacttgggtatgaaaactttcatgggctagtgagaccaggaaatcaactagcttttaaagcttgatttgtgtctaacaattgtagtgttagattagaggttgaagtacaaagccaaaaagctattaagagtttactttccaaagagttttgatagccctgcttgagatgatttttatctaaatagaaaagcctggctgcttgtcagcaacactttatttccctgttatgttcttatcctttggcattgagctagatacaaaccctactcttctctcttccttctggattggtccatttgtttatctcattcaataaatatttgccaagcacctcct

SEQ ID NO: 285186 - DNA, 5908 bp, Homo sapiens
ctgccagatcagtttgtcaccacccaggctcccttgcctttggctgggtgcaacttccattttaggtgttggatctgagggggaaaaaaaagagagagggagagagagagaaagaagagcaggaaagatcccgaaaggaggaagaggtggcgaaaaatcaactgccctgctggatttgtctttctcagcaccttggcgaagccttgggtttctttcttaaaggactgatttttagaactccacatttgagtggagtcgaccgccagcatcttggcctctgtgaaggaacaagaggcccagtttgagaagctgacccgggcgctggaggaggaacggcgccacgtctcggcgcagctggaacgcgtccgggtctcaccacaagatgccaacccactcatggccaacggcacactcacccgccggcatcagaacggccggtttgtgggcgatgctgaccttgaaagacagaaattttcagatttgaaactcaacggaccccaggatcacagtcaccttctatatagcaccatccccaggatgcaggagccggggcagattgtggagacctacacggaggaggatcctgagggagccatgtctgtagtctctgtggagacctcagatgatgggaccactcggcgcacagagaccacggtcaagaaagtagtgaagactgtgacaacacggacagtacagccagtcgctatgggaccagacgggttgcctgtggatgcttcatcagtttctaacaactatatccagactttgggtcgtgatttccgcaagaatggcaatgggggacctggtccctatgtggggcaagctggcactgctacccttcctaggaacttccactaccctcctgatggttatagtcgccactatgaagatggttatccaggtggcagtgataactatggcagtctgtcccgggtgacccgcattgaggagcggtataggcccagcatggaaggctaccgggcacctagtagacaggatgtgtatgggccccaaccccaggttcgggtaggtgggagcagcgtggatctgcatcgctttcatccagagccttatgggctagaggatgaccagcgtagtatgggctatgatgacctggattatggtatgatgtctgattatggcactgcccgtcggactgggacaccctctgaccctcgtcggcgcctcaggagctatgaagacatgattggtgaggaggtgccatcggatcaatactactgggctcctttggcccagcatgagcgaggaagtttagcaagcttggatagcctgcgcaaaggagggcctccacctcctaattggagacagccagagctgccagaggtgatcgccatgcttggattccgcttggatgctgtcaagtccaatgcagctgcatacctgcaacacttatgctaccgcaatgacaaggtgaagactgacgtgcggaagctcaagggcatcccagtactggtgggattgttagaccatcccaaaaaggaagtgcaccttggagcctgtggagctctcaagaatatctcttttggacgtgaccaggataacaagattgccataaaaaactgtgatggtgtgcctgcccttgtgcgattgcttcgaaaggctcgtgatatggaccttactgaagttattaccggaaccctgtggaatctttcatcccatgactcaatcaaaatggagattgtggaccatgcactgcatgccttgacagatgaagtgatcattcctcattctggttgggagcgggaacctaatgaagactgtaagccacgccatattgagtgggaatcggtgctcaccaacacagctggctgccttaggaatgtaagctcagagaggagtgaagctcgccggaaacttcgggaatgtgatggtttagttgatgccctcattttcattgttcaggctgagattgggcagaaggattcagacagcaagcttgtagagaactgtgtttgccttcttcggaacttatcatatcaagttcaccgggagatcccacaggcagagcgttaccaagaggcagctcccaatgttgccaacaatactgggccacatgctgccagttgctttggggccaagaagggcaaagggaaaaaacctatagaggatccagcaaacgatacagtggatttccctaaaagaacgagtccagctcgaggctatgagctcttatttcagccagaggtggttcggatatacatctcacttcttaaggagagcaagactcctgccatcctagaagcctcagctggagctatccagaacttgtgtgctgggcgctggacgtatggtcgatacatccgctctgctctgcgtcaagagaaggctctttctgccatagctgacctcctgactaatgaacatgaacgggtggtgaaagctgcatctggagcactgagaaacctggctgtggatgctcgcaacaaagaattaattggtaaacatgctattcctaacttggtaaagaatctgccaggaggacagcagaactcctcttggaatttctctgaggacactgtcatctctattttgaacactatcaacgaggttatcgctgagaacttggaggctgccaaaaagcttcgagagacacagggtattgagaagctggtgttgatcaacaaatcagggaaccgctcagaaaaagaagttcgagcagcagcacttgtattacagacaatctggggatataaggaactgcggaagccactggaaaaagaaggatggaagaaatcagactttcaggtgaatctaaacaatgcttcccgaagccagagcagtcattcatatgatgatagtactctccctctcattgaccggaaccaaaaatcagataagaaacctgatcgggaagaaattcagatgagcaatatgggatcaaacacaaaatcactagataacaactattccacaccaaatgagagaggagaccacaatagaacactggatcgatcgggggatctaggcgacatggagccattgaagggaacaacacccttgatgcagaagatttagcaccactatctccgttccatctgggcttatatgtacttttattttttggtggtgaaattgactgatgattttcctttttcttcgctggactattgtgccaactgccaggctgcctcctgcccttacagccctaagtggctgccttctttccatcaactcccaacttcttcctgtgaagtttaattgtctcaacgcctccccctcccccattccctccatttttctcccaagaaacctgactcaattatttgcatattttgagaaactgctgcagattagttctttttgccagttttccctggaactcctggccttttgtggaggggagggatggagagaataggaatcttcactagaagccgtgggaagaattggaagttacatgctgtatatgcaatgtccagcagtctgataaactgacgattcttaatcaagatttttttcctgatggggaagggacttttattttcttttagagaggggaaagtgtgagctcttcccttattcctaatggctatttttgaagcaaagaaggccagcaacattggcacatgccacctggcaaaggacccttgagtaagtgaaggtctcctaaaactgggattaagaaaccttgctctcctcatctccaaggcagggaccatcaagaacctacagactccatctcttctgcaagcctcatgccaaccctgggctattgctgctgccccttaaacacaggctgtccttaacccacctctcctgccctgtgatatgtctgctgagttggcctggccatttccaagaggctgtagaaaggggagaatgtcaaggaagacttttggtagagaaggagcagaaagatgtgtttttgggaagaagaagacctctaggaggagctagtaggaatgtacatgaagcaattagtctgaaactggcttccccactcccccgtttctccttttcctatccttataggcctgtcccttgcctctgccctggattggttggcaaactaaaggacttgatgtacataactcctgtcccttttcccttacaaggtggggattgcccctggctttgcctcttctttgtgcctttggcctggggtgcatctcctcccgcccttccatgtgcctttctttgcctctgcagtctcatttctcataattttgcaaattatattttgttgctttcttacctactattggccctaaatagcagaaagaagagaagtgaccgagagaacctcagattcttcattgaggattggtatagccatgatttcagtcatagcaagcttttgctcaacagcatatgggtgggattttgcaaaaatcctattctgatgaatctcaaagtaaggctggtaagagaagtgagtggtgtgactcttactccttaggtgcccagaatttaccatcatctctgaaggagttacagggaagtggtctccccaattctcccctccctccagtattgccccctctcactttagcatatattaattagcaggttgggctagagaaatcagctgctatgcgggttgattattattattatttctaatccttttccttatttgccttctactccccttaatctaatctaaaagctctgttccatgcaactggagttccttatccctctcttccccttcccttatatattgaggctatggggtaggagaaaagtgcacaacccaccaccccctttactcgtgcattaaaatttcttatttacccttttcccccttcccatttcttcccactttcatctaccttttctggcaaaaaggagccttttgctctctgtgaccctaagagcacactgcacagggaaaattgccccatccagacctggctccactcttgatctctcttgtcctcttctgctcttttcctggtgctcttttttctcggtggggtgtgggtaatagaacagccgtgggcttttggggacctttaacttttttttctctcttttgtttataaaaaacactaaacattcaattccagagaaccaaaaatcccaccttcccaccgaacactactaaggggcttgtgttctgctccataccttttctcttttctttctgtcttgttaatgcttttaaaaacaaatgagttttttatataaataaagtttttaaagtgtgtatgtggggggtctgtgtcatttcttcacttcaagctgttatttcttccctgctttgcatctttgttacttccttatgtatcagtgtcctttccagagcaaccagaaggaggttataccaggatttattttgagctcagccccaactctttatcaagcaacattcttgttaactatatgtgaaacattttttcttctgaagattcttaaaaattgaatgtggctgaagttgaacatgggagcttattgctaatttagagataggaaactgaagcataaagaattaatgacttactttaattactggaattcttctgcaacatttgacaaaactaaccttgaataaggcccactgtaatacgtagctctcttaaatataacacttaggactagaagattagaaactaccaatcccaactacgtaataggaaaatgtaggatcaaaaggcccatgtatataagtactgaccactgggccataatgttgcttctcaggctatatgcagtcctttagtcagaagtcaataggcctatttattaatattttacagaccatattacctggattaccagggactatctttgctgcagagatcaagggttaagatctatgggaagatacttatttttctgaggtccttatgtcctgtcatataattaaagactcaagagaatttatgtgaaatgctttctgtatgccccaatctttagattaaaattatatagctgctcctga

SEQ ID NO: 285187 - DNA, 6210 bp, Homo sapiens
ctgccagatcagtttgtcaccacccaggctcccttgcctttggctgggtgcaacttccattttaggtgttggatctgagggggaaaaaaaagagagagggagagagagagaaagaagagcaggaaagatcccgaaaggaggaagaggtggcgaaaaatcaactgccctgctggatttgtctttctcagcaccttggcgaagccttgggtttctttcttaaaggactgatttttagaactccacatttgaggtgtgtggcttttgaagaaaatgtatgtactgacgggaaaaggaagataagcaagtcgaatttttgtcttacgctctctccttcctgcttcctccttgctgtggtggctgggatgcttcttccatgattttttgaatctagactgggctgttctctgtgttaaaccaatcagttgcgaccttctcttaacagtgtgaagtgagggggtctctctccctccttctccttcctctgtgattcaccttcctttttaccctgccctgcggcggctccgccccttaccttcatggacgactcagaggtggagtcgaccgccagcatcttggcctctgtgaaggaacaagaggcccagtttgagaagctgacccgggcgctggaggaggaacggcgccacgtctcggcgcagctggaacgcgtccgggtctcaccacaagatgccaacccactcatggccaacggcacactcacccgccggcatcagaacggccggtttgtgggcgatgctgaccttgaaagacagaaattttcagatttgaaactcaacggaccccaggatcacagtcaccttctatatagcaccatccccaggatgcaggagccggggcagattgtggagacctacacggaggaggatcctgagggagccatgtctgtagtctctgtggagacctcagatgatgggaccactcggcgcacagagaccacggtcaagaaagtagtgaagactgtgacaacacggacagtacagccagtcgctatgggaccagacgggttgcctgtggatgcttcatcagtttctaacaactatatccagactttgggtcgtgatttccgcaagaatggcaatgggggacctggtccctatgtggggcaagctggcactgctacccttcctaggaacttccactaccctcctgatggttatagtcgccactatgaagatggttatccaggtggcagtgataactatggcagtctgtcccgggtgacccgcattgaggagcggtataggcccagcatggaaggctaccgggcacctagtagacaggatgtgtatgggccccaaccccaggttcgggtaggtgggagcagcgtggatctgcatcgctttcatccagagccttatgggctagaggatgaccagcgtagtatgggctatgatgacctggattatggtatgatgtctgattatggcactgcccgtcggactgggacaccctctgaccctcgtcggcgcctcaggagctatgaagacatgattggtgaggaggtgccatcggatcaatactactgggctcctttggcccagcatgagcgaggaagtttagcaagcttggatagcctgcgcaaaggagggcctccacctcctaattggagacagccagagctgccagaggtgatcgccatgcttggattccgcttggatgctgtcaagtccaatgcagctgcatacctgcaacacttatgctaccgcaatgacaaggtgaagactgacgtgcggaagctcaagggcatcccagtactggtgggattgttagaccatcccaaaaaggaagtgcaccttggagcctgtggagctctcaagaatatctcttttggacgtgaccaggataacaagattgccataaaaaactgtgatggtgtgcctgcccttgtgcgattgcttcgaaaggctcgtgatatggaccttactgaagttattaccggaaccctgtggaatctttcatcccatgactcaatcaaaatggagattgtggaccatgcactgcatgccttgacagatgaagtgatcattcctcattctggttgggagcgggaacctaatgaagactgtaagccacgccatattgagtgggaatcggtgctcaccaacacagctggctgccttaggaatgtaagctcagagaggagtgaagctcgccggaaacttcgggaatgtgatggtttagttgatgccctcattttcattgttcaggctgagattgggcagaaggattcagacagcaagcttgtagagaactgtgtttgccttcttcggaacttatcatatcaagttcaccgggagatcccacaggcagagcgttaccaagaggcagctcccaatgttgccaacaatactgggccacatgctgccagttgctttggggccaagaagggcaaagggaaaaaacctatagaggatccagcaaacgatacagtggatttccctaaaagaacgagtccagctcgaggctatgagctcttatttcagccagaggtggttcggatatacatctcacttcttaaggagagcaagactcctgccatcctagaagcctcagctggagctatccagaacttgtgtgctgggcgctggacgtatggtcgatacatccgctctgctctgcgtcaagagaaggctctttctgccatagctgacctcctgactaatgaacatgaacgggtggtgaaagctgcatctggagcactgagaaacctggctgtggatgctcgcaacaaagaattaattggtaaacatgctattcctaacttggtaaagaatctgccaggaggacagcagaactcctcttggaatttctctgaggacactgtcatctctattttgaacactatcaacgaggttatcgctgagaacttggaggctgccaaaaagcttcgagagacacagggtattgagaagctggtgttgatcaacaaatcagggaaccgctcagaaaaagaagttcgagcagcagcacttgtattacagacaatctggggatataaggaactgcggaagccactggaaaaagaaggatggaagaaatcagactttcaggtgaatctaaacaatgcttcccgaagccagagcagtcattcatatgatgatagtactctccctctcattgaccggaaccaaaaatcagataagaaacctgatcgggaagaaattcagatgagcaatatgggatcaaacacaaaatcactagataacaactattccacaccaaatgagagaggagaccacaatagaacactggatcgatcgggggatctaggcgacatggagccattgaagggaacaacacccttgatgcagaagatttagcaccactatctccgttccatctgggcttatatgtacttttattttttggtggtgaaattgactgatgattttcctttttcttcgctggactattgtgccaactgccaggctgcctcctgcccttacagccctaagtggctgccttctttccatcaactcccaacttcttcctgtgaagtttaattgtctcaacgcctccccctcccccattccctccatttttctcccaagaaacctgactcaattatttgcatattttgagaaactgctgcagattagttctttttgccagttttccctggaactcctggccttttgtggaggggagggatggagagaataggaatcttcactagaagccgtgggaagaattggaagttacatgctgtatatgcaatgtccagcagtctgataaactgacgattcttaatcaagatttttttcctgatggggaagggacttttattttcttttagagaggggaaagtgtgagctcttcccttattcctaatggctatttttgaagcaaagaaggccagcaacattggcacatgccacctggcaaaggacccttgagtaagtgaaggtctcctaaaactgggattaagaaaccttgctctcctcatctccaaggcagggaccatcaagaacctacagactccatctcttctgcaagcctcatgccaaccctgggctattgctgctgccccttaaacacaggctgtccttaacccacctctcctgccctgtgatatgtctgctgagttggcctggccatttccaagaggctgtagaaaggggagaatgtcaaggaagacttttggtagagaaggagcagaaagatgtgtttttgggaagaagaagacctctaggaggagctagtaggaatgtacatgaagcaattagtctgaaactggcttccccactcccccgtttctccttttcctatccttataggcctgtcccttgcctctgccctggattggttggcaaactaaaggacttgatgtacataactcctgtcccttttcccttacaaggtggggattgcccctggctttgcctcttctttgtgcctttggcctggggtgcatctcctcccgcccttccatgtgcctttctttgcctctgcagtctcatttctcataattttgcaaattatattttgttgctttcttacctactattggccctaaatagcagaaagaagagaagtgaccgagagaacctcagattcttcattgaggattggtatagccatgatttcagtcatagcaagcttttgctcaacagcatatgggtgggattttgcaaaaatcctattctgatgaatctcaaagtaaggctggtaagagaagtgagtggtgtgactcttactccttaggtgcccagaatttaccatcatctctgaaggagttacagggaagtggtctccccaattctcccctccctccagtattgccccctctcactttagcatatattaattagcaggttgggctagagaaatcagctgctatgcgggttgattattattattatttctaatccttttccttatttgccttctactccccttaatctaatctaaaagctctgttccatgcaactggagttccttatccctctcttccccttcccttatatattgaggctatggggtaggagaaaagtgcacaacccaccaccccctttactcgtgcattaaaatttcttatttacccttttcccccttcccatttcttcccactttcatctaccttttctggcaaaaaggagccttttgctctctgtgaccctaagagcacactgcacagggaaaattgccccatccagacctggctccactcttgatctctcttgtcctcttctgctcttttcctggtgctcttttttctcggtggggtgtgggtaatagaacagccgtgggcttttggggacctttaacttttttttctctcttttgtttataaaaaacactaaacattcaattccagagaaccaaaaatcccaccttcccaccgaacactactaaggggcttgtgttctgctccataccttttctcttttctttctgtcttgttaatgcttttaaaaacaaatgagttttttatataaataaagtttttaaagtgtgtatgtggggggtctgtgtcatttcttcacttcaagctgttatttcttccctgctttgcatctttgttacttccttatgtatcagtgtcctttccagagcaaccagaaggaggttataccaggatttattttgagctcagccccaactctttatcaagcaacattcttgttaactatatgtgaaacattttttcttctgaagattcttaaaaattgaatgtggctgaagttgaacatgggagcttattgctaatttagagataggaaactgaagcataaagaattaatgacttactttaattactggaattcttctgcaacatttgacaaaactaaccttgaataaggcccactgtaatacgtagctctcttaaatataacacttaggactagaagattagaaactaccaatcccaactacgtaataggaaaatgtaggatcaaaaggcccatgtatataagtactgaccactgggccataatgttgcttctcaggctatatgcagtcctttagtcagaagtcaataggcctatttattaatattttacagaccatattacctggattaccagggactatctttgctgcagagatcaagggttaagatctatgggaagatacttatttttctgaggtccttatgtcctgtcatataattaaagactcaagagaatttatgtgaaatgctttctgtatgccccaatctttagattaaaattatatagctgctcctga

SEQ ID NO: 285188 - DNA, 5816 bp, Homo sapiens
ctgccagatcagtttgtcaccacccaggctcccttgcctttggctgggtgcaacttccattttaggtgttggatctgagggggaaaaaaaagagagagggagagagagagaaagaagagcaggaaagatcccgaaaggaggaagaggtggcgaaaaatcaactgccctgctggatttgtctttctcagcaccttggcgaagccttgggtttctttcttaaaggactgatttttagaactccacatttgagaacggccggtttgtgggcgatgctgaccttgaaagacagaaattttcagatttgaaactcaacggaccccaggatcacagtcaccttctatatagcaccatccccaggatgcaggagccggggcagattgtggagacctacacggaggaggatcctgagggagccatgtctgtagtctctgtggagacctcagatgatgggaccactcggcgcacagagaccacggtcaagaaagtagtgaagactgtgacaacacggacagtacagccagtcgctatgggaccagacgggttgcctgtggatgcttcatcagtttctaacaactatatccagactttgggtcgtgatttccgcaagaatggcaatgggggacctggtccctatgtggggcaagctggcactgctacccttcctaggaacttccactaccctcctgatggttatagtcgccactatgaagatggttatccaggtggcagtgataactatggcagtctgtcccgggtgacccgcattgaggagcggtataggcccagcatggaaggctaccgggcacctagtagacaggatgtgtatgggccccaaccccaggttcgggtaggtgggagcagcgtggatctgcatcgctttcatccagagccttatgggctagaggatgaccagcgtagtatgggctatgatgacctggattatggtatgatgtctgattatggcactgcccgtcggactgggacaccctctgaccctcgtcggcgcctcaggagctatgaagacatgattggtgaggaggtgccatcggatcaatactactgggctcctttggcccagcatgagcgaggaagtttagcaagcttggatagcctgcgcaaaggagggcctccacctcctaattggagacagccagagctgccagaggtgatcgccatgcttggattccgcttggatgctgtcaagtccaatgcagctgcatacctgcaacacttatgctaccgcaatgacaaggtgaagactgacgtgcggaagctcaagggcatcccagtactggtgggattgttagaccatcccaaaaaggaagtgcaccttggagcctgtggagctctcaagaatatctcttttggacgtgaccaggataacaagattgccataaaaaactgtgatggtgtgcctgcccttgtgcgattgcttcgaaaggctcgtgatatggaccttactgaagttattaccggaaccctgtggaatctttcatcccatgactcaatcaaaatggagattgtggaccatgcactgcatgccttgacagatgaagtgatcattcctcattctggttgggagcgggaacctaatgaagactgtaagccacgccatattgagtgggaatcggtgctcaccaacacagctggctgccttaggaatgtaagctcagagaggagtgaagctcgccggaaacttcgggaatgtgatggtttagttgatgccctcattttcattgttcaggctgagattgggcagaaggattcagacagcaagcttgtagagaactgtgtttgccttcttcggaacttatcatatcaagttcaccgggagatcccacaggcagagcgttaccaagaggcagctcccaatgttgccaacaatactgggccacatgctgccagttgctttggggccaagaagggcaaagggaaaaaacctatagaggatccagcaaacgatacagtggatttccctaaaagaacgagtccagctcgaggctatgagctcttatttcagccagaggtggttcggatatacatctcacttcttaaggagagcaagactcctgccatcctagaagcctcagctggagctatccagaacttgtgtgctgggcgctggacgtatggtcgatacatccgctctgctctgcgtcaagagaaggctctttctgccatagctgacctcctgactaatgaacatgaacgggtggtgaaagctgcatctggagcactgagaaacctggctgtggatgctcgcaacaaagaattaattggtaaacatgctattcctaacttggtaaagaatctgccaggaggacagcagaactcctcttggaatttctctgaggacactgtcatctctattttgaacactatcaacgaggttatcgctgagaacttggaggctgccaaaaagcttcgagagacacagggtattgagaagctggtgttgatcaacaaatcagggaaccgctcagaaaaagaagttcgagcagcagcacttgtattacagacaatctggggatataaggaactgcggaagccactggaaaaagaaggatggaagaaatcagactttcaggtgaatctaaacaatgcttcccgaagccagagcagtcattcatatgatgatagtactctccctctcattgaccggaaccaaaaatcagataagaaacctgatcgggaagaaattcagatgagcaatatgggatcaaacacaaaatcactagataacaactattccacaccaaatgagagaggagaccacaatagaacactggatcgatcgggggatctaggcgacatggagccattgaagggaacaacacccttgatgcaggacgaggggcaggaatctctggaggaagagttggatgtgttggttttggatgatgaggggggccaagtgtcttacccctccatgcagaagatttagcaccactatctccgttccatctgggcttatatgtacttttattttttggtggtgaaattgactgatgattttcctttttcttcgctggactattgtgccaactgccaggctgcctcctgcccttacagccctaagtggctgccttctttccatcaactcccaacttcttcctgtgaagtttaattgtctcaacgcctccccctcccccattccctccatttttctcccaagaaacctgactcaattatttgcatattttgagaaactgctgcagattagttctttttgccagttttccctggaactcctggccttttgtggaggggagggatggagagaataggaatcttcactagaagccgtgggaagaattggaagttacatgctgtatatgcaatgtccagcagtctgataaactgacgattcttaatcaagatttttttcctgatggggaagggacttttattttcttttagagaggggaaagtgtgagctcttcccttattcctaatggctatttttgaagcaaagaaggccagcaacattggcacatgccacctggcaaaggacccttgagtaagtgaaggtctcctaaaactgggattaagaaaccttgctctcctcatctccaaggcagggaccatcaagaacctacagactccatctcttctgcaagcctcatgccaaccctgggctattgctgctgccccttaaacacaggctgtccttaacccacctctcctgccctgtgatatgtctgctgagttggcctggccatttccaagaggctgtagaaaggggagaatgtcaaggaagacttttggtagagaaggagcagaaagatgtgtttttgggaagaagaagacctctaggaggagctagtaggaatgtacatgaagcaattagtctgaaactggcttccccactcccccgtttctccttttcctatccttataggcctgtcccttgcctctgccctggattggttggcaaactaaaggacttgatgtacataactcctgtcccttttcccttacaaggtggggattgcccctggctttgcctcttctttgtgcctttggcctggggtgcatctcctcccgcccttccatgtgcctttctttgcctctgcagtctcatttctcataattttgcaaattatattttgttgctttcttacctactattggccctaaatagcagaaagaagagaagtgaccgagagaacctcagattcttcattgaggattggtatagccatgatttcagtcatagcaagcttttgctcaacagcatatgggtgggattttgcaaaaatcctattctgatgaatctcaaagtaaggctggtaagagaagtgagtggtgtgactcttactccttaggtgcccagaatttaccatcatctctgaaggagttacagggaagtggtctccccaattctcccctccctccagtattgccccctctcactttagcatatattaattagcaggttgggctagagaaatcagctgctatgcgggttgattattattattatttctaatccttttccttatttgccttctactccccttaatctaatctaaaagctctgttccatgcaactggagttccttatccctctcttccccttcccttatatattgaggctatggggtaggagaaaagtgcacaacccaccaccccctttactcgtgcattaaaatttcttatttacccttttcccccttcccatttcttcccactttcatctaccttttctggcaaaaaggagccttttgctctctgtgaccctaagagcacactgcacagggaaaattgccccatccagacctggctccactcttgatctctcttgtcctcttctgctcttttcctggtgctcttttttctcggtggggtgtgggtaatagaacagccgtgggcttttggggacctttaacttttttttctctcttttgtttataaaaaacactaaacattcaattccagagaaccaaaaatcccaccttcccaccgaacactactaaggggcttgtgttctgctccataccttttctcttttctttctgtcttgttaatgcttttaaaaacaaatgagttttttatataaataaagtttttaaagtgtgtatgtggggggtctgtgtcatttcttcacttcaagctgttatttcttccctgctttgcatctttgttacttccttatgtatcagtgtcctttccagagcaaccagaaggaggttataccaggatttattttgagctcagccccaactctttatcaagcaacattcttgttaactatatgtgaaacattttttcttctgaagattcttaaaaattgaatgtggctgaagttgaacatgggagcttattgctaatttagagataggaaactgaagcataaagaattaatgacttactttaattactggaattcttctgcaacatttgacaaaactaaccttgaataaggcccactgtaatacgtagctctcttaaatataacacttaggactagaagattagaaactaccaatcccaactacgtaataggaaaatgtaggatcaaaaggcccatgtatataagtactgaccactgggccataatgttgcttctcaggctatatgcagtcctttagtcagaagtcaataggcctatttattaatattttacagaccatattacctggattaccagggactatctttgctgcagagatcaagggttaagatctatgggaagatacttatttttctgaggtccttatgtcctgtcatataattaaagactcaagagaatttatgtgaaatgctttctgtatgccccaatctttagattaaaattatatagctgctcctga

SEQ ID NO: 285189 - DNA, 5932 bp, Homo sapiens
ctgccagatcagtttgtcaccacccaggctcccttgcctttggctgggtgcaacttccattttaggtgttggatctgagggggaaaaaaaagagagagggagagagagagaaagaagagcaggaaagatcccgaaaggaggaagaggtggcgaaaaatcaactgccctgctggatttgtctttctcagcaccttggcgaagccttgggtttctttcttaaaggactgatttttagaactccacatttgagtggagtcgaccgccagcatcttggcctctgtgaaggaacaagaggcccagtttgagaagctgacccgggcgctggaggaggaacggcgccacgtctcggcgcagctggaacgcgtccgggtctcaccacaagatgccaacccactcatggccaacggcacactcacccgccggcatcagaacggccggtttgtgggcgatgctgaccttgaaagacagaaattttcagatttgaaactcaacggaccccaggatcacagtcaccttctatatagcaccatccccaggatgcaggagccggggcagattgtggagacctacacggaggaggatcctgagggagccatgtctgtagtctctgtggagacctcagatgatgggaccactcggcgcacagagaccacggtcaagaaagtagtgaagactgtgacaacacggacagtacagccagtcgctatgggaccagacgggttgcctgtggatgcttcatcagtttctaacaactatatccagactttgggtcgtgatttccgcaagaatggcaatgggggacctggtccctatgtggggcaagctggcactgctacccttcctaggaacttccactaccctcctgatggttatagtcgccactatgaagatggttatccaggtggcagtgataactatggcagtctgtcccgggtgacccgcattgaggagcggtataggcccagcatggaaggctaccgggcacctagtagacaggatgtgtatgggccccaaccccaggttcgggtaggtgggagcagcgtggatctgcatcgctttcatccagagccttatgggctagaggatgaccagcgtagtatgggctatgatgacctggattatggtatgatgtctgattatggcactgcccgtcggactgggacaccctctgaccctcgtcggcgcctcaggagctatgaagacatgattggtgaggaggtgccatcggatcaatactactgggctcctttggcccagcatgagcgaggaagtttagcaagcttggatagcctgcgcaaaggagggcctccacctcctaattggagacagccagagctgccagaggtgatcgccatgcttggattccgcttggatgctgtcaagtccaatgcagctgcatacctgcaacacttatgctaccgcaatgacaaggtgaagactgacgtgcggaagctcaagggcatcccagtactggtgggattgttagaccatcccaaaaaggaagtgcaccttggagcctgtggagctctcaagaatatctcttttggacgtgaccaggataacaagattgccataaaaaactgtgatggtgtgcctgcccttgtgcgattgcttcgaaaggctcgtgatatggaccttactgaagttattaccggaaccctgtggaatctttcatcccatgactcaatcaaaatggagattgtggaccatgcactgcatgccttgacagatgaagtgatcattcctcattctggttgggagcgggaacctaatgaagactgtaagccacgccatattgagtgggaatcggtgctcaccaacacagctggctgccttaggaatgtaagctcagagaggagtgaagctcgccggaaacttcgggaatgtgatggtttagttgatgccctcattttcattgttcaggctgagattgggcagaaggattcagacagcaagcttgtagagaactgtgtttgccttcttcggaacttatcatatcaagttcaccgggagatcccacaggcagagcgttaccaagaggcagctcccaatgttgccaacaatactgggccacatgctgccagttgctttggggccaagaagggcaaagggaaaaaacctatagaggatccagcaaacgatacagtggatttccctaaaagaacgagtccagctcgaggctatgagctcttatttcagccagaggtggttcggatatacatctcacttcttaaggagagcaagactcctgccatcctagaagcctcagctggagctatccagaacttgtgtgctgggcgctggacgtatggtcgatacatccgctctgctctgcgtcaagagaaggctctttctgccatagctgacctcctgactaatgaacatgaacgggtggtgaaagctgcatctggagcactgagaaacctggctgtggatgctcgcaacaaagaattaattggtaaacatgctattcctaacttggtaaagaatctgccaggaggacagcagaactcctcttggaatttctctgaggacactgtcatctctattttgaacactatcaacgaggttatcgctgagaacttggaggctgccaaaaagcttcgagagacacagggtattgagaagctggtgttgatcaacaaatcagggaaccgctcagaaaaagaagttcgagcagcagcacttgtattacagacaatctggggatataaggaactgcggaagccactggaaaaagaaggatggaagaaatcagactttcaggtgaatctaaacaatgcttcccgaagccagagcagtcattcatatgatgatagtactctccctctcattgaccggaaccaaaaatcagataacaactattccacaccaaatgagagaggagaccacaatagaacactggatcgatcgggggatctaggcgacatggagccattgaagggaacaacacccttgatgcaggacgaggggcaggaatctctggaggaagagttggatgtgttggttttggatgatgaggggggccaagtgtcttacccctccatgcagaagatttagcaccactatctccgttccatctgggcttatatgtacttttattttttggtggtgaaattgactgatgattttcctttttcttcgctggactattgtgccaactgccaggctgcctcctgcccttacagccctaagtggctgccttctttccatcaactcccaacttcttcctgtgaagtttaattgtctcaacgcctccccctcccccattccctccatttttctcccaagaaacctgactcaattatttgcatattttgagaaactgctgcagattagttctttttgccagttttccctggaactcctggccttttgtggaggggagggatggagagaataggaatcttcactagaagccgtgggaagaattggaagttacatgctgtatatgcaatgtccagcagtctgataaactgacgattcttaatcaagatttttttcctgatggggaagggacttttattttcttttagagaggggaaagtgtgagctcttcccttattcctaatggctatttttgaagcaaagaaggccagcaacattggcacatgccacctggcaaaggacccttgagtaagtgaaggtctcctaaaactgggattaagaaaccttgctctcctcatctccaaggcagggaccatcaagaacctacagactccatctcttctgcaagcctcatgccaaccctgggctattgctgctgccccttaaacacaggctgtccttaacccacctctcctgccctgtgatatgtctgctgagttggcctggccatttccaagaggctgtagaaaggggagaatgtcaaggaagacttttggtagagaaggagcagaaagatgtgtttttgggaagaagaagacctctaggaggagctagtaggaatgtacatgaagcaattagtctgaaactggcttccccactcccccgtttctccttttcctatccttataggcctgtcccttgcctctgccctggattggttggcaaactaaaggacttgatgtacataactcctgtcccttttcccttacaaggtggggattgcccctggctttgcctcttctttgtgcctttggcctggggtgcatctcctcccgcccttccatgtgcctttctttgcctctgcagtctcatttctcataattttgcaaattatattttgttgctttcttacctactattggccctaaatagcagaaagaagagaagtgaccgagagaacctcagattcttcattgaggattggtatagccatgatttcagtcatagcaagcttttgctcaacagcatatgggtgggattttgcaaaaatcctattctgatgaatctcaaagtaaggctggtaagagaagtgagtggtgtgactcttactccttaggtgcccagaatttaccatcatctctgaaggagttacagggaagtggtctccccaattctcccctccctccagtattgccccctctcactttagcatatattaattagcaggttgggctagagaaatcagctgctatgcgggttgattattattattatttctaatccttttccttatttgccttctactccccttaatctaatctaaaagctctgttccatgcaactggagttccttatccctctcttccccttcccttatatattgaggctatggggtaggagaaaagtgcacaacccaccaccccctttactcgtgcattaaaatttcttatttacccttttcccccttcccatttcttcccactttcatctaccttttctggcaaaaaggagccttttgctctctgtgaccctaagagcacactgcacagggaaaattgccccatccagacctggctccactcttgatctctcttgtcctcttctgctcttttcctggtgctcttttttctcggtggggtgtgggtaatagaacagccgtgggcttttggggacctttaacttttttttctctcttttgtttataaaaaacactaaacattcaattccagagaaccaaaaatcccaccttcccaccgaacactactaaggggcttgtgttctgctccataccttttctcttttctttctgtcttgttaatgcttttaaaaacaaatgagttttttatataaataaagtttttaaagtgtgtatgtggggggtctgtgtcatttcttcacttcaagctgttatttcttccctgctttgcatctttgttacttccttatgtatcagtgtcctttccagagcaaccagaaggaggttataccaggatttattttgagctcagccccaactctttatcaagcaacattcttgttaactatatgtgaaacattttttcttctgaagattcttaaaaattgaatgtggctgaagttgaacatgggagcttattgctaatttagagataggaaactgaagcataaagaattaatgacttactttaattactggaattcttctgcaacatttgacaaaactaaccttgaataaggcccactgtaatacgtagctctcttaaatataacacttaggactagaagattagaaactaccaatcccaactacgtaataggaaaatgtaggatcaaaaggcccatgtatataagtactgaccactgggccataatgttgcttctcaggctatatgcagtcctttagtcagaagtcaataggcctatttattaatattttacagaccatattacctggattaccagggactatctttgctgcagagatcaagggttaagatctatgggaagatacttatttttctgaggtccttatgtcctgtcatataattaaagactcaagagaatttatgtgaaatgctttctgtatgccccaatctttagattaaaattatatagctgctcctga

SEQ ID NO: 285190 - DNA, 5055 bp, Homo sapiens
ctgccagatcagtttgtcaccacccaggctcccttgcctttggctgggtgcaacttccattttaggtgttggatctgagggggaaaaaaaagagagagggagagagagagaaagaagagcaggaaagatcccgaaaggaggaagaggtggcgaaaaatcaactgccctgctggatttgtctttctcagcaccttggcgaagccttgggtttctttcttaaaggactgatttttagaactccacatttgaggagctatgaagacatgattggtgaggaggtgccatcggatcaatactactgggctcctttggcccagcatgagcgaggaagtttagcaagcttggatagcctgcgcaaaggagggcctccacctcctaattggagacagccagagctgccagaggtgatcgccatgcttggattccgcttggatgctgtcaagtccaatgcagctgcatacctgcaacacttatgctaccgcaatgacaaggtgaagactgacgtgcggaagctcaagggcatcccagtactggtgggattgttagaccatcccaaaaaggaagtgcaccttggagcctgtggagctctcaagaatatctcttttggacgtgaccaggataacaagattgccataaaaaactgtgatggtgtgcctgcccttgtgcgattgcttcgaaaggctcgtgatatggaccttactgaagttattaccggaaccctgtggaatctttcatcccatgactcaatcaaaatggagattgtggaccatgcactgcatgccttgacagatgaagtgatcattcctcattctggttgggagcgggaacctaatgaagactgtaagccacgccatattgagtgggaatcggtgctcaccaacacagctggctgccttaggaatgtaagctcagagaggagtgaagctcgccggaaacttcgggaatgtgatggtttagttgatgccctcattttcattgttcaggctgagattgggcagaaggattcagacagcaagcttgtagagaactgtgtttgccttcttcggaacttatcatatcaagttcaccgggagatcccacaggcagagcgttaccaagaggcagctcccaatgttgccaacaatactgggccacatgctgccagttgctttggggccaagaagggcaaagggaaaaaacctatagaggatccagcaaacgatacagtggatttccctaaaagaacgagtccagctcgaggctatgagctcttatttcagccagaggtggttcggatatacatctcacttcttaaggagagcaagactcctgccatcctagaagcctcagctggagctatccagaacttgtgtgctgggcgctggacgtatggtcgatacatccgctctgctctgcgtcaagagaaggctctttctgccatagctgacctcctgactaatgaacatgaacgggtggtgaaagctgcatctggagcactgagaaacctggctgtggatgctcgcaacaaagaattaattggtaaacatgctattcctaacttggtaaagaatctgccaggaggacagcagaactcctcttggaatttctctgaggacactgtcatctctattttgaacactatcaacgaggttatcgctgagaacttggaggctgccaaaaagcttcgagagacacagggtattgagaagctggtgttgatcaacaaatcagggaaccgctcagaaaaagaagttcgagcagcagcacttgtattacagacaatctggggatataaggaactgcggaagccactggaaaaagaaggatggaagaaatcagactttcaggtgaatctaaacaatgcttcccgaagccagagcagtcattcatatgatgatagtactctccctctcattgaccggaaccaaaaatcagataagaaacctgatcgggaagaaattcagatgagcaatatgggatcaaacacaaaatcactagataacaactattccacaccaaatgagagaggagaccacaatagaacactggatcgatcgggggatctaggcgacatggagccattgaagggaacaacacccttgatgcaggacgaggggcaggaatctctggaggaagagttggatgtgttggttttggatgatgaggggggccaagtgtcttacccctccatgcagaagatttagcaccactatctccgttccatctgggcttatatgtacttttattttttggtggtgaaattgactgatgattttcctttttcttcgctggactattgtgccaactgccaggctgcctcctgcccttacagccctaagtggctgccttctttccatcaactcccaacttcttcctgtgaagtttaattgtctcaacgcctccccctcccccattccctccatttttctcccaagaaacctgactcaattatttgcatattttgagaaactgctgcagattagttctttttgccagttttccctggaactcctggccttttgtggaggggagggatggagagaataggaatcttcactagaagccgtgggaagaattggaagttacatgctgtatatgcaatgtccagcagtctgataaactgacgattcttaatcaagatttttttcctgatggggaagggacttttattttcttttagagaggggaaagtgtgagctcttcccttattcctaatggctatttttgaagcaaagaaggccagcaacattggcacatgccacctggcaaaggacccttgagtaagtgaaggtctcctaaaactgggattaagaaaccttgctctcctcatctccaaggcagggaccatcaagaacctacagactccatctcttctgcaagcctcatgccaaccctgggctattgctgctgccccttaaacacaggctgtccttaacccacctctcctgccctgtgatatgtctgctgagttggcctggccatttccaagaggctgtagaaaggggagaatgtcaaggaagacttttggtagagaaggagcagaaagatgtgtttttgggaagaagaagacctctaggaggagctagtaggaatgtacatgaagcaattagtctgaaactggcttccccactcccccgtttctccttttcctatccttataggcctgtcccttgcctctgccctggattggttggcaaactaaaggacttgatgtacataactcctgtcccttttcccttacaaggtggggattgcccctggctttgcctcttctttgtgcctttggcctggggtgcatctcctcccgcccttccatgtgcctttctttgcctctgcagtctcatttctcataattttgcaaattatattttgttgctttcttacctactattggccctaaatagcagaaagaagagaagtgaccgagagaacctcagattcttcattgaggattggtatagccatgatttcagtcatagcaagcttttgctcaacagcatatgggtgggattttgcaaaaatcctattctgatgaatctcaaagtaaggctggtaagagaagtgagtggtgtgactcttactccttaggtgcccagaatttaccatcatctctgaaggagttacagggaagtggtctccccaattctcccctccctccagtattgccccctctcactttagcatatattaattagcaggttgggctagagaaatcagctgctatgcgggttgattattattattatttctaatccttttccttatttgccttctactccccttaatctaatctaaaagctctgttccatgcaactggagttccttatccctctcttccccttcccttatatattgaggctatggggtaggagaaaagtgcacaacccaccaccccctttactcgtgcattaaaatttcttatttacccttttcccccttcccatttcttcccactttcatctaccttttctggcaaaaaggagccttttgctctctgtgaccctaagagcacactgcacagggaaaattgccccatccagacctggctccactcttgatctctcttgtcctcttctgctcttttcctggtgctcttttttctcggtggggtgtgggtaatagaacagccgtgggcttttggggacctttaacttttttttctctcttttgtttataaaaaacactaaacattcaattccagagaaccaaaaatcccaccttcccaccgaacactactaaggggcttgtgttctgctccataccttttctcttttctttctgtcttgttaatgcttttaaaaacaaatgagttttttatataaataaagtttttaaagtgtgtatgtggggggtctgtgtcatttcttcacttcaagctgttatttcttccctgctttgcatctttgttacttccttatgtatcagtgtcctttccagagcaaccagaaggaggttataccaggatttattttgagctcagccccaactctttatcaagcaacattcttgttaactatatgtgaaacattttttcttctgaagattcttaaaaattgaatgtggctgaagttgaacatgggagcttattgctaatttagagataggaaactgaagcataaagaattaatgacttactttaattactggaattcttctgcaacatttgacaaaactaaccttgaataaggcccactgtaatacgtagctctcttaaatataacacttaggactagaagattagaaactaccaatcccaactacgtaataggaaaatgtaggatcaaaaggcccatgtatataagtactgaccactgggccataatgttgcttctcaggctatatgcagtcctttagtcagaagtcaataggcctatttattaatattttacagaccatattacctggattaccagggactatctttgctgcagagatcaagggttaagatctatgggaagatacttatttttctgaggtccttatgtcctgtcatataattaaagactcaagagaatttatgtgaaatgctttctgtatgccccaatctttagattaaaattatatagctgctcctga

SEQ ID NO: 285191 - DNA, 6027 bp, Homo sapiens
ctgccagatcagtttgtcaccacccaggctcccttgcctttggctgggtgcaacttccattttaggtgttggatctgagggggaaaaaaaagagagagggagagagagagaaagaagagcaggaaagatcccgaaaggaggaagaggtggcgaaaaatcaactgccctgctggatttgtctttctcagcaccttggcgaagccttgggtttctttcttaaaggactgatttttagaactccacatttgagctctctccttcctgcttcctccttgctgtggtggctgggatgcttcttccatgattttttgaatctagactgggctgttctctgtgttaaaccaatcagttgcgaccttctcttaacagtggagtcgaccgccagcatcttggcctctgtgaaggaacaagaggcccagtttgagaagctgacccgggcgctggaggaggaacggcgccacgtctcggcgcagctggaacgcgtccgggtctcaccacaagatgccaacccactcatggccaacggcacactcacccgccggcatcagaacggccggtttgtgggcgatgctgaccttgaaagacagaaattttcagatttgaaactcaacggaccccaggatcacagtcaccttctatatagcaccatccccaggatgcaggagccggggcagattgtggagacctacacggaggaggatcctgagggagccatgtctgtagtctctgtggagacctcagatgatgggaccactcggcgcacagagaccacggtcaagaaagtagtgaagactgtgacaacacggacagtacagccagtcgctatgggaccagacgggttgcctgtggatgcttcatcagtttctaacaactatatccagactttgggtcgtgatttccgcaagaatggcaatgggggacctggtccctatgtggggcaagctggcactgctacccttcctaggaacttccactaccctcctgatggttatagtcgccactatgaagatggttatccaggtggcagtgataactatggcagtctgtcccgggtgacccgcattgaggagcggtataggcccagcatggaaggctaccgggcacctagtagacaggatgtgtatgggccccaaccccaggttcgggtaggtgggagcagcgtggatctgcatcgctttcatccagagccttatgggctagaggatgaccagcgtagtatgggctatgatgacctggattatggtatgatgtctgattatggcactgcccgtcggactgggacaccctctgaccctcgtcggcgcctcaggagctatgaagacatgattggtgaggaggtgccatcggatcaatactactgggctcctttggcccagcatgagcgaggaagtttagcaagcttggatagcctgcgcaaaggagggcctccacctcctaattggagacagccagagctgccagaggtgatcgccatgcttggattccgcttggatgctgtcaagtccaatgcagctgcatacctgcaacacttatgctaccgcaatgacaaggtgaagactgacgtgcggaagctcaagggcatcccagtactggtgggattgttagaccatcccaaaaaggaagtgcaccttggagcctgtggagctctcaagaatatctcttttggacgtgaccaggataacaagattgccataaaaaactgtgatggtgtgcctgcccttgtgcgattgcttcgaaaggctcgtgatatggaccttactgaagttattaccggaaccctgtggaatctttcatcccatgactcaatcaaaatggagattgtggaccatgcactgcatgccttgacagatgaagtgatcattcctcattctggttgggagcgggaacctaatgaagactgtaagccacgccatattgagtgggaatcggtgctcaccaacacagctggctgccttaggaatgtaagctcagagaggagtgaagctcgccggaaacttcgggaatgtgatggtttagttgatgccctcattttcattgttcaggctgagattgggcagaaggattcagacagcaagcttgtagagaactgtgtttgccttcttcggaacttatcatatcaagttcaccgggagatcccacaggcagagcgttaccaagaggcagctcccaatgttgccaacaatactgggccacatgctgccagttgctttggggccaagaagggcaaagggaaaaaacctatagaggatccagcaaacgatacagtggatttccctaaaagaacgagtccagctcgaggctatgagctcttatttcagccagaggtggttcggatatacatctcacttcttaaggagagcaagactcctgccatcctagaagcctcagctggagctatccagaacttgtgtgctgggcgctggacgtatggtcgatacatccgctctgctctgcgtcaagagaaggctctttctgccatagctgacctcctgactaatgaacatgaacgggtggtgaaagctgcatctggagcactgagaaacctggctgtggatgctcgcaacaaagaattaattggtaaacatgctattcctaacttggtaaagaatctgccaggaggacagcagaactcctcttggaatttctctgaggacactgtcatctctattttgaacactatcaacgaggttatcgctgagaacttggaggctgccaaaaagcttcgagagacacagggtattgagaagctggtgttgatcaacaaatcagggaaccgctcagaaaaagaagttcgagcagcagcacttgtattacagacaatctggggatataaggaactgcggaagccactggaaaaagaaggatggaagaaatcagactttcaggtgaatctaaacaatgcttcccgaagccagagcagtcattcatatgatgatagtactctccctctcattgaccggaaccaaaaatcagataagaaacctgatcgggaagaaattcagatgagcaatatgggatcaaacacaaaatcactagataacaactattccacaccaaatgagagaggagaccacaatagaacactggatcgatcgggggatctaggcgacatggagccattgaagggaacaacacccttgatgcagaagatttagcaccactatctccgttccatctgggcttatatgtacttttattttttggtggtgaaattgactgatgattttcctttttcttcgctggactattgtgccaactgccaggctgcctcctgcccttacagccctaagtggctgccttctttccatcaactcccaacttcttcctgtgaagtttaattgtctcaacgcctccccctcccccattccctccatttttctcccaagaaacctgactcaattatttgcatattttgagaaactgctgcagattagttctttttgccagttttccctggaactcctggccttttgtggaggggagggatggagagaataggaatcttcactagaagccgtgggaagaattggaagttacatgctgtatatgcaatgtccagcagtctgataaactgacgattcttaatcaagatttttttcctgatggggaagggacttttattttcttttagagaggggaaagtgtgagctcttcccttattcctaatggctatttttgaagcaaagaaggccagcaacattggcacatgccacctggcaaaggacccttgagtaagtgaaggtctcctaaaactgggattaagaaaccttgctctcctcatctccaaggcagggaccatcaagaacctacagactccatctcttctgcaagcctcatgccaaccctgggctattgctgctgccccttaaacacaggctgtccttaacccacctctcctgccctgtgatatgtctgctgagttggcctggccatttccaagaggctgtagaaaggggagaatgtcaaggaagacttttggtagagaaggagcagaaagatgtgtttttgggaagaagaagacctctaggaggagctagtaggaatgtacatgaagcaattagtctgaaactggcttccccactcccccgtttctccttttcctatccttataggcctgtcccttgcctctgccctggattggttggcaaactaaaggacttgatgtacataactcctgtcccttttcccttacaaggtggggattgcccctggctttgcctcttctttgtgcctttggcctggggtgcatctcctcccgcccttccatgtgcctttctttgcctctgcagtctcatttctcataattttgcaaattatattttgttgctttcttacctactattggccctaaatagcagaaagaagagaagtgaccgagagaacctcagattcttcattgaggattggtatagccatgatttcagtcatagcaagcttttgctcaacagcatatgggtgggattttgcaaaaatcctattctgatgaatctcaaagtaaggctggtaagagaagtgagtggtgtgactcttactccttaggtgcccagaatttaccatcatctctgaaggagttacagggaagtggtctccccaattctcccctccctccagtattgccccctctcactttagcatatattaattagcaggttgggctagagaaatcagctgctatgcgggttgattattattattatttctaatccttttccttatttgccttctactccccttaatctaatctaaaagctctgttccatgcaactggagttccttatccctctcttccccttcccttatatattgaggctatggggtaggagaaaagtgcacaacccaccaccccctttactcgtgcattaaaatttcttatttacccttttcccccttcccatttcttcccactttcatctaccttttctggcaaaaaggagccttttgctctctgtgaccctaagagcacactgcacagggaaaattgccccatccagacctggctccactcttgatctctcttgtcctcttctgctcttttcctggtgctcttttttctcggtggggtgtgggtaatagaacagccgtgggcttttggggacctttaacttttttttctctcttttgtttataaaaaacactaaacattcaattccagagaaccaaaaatcccaccttcccaccgaacactactaaggggcttgtgttctgctccataccttttctcttttctttctgtcttgttaatgcttttaaaaacaaatgagttttttatataaataaagtttttaaagtgtgtatgtggggggtctgtgtcatttcttcacttcaagctgttatttcttccctgctttgcatctttgttacttccttatgtatcagtgtcctttccagagcaaccagaaggaggttataccaggatttattttgagctcagccccaactctttatcaagcaacattcttgttaactatatgtgaaacattttttcttctgaagattcttaaaaattgaatgtggctgaagttgaacatgggagcttattgctaatttagagataggaaactgaagcataaagaattaatgacttactttaattactggaattcttctgcaacatttgacaaaactaaccttgaataaggcccactgtaatacgtagctctcttaaatataacacttaggactagaagattagaaactaccaatcccaactacgtaataggaaaatgtaggatcaaaaggcccatgtatataagtactgaccactgggccataatgttgcttctcaggctatatgcagtcctttagtcagaagtcaataggcctatttattaatattttacagaccatattacctggattaccagggactatctttgctgcagagatcaagggttaagatctatgggaagatacttatttttctgaggtccttatgtcctgtcatataattaaagactcaagagaatttatgtgaaatgctttctgtatgccccaatctttagattaaaattatatagctgctcctga

SEQ ID NO: 285192 - DNA, 6100 bp, Homo sapiens
ctgccagatcagtttgtcaccacccaggctcccttgcctttggctgggtgcaacttccattttaggtgttggatctgagggggaaaaaaaagagagagggagagagagagaaagaagagcaggaaagatcccgaaaggaggaagaggtggcgaaaaatcaactgccctgctggatttgtctttctcagcaccttggcgaagccttgggtttctttcttaaaggactgatttttagaactccacatttgaggtgtgtggcttttgaagaaaatgtatgtactgacgggaaaaggaagataagcaagtcgaatttttgtcttacgctctctccttcctgcttcctccttgctgtggtggctgggatgcttcttccatgattttttgaatctagactgggctgttctctgtgttaaaccaatcagttgcgaccttctcttaacagtggagtcgaccgccagcatcttggcctctgtgaaggaacaagaggcccagtttgagaagctgacccgggcgctggaggaggaacggcgccacgtctcggcgcagctggaacgcgtccgggtctcaccacaagatgccaacccactcatggccaacggcacactcacccgccggcatcagaacggccggtttgtgggcgatgctgaccttgaaagacagaaattttcagatttgaaactcaacggaccccaggatcacagtcaccttctatatagcaccatccccaggatgcaggagccggggcagattgtggagacctacacggaggaggatcctgagggagccatgtctgtagtctctgtggagacctcagatgatgggaccactcggcgcacagagaccacggtcaagaaagtagtgaagactgtgacaacacggacagtacagccagtcgctatgggaccagacgggttgcctgtggatgcttcatcagtttctaacaactatatccagactttgggtcgtgatttccgcaagaatggcaatgggggacctggtccctatgtggggcaagctggcactgctacccttcctaggaacttccactaccctcctgatggttatagtcgccactatgaagatggttatccaggtggcagtgataactatggcagtctgtcccgggtgacccgcattgaggagcggtataggcccagcatggaaggctaccgggcacctagtagacaggatgtgtatgggccccaaccccaggttcgggtaggtgggagcagcgtggatctgcatcgctttcatccagagccttatgggctagaggatgaccagcgtagtatgggctatgatgacctggattatggtatgatgtctgattatggcactgcccgtcggactgggacaccctctgaccctcgtcggcgcctcaggagctatgaagacatgattggtgaggaggtgccatcggatcaatactactgggctcctttggcccagcatgagcgaggaagtttagcaagcttggatagcctgcgcaaaggagggcctccacctcctaattggagacagccagagctgccagaggtgatcgccatgcttggattccgcttggatgctgtcaagtccaatgcagctgcatacctgcaacacttatgctaccgcaatgacaaggtgaagactgacgtgcggaagctcaagggcatcccagtactggtgggattgttagaccatcccaaaaaggaagtgcaccttggagcctgtggagctctcaagaatatctcttttggacgtgaccaggataacaagattgccataaaaaactgtgatggtgtgcctgcccttgtgcgattgcttcgaaaggctcgtgatatggaccttactgaagttattaccggaaccctgtggaatctttcatcccatgactcaatcaaaatggagattgtggaccatgcactgcatgccttgacagatgaagtgatcattcctcattctggttgggagcgggaacctaatgaagactgtaagccacgccatattgagtgggaatcggtgctcaccaacacagctggctgccttaggaatgtaagctcagagaggagtgaagctcgccggaaacttcgggaatgtgatggtttagttgatgccctcattttcattgttcaggctgagattgggcagaaggattcagacagcaagcttgtagagaactgtgtttgccttcttcggaacttatcatatcaagttcaccgggagatcccacaggcagagcgttaccaagaggcagctcccaatgttgccaacaatactgggccacatgctgccagttgctttggggccaagaagggcaaagggaaaaaacctatagaggatccagcaaacgatacagtggatttccctaaaagaacgagtccagctcgaggctatgagctcttatttcagccagaggtggttcggatatacatctcacttcttaaggagagcaagactcctgccatcctagaagcctcagctggagctatccagaacttgtgtgctgggcgctggacgtatggtcgatacatccgctctgctctgcgtcaagagaaggctctttctgccatagctgacctcctgactaatgaacatgaacgggtggtgaaagctgcatctggagcactgagaaacctggctgtggatgctcgcaacaaagaattaattggtaaacatgctattcctaacttggtaaagaatctgccaggaggacagcagaactcctcttggaatttctctgaggacactgtcatctctattttgaacactatcaacgaggttatcgctgagaacttggaggctgccaaaaagcttcgagagacacagggtattgagaagctggtgttgatcaacaaatcagggaaccgctcagaaaaagaagttcgagcagcagcacttgtattacagacaatctggggatataaggaactgcggaagccactggaaaaagaaggatggaagaaatcagactttcaggtgaatctaaacaatgcttcccgaagccagagcagtcattcatatgatgatagtactctccctctcattgaccggaaccaaaaatcagataagaaacctgatcgggaagaaattcagatgagcaatatgggatcaaacacaaaatcactagataacaactattccacaccaaatgagagaggagaccacaatagaacactggatcgatcgggggatctaggcgacatggagccattgaagggaacaacacccttgatgcagaagatttagcaccactatctccgttccatctgggcttatatgtacttttattttttggtggtgaaattgactgatgattttcctttttcttcgctggactattgtgccaactgccaggctgcctcctgcccttacagccctaagtggctgccttctttccatcaactcccaacttcttcctgtgaagtttaattgtctcaacgcctccccctcccccattccctccatttttctcccaagaaacctgactcaattatttgcatattttgagaaactgctgcagattagttctttttgccagttttccctggaactcctggccttttgtggaggggagggatggagagaataggaatcttcactagaagccgtgggaagaattggaagttacatgctgtatatgcaatgtccagcagtctgataaactgacgattcttaatcaagatttttttcctgatggggaagggacttttattttcttttagagaggggaaagtgtgagctcttcccttattcctaatggctatttttgaagcaaagaaggccagcaacattggcacatgccacctggcaaaggacccttgagtaagtgaaggtctcctaaaactgggattaagaaaccttgctctcctcatctccaaggcagggaccatcaagaacctacagactccatctcttctgcaagcctcatgccaaccctgggctattgctgctgccccttaaacacaggctgtccttaacccacctctcctgccctgtgatatgtctgctgagttggcctggccatttccaagaggctgtagaaaggggagaatgtcaaggaagacttttggtagagaaggagcagaaagatgtgtttttgggaagaagaagacctctaggaggagctagtaggaatgtacatgaagcaattagtctgaaactggcttccccactcccccgtttctccttttcctatccttataggcctgtcccttgcctctgccctggattggttggcaaactaaaggacttgatgtacataactcctgtcccttttcccttacaaggtggggattgcccctggctttgcctcttctttgtgcctttggcctggggtgcatctcctcccgcccttccatgtgcctttctttgcctctgcagtctcatttctcataattttgcaaattatattttgttgctttcttacctactattggccctaaatagcagaaagaagagaagtgaccgagagaacctcagattcttcattgaggattggtatagccatgatttcagtcatagcaagcttttgctcaacagcatatgggtgggattttgcaaaaatcctattctgatgaatctcaaagtaaggctggtaagagaagtgagtggtgtgactcttactccttaggtgcccagaatttaccatcatctctgaaggagttacagggaagtggtctccccaattctcccctccctccagtattgccccctctcactttagcatatattaattagcaggttgggctagagaaatcagctgctatgcgggttgattattattattatttctaatccttttccttatttgccttctactccccttaatctaatctaaaagctctgttccatgcaactggagttccttatccctctcttccccttcccttatatattgaggctatggggtaggagaaaagtgcacaacccaccaccccctttactcgtgcattaaaatttcttatttacccttttcccccttcccatttcttcccactttcatctaccttttctggcaaaaaggagccttttgctctctgtgaccctaagagcacactgcacagggaaaattgccccatccagacctggctccactcttgatctctcttgtcctcttctgctcttttcctggtgctcttttttctcggtggggtgtgggtaatagaacagccgtgggcttttggggacctttaacttttttttctctcttttgtttataaaaaacactaaacattcaattccagagaaccaaaaatcccaccttcccaccgaacactactaaggggcttgtgttctgctccataccttttctcttttctttctgtcttgttaatgcttttaaaaacaaatgagttttttatataaataaagtttttaaagtgtgtatgtggggggtctgtgtcatttcttcacttcaagctgttatttcttccctgctttgcatctttgttacttccttatgtatcagtgtcctttccagagcaaccagaaggaggttataccaggatttattttgagctcagccccaactctttatcaagcaacattcttgttaactatatgtgaaacattttttcttctgaagattcttaaaaattgaatgtggctgaagttgaacatgggagcttattgctaatttagagataggaaactgaagcataaagaattaatgacttactttaattactggaattcttctgcaacatttgacaaaactaaccttgaataaggcccactgtaatacgtagctctcttaaatataacacttaggactagaagattagaaactaccaatcccaactacgtaataggaaaatgtaggatcaaaaggcccatgtatataagtactgaccactgggccataatgttgcttctcaggctatatgcagtcctttagtcagaagtcaataggcctatttattaatattttacagaccatattacctggattaccagggactatctttgctgcagagatcaagggttaagatctatgggaagatacttatttttctgaggtccttatgtcctgtcatataattaaagactcaagagaatttatgtgaaatgctttctgtatgccccaatctttagattaaaattatatagctgctcctga

SEQ ID NO: 285193 - DNA, 5802 bp, Homo sapiens
ctgccagatcagtttgtcaccacccaggctcccttgcctttggctgggtgcaacttccattttaggtgttggatctgagggggaaaaaaaagagagagggagagagagagaaagaagagcaggaaagatcccgaaaggaggaagaggtggcgaaaaatcaactgccctgctggatttgtctttctcagcaccttggcgaagccttgggtttctttcttaaaggactgatttttagaactccacatttgaggtgtgtggcttttgaagaaaatgtatgtactgacgggaaaaggaagataagcaagtcgaatttttgtcttacgaacggccggtttgtgggcgatgctgaccttgaaagacagaaattttcagatttgaaactcaacggaccccaggatcacagtcaccttctatatagcaccatccccaggatgcaggagccggggcagattgtggagacctacacggaggaggatcctgagggagccatgtctgtagtctctgtggagacctcagatgatgggaccactcggcgcacagagaccacggtcaagaaagtagtgaagactgtgacaacacggacagtacagccagtcgctatgggaccagacgggttgcctgtggatgcttcatcagtttctaacaactatatccagactttgggtcgtgatttccgcaagaatggcaatgggggacctggtccctatgtggggcaagctggcactgctacccttcctaggaacttccactaccctcctgatggttatagtcgccactatgaagatggttatccaggtggcagtgataactatggcagtctgtcccgggtgacccgcattgaggagcggtataggcccagcatggaaggctaccgggcacctagtagacaggatgtgtatgggccccaaccccaggttcgggtaggtgggagcagcgtggatctgcatcgctttcatccagagccttatgggctagaggatgaccagcgtagtatgggctatgatgacctggattatggtatgatgtctgattatggcactgcccgtcggactgggacaccctctgaccctcgtcggcgcctcaggagctatgaagacatgattggtgaggaggtgccatcggatcaatactactgggctcctttggcccagcatgagcgaggaagtttagcaagcttggatagcctgcgcaaaggagggcctccacctcctaattggagacagccagagctgccagaggtgatcgccatgcttggattccgcttggatgctgtcaagtccaatgcagctgcatacctgcaacacttatgctaccgcaatgacaaggtgaagactgacgtgcggaagctcaagggcatcccagtactggtgggattgttagaccatcccaaaaaggaagtgcaccttggagcctgtggagctctcaagaatatctcttttggacgtgaccaggataacaagattgccataaaaaactgtgatggtgtgcctgcccttgtgcgattgcttcgaaaggctcgtgatatggaccttactgaagttattaccggaaccctgtggaatctttcatcccatgactcaatcaaaatggagattgtggaccatgcactgcatgccttgacagatgaagtgatcattcctcattctggttgggagcgggaacctaatgaagactgtaagccacgccatattgagtgggaatcggtgctcaccaacacagctggctgccttaggaatgtaagctcagagaggagtgaagctcgccggaaacttcgggaatgtgatggtttagttgatgccctcattttcattgttcaggctgagattgggcagaaggattcagacagcaagcttgtagagaactgtgtttgccttcttcggaacttatcatatcaagttcaccgggagatcccacaggcagagcgttaccaagaggcagctcccaatgttgccaacaatactgggccacatgctgccagttgctttggggccaagaagggcaaagggaaaaaacctatagaggatccagcaaacgatacagtggatttccctaaaagaacgagtccagctcgaggctatgagctcttatttcagccagaggtggttcggatatacatctcacttcttaaggagagcaagactcctgccatcctagaagcctcagctggagctatccagaacttgtgtgctgggcgctggacgtatggtcgatacatccgctctgctctgcgtcaagagaaggctctttctgccatagctgacctcctgactaatgaacatgaacgggtggtgaaagctgcatctggagcactgagaaacctggctgtggatgctcgcaacaaagaattaattggtaaacatgctattcctaacttggtaaagaatctgccaggaggacagcagaactcctcttggaatttctctgaggacactgtcatctctattttgaacactatcaacgaggttatcgctgagaacttggaggctgccaaaaagcttcgagagacacagggtattgagaagctggtgttgatcaacaaatcagggaaccgctcagaaaaagaagttcgagcagcagcacttgtattacagacaatctggggatataaggaactgcggaagccactggaaaaagaaggatggaagaaatcagactttcaggtgaatctaaacaatgcttcccgaagccagagcagtcattcatatgatgatagtactctccctctcattgaccggaaccaaaaatcagataagaaacctgatcgggaagaaattcagatgagcaatatgggatcaaacacaaaatcactagataacaactattccacaccaaatgagagaggagaccacaatagaacactggatcgatcgggggatctaggcgacatggagccattgaagggaacaacacccttgatgcagaagatttagcaccactatctccgttccatctgggcttatatgtacttttattttttggtggtgaaattgactgatgattttcctttttcttcgctggactattgtgccaactgccaggctgcctcctgcccttacagccctaagtggctgccttctttccatcaactcccaacttcttcctgtgaagtttaattgtctcaacgcctccccctcccccattccctccatttttctcccaagaaacctgactcaattatttgcatattttgagaaactgctgcagattagttctttttgccagttttccctggaactcctggccttttgtggaggggagggatggagagaataggaatcttcactagaagccgtgggaagaattggaagttacatgctgtatatgcaatgtccagcagtctgataaactgacgattcttaatcaagatttttttcctgatggggaagggacttttattttcttttagagaggggaaagtgtgagctcttcccttattcctaatggctatttttgaagcaaagaaggccagcaacattggcacatgccacctggcaaaggacccttgagtaagtgaaggtctcctaaaactgggattaagaaaccttgctctcctcatctccaaggcagggaccatcaagaacctacagactccatctcttctgcaagcctcatgccaaccctgggctattgctgctgccccttaaacacaggctgtccttaacccacctctcctgccctgtgatatgtctgctgagttggcctggccatttccaagaggctgtagaaaggggagaatgtcaaggaagacttttggtagagaaggagcagaaagatgtgtttttgggaagaagaagacctctaggaggagctagtaggaatgtacatgaagcaattagtctgaaactggcttccccactcccccgtttctccttttcctatccttataggcctgtcccttgcctctgccctggattggttggcaaactaaaggacttgatgtacataactcctgtcccttttcccttacaaggtggggattgcccctggctttgcctcttctttgtgcctttggcctggggtgcatctcctcccgcccttccatgtgcctttctttgcctctgcagtctcatttctcataattttgcaaattatattttgttgctttcttacctactattggccctaaatagcagaaagaagagaagtgaccgagagaacctcagattcttcattgaggattggtatagccatgatttcagtcatagcaagcttttgctcaacagcatatgggtgggattttgcaaaaatcctattctgatgaatctcaaagtaaggctggtaagagaagtgagtggtgtgactcttactccttaggtgcccagaatttaccatcatctctgaaggagttacagggaagtggtctccccaattctcccctccctccagtattgccccctctcactttagcatatattaattagcaggttgggctagagaaatcagctgctatgcgggttgattattattattatttctaatccttttccttatttgccttctactccccttaatctaatctaaaagctctgttccatgcaactggagttccttatccctctcttccccttcccttatatattgaggctatggggtaggagaaaagtgcacaacccaccaccccctttactcgtgcattaaaatttcttatttacccttttcccccttcccatttcttcccactttcatctaccttttctggcaaaaaggagccttttgctctctgtgaccctaagagcacactgcacagggaaaattgccccatccagacctggctccactcttgatctctcttgtcctcttctgctcttttcctggtgctcttttttctcggtggggtgtgggtaatagaacagccgtgggcttttggggacctttaacttttttttctctcttttgtttataaaaaacactaaacattcaattccagagaaccaaaaatcccaccttcccaccgaacactactaaggggcttgtgttctgctccataccttttctcttttctttctgtcttgttaatgcttttaaaaacaaatgagttttttatataaataaagtttttaaagtgtgtatgtggggggtctgtgtcatttcttcacttcaagctgttatttcttccctgctttgcatctttgttacttccttatgtatcagtgtcctttccagagcaaccagaaggaggttataccaggatttattttgagctcagccccaactctttatcaagcaacattcttgttaactatatgtgaaacattttttcttctgaagattcttaaaaattgaatgtggctgaagttgaacatgggagcttattgctaatttagagataggaaactgaagcataaagaattaatgacttactttaattactggaattcttctgcaacatttgacaaaactaaccttgaataaggcccactgtaatacgtagctctcttaaatataacacttaggactagaagattagaaactaccaatcccaactacgtaataggaaaatgtaggatcaaaaggcccatgtatataagtactgaccactgggccataatgttgcttctcaggctatatgcagtcctttagtcagaagtcaataggcctatttattaatattttacagaccatattacctggattaccagggactatctttgctgcagagatcaagggttaagatctatgggaagatacttatttttctgaggtccttatgtcctgtcatataattaaagactcaagagaatttatgtgaaatgctttctgtatgccccaatctttagattaaaattatatagctgctcctga

SEQ ID NO: 285194 - DNA, 5657 bp, Homo sapiens
ctgccagatcagtttgtcaccacccaggctcccttgcctttggctgggtgcaacttccattttaggtgttggatctgagggggaaaaaaaagagagagggagagagagagaaagaagagcaggaaagatcccgaaaggaggaagaggtggcgaaaaatcaactgccctgctggatttgtctttctcagcaccttggcgaagccttgggtttctttcttaaaggactgatttttagaactccacatttgaggatcacagtcaccttctatatagcaccatccccaggatgcaggagccggggcagattgtggagacctacacggaggaggatcctgagggagccatgtctgtagtctctgtggagacctcagatgatgggaccactcggcgcacagagaccacggtcaagaaagtagtgaagactgtgacaacacggacagtacagccagtcgctatgggaccagacgggttgcctgtggatgcttcatcagtttctaacaactatatccagactttgggtcgtgatttccgcaagaatggcaatgggggacctggtccctatgtggggcaagctggcactgctacccttcctaggaacttccactaccctcctgatggttatagtcgccactatgaagatggttatccaggtggcagtgataactatggcagtctgtcccgggtgacccgcattgaggagcggtataggcccagcatggaaggctaccgggcacctagtagacaggatgtgtatgggccccaaccccaggttcgggtaggtgggagcagcgtggatctgcatcgctttcatccagagccttatgggctagaggatgaccagcgtagtatgggctatgatgacctggattatggtatgatgtctgattatggcactgcccgtcggactgggacaccctctgaccctcgtcggcgcctcaggagctatgaagacatgattggtgaggaggtgccatcggatcaatactactgggctcctttggcccagcatgagcgaggaagtttagcaagcttggatagcctgcgcaaaggagggcctccacctcctaattggagacagccagagctgccagaggtgatcgccatgcttggattccgcttggatgctgtcaagtccaatgcagctgcatacctgcaacacttatgctaccgcaatgacaaggtgaagactgacgtgcggaagctcaagggcatcccagtactggtgggattgttagaccatcccaaaaaggaagtgcaccttggagcctgtggagctctcaagaatatctcttttggacgtgaccaggataacaagattgccataaaaaactgtgatggtgtgcctgcccttgtgcgattgcttcgaaaggctcgtgatatggaccttactgaagttattaccggaaccctgtggaatctttcatcccatgactcaatcaaaatggagattgtggaccatgcactgcatgccttgacagatgaagtgatcattcctcattctggttgggagcgggaacctaatgaagactgtaagccacgccatattgagtgggaatcggtgctcaccaacacagctggctgccttaggaatgtaagctcagagaggagtgaagctcgccggaaacttcgggaatgtgatggtttagttgatgccctcattttcattgttcaggctgagattgggcagaaggattcagacagcaagcttgtagagaactgtgtttgccttcttcggaacttatcatatcaagttcaccgggagatcccacaggcagagcgttaccaagaggcagctcccaatgttgccaacaatactgggccacatgctgccagttgctttggggccaagaagggcaaagggaaaaaacctatagaggatccagcaaacgatacagtggatttccctaaaagaacgagtccagctcgaggctatgagctcttatttcagccagaggtggttcggatatacatctcacttcttaaggagagcaagactcctgccatcctagaagcctcagctggagctatccagaacttgtgtgctgggcgctggacgtatggtcgatacatccgctctgctctgcgtcaagagaaggctctttctgccatagctgacctcctgactaatgaacatgaacgggtggtgaaagctgcatctggagcactgagaaacctggctgtggatgctcgcaacaaagaattaattggtaaacatgctattcctaacttggtaaagaatctgccaggaggacagcagaactcctcttggaatttctctgaggacactgtcatctctattttgaacactatcaacgaggttatcgctgagaacttggaggctgccaaaaagcttcgagagacacagggtattgagaagctggtgttgatcaacaaatcagggaaccgctcagaaaaagaagttcgagcagcagcacttgtattacagacaatctggggatataaggaactgcggaagccactggaaaaagaaggatggaagaaatcagactttcaggtgaatctaaacaatgcttcccgaagccagagcagtcattcatatgatgatagtactctccctctcattgaccggaaccaaaaatcagataagaaacctgatcgggaagaaattcagatgagcaatatgggatcaaacacaaaatcactagataacaactattccacaccaaatgagagaggagaccacaatagaacactggatcgatcgggggatctaggcgacatggagccattgaagggaacaacacccttgatgcagaagatttagcaccactatctccgttccatctgggcttatatgtacttttattttttggtggtgaaattgactgatgattttcctttttcttcgctggactattgtgccaactgccaggctgcctcctgcccttacagccctaagtggctgccttctttccatcaactcccaacttcttcctgtgaagtttaattgtctcaacgcctccccctcccccattccctccatttttctcccaagaaacctgactcaattatttgcatattttgagaaactgctgcagattagttctttttgccagttttccctggaactcctggccttttgtggaggggagggatggagagaataggaatcttcactagaagccgtgggaagaattggaagttacatgctgtatatgcaatgtccagcagtctgataaactgacgattcttaatcaagatttttttcctgatggggaagggacttttattttcttttagagaggggaaagtgtgagctcttcccttattcctaatggctatttttgaagcaaagaaggccagcaacattggcacatgccacctggcaaaggacccttgagtaagtgaaggtctcctaaaactgggattaagaaaccttgctctcctcatctccaaggcagggaccatcaagaacctacagactccatctcttctgcaagcctcatgccaaccctgggctattgctgctgccccttaaacacaggctgtccttaacccacctctcctgccctgtgatatgtctgctgagttggcctggccatttccaagaggctgtagaaaggggagaatgtcaaggaagacttttggtagagaaggagcagaaagatgtgtttttgggaagaagaagacctctaggaggagctagtaggaatgtacatgaagcaattagtctgaaactggcttccccactcccccgtttctccttttcctatccttataggcctgtcccttgcctctgccctggattggttggcaaactaaaggacttgatgtacataactcctgtcccttttcccttacaaggtggggattgcccctggctttgcctcttctttgtgcctttggcctggggtgcatctcctcccgcccttccatgtgcctttctttgcctctgcagtctcatttctcataattttgcaaattatattttgttgctttcttacctactattggccctaaatagcagaaagaagagaagtgaccgagagaacctcagattcttcattgaggattggtatagccatgatttcagtcatagcaagcttttgctcaacagcatatgggtgggattttgcaaaaatcctattctgatgaatctcaaagtaaggctggtaagagaagtgagtggtgtgactcttactccttaggtgcccagaatttaccatcatctctgaaggagttacagggaagtggtctccccaattctcccctccctccagtattgccccctctcactttagcatatattaattagcaggttgggctagagaaatcagctgctatgcgggttgattattattattatttctaatccttttccttatttgccttctactccccttaatctaatctaaaagctctgttccatgcaactggagttccttatccctctcttccccttcccttatatattgaggctatggggtaggagaaaagtgcacaacccaccaccccctttactcgtgcattaaaatttcttatttacccttttcccccttcccatttcttcccactttcatctaccttttctggcaaaaaggagccttttgctctctgtgaccctaagagcacactgcacagggaaaattgccccatccagacctggctccactcttgatctctcttgtcctcttctgctcttttcctggtgctcttttttctcggtggggtgtgggtaatagaacagccgtgggcttttggggacctttaacttttttttctctcttttgtttataaaaaacactaaacattcaattccagagaaccaaaaatcccaccttcccaccgaacactactaaggggcttgtgttctgctccataccttttctcttttctttctgtcttgttaatgcttttaaaaacaaatgagttttttatataaataaagtttttaaagtgtgtatgtggggggtctgtgtcatttcttcacttcaagctgttatttcttccctgctttgcatctttgttacttccttatgtatcagtgtcctttccagagcaaccagaaggaggttataccaggatttattttgagctcagccccaactctttatcaagcaacattcttgttaactatatgtgaaacattttttcttctgaagattcttaaaaattgaatgtggctgaagttgaacatgggagcttattgctaatttagagataggaaactgaagcataaagaattaatgacttactttaattactggaattcttctgcaacatttgacaaaactaaccttgaataaggcccactgtaatacgtagctctcttaaatataacacttaggactagaagattagaaactaccaatcccaactacgtaataggaaaatgtaggatcaaaaggcccatgtatataagtactgaccactgggccataatgttgcttctcaggctatatgcagtcctttagtcagaagtcaataggcctatttattaatattttacagaccatattacctggattaccagggactatctttgctgcagagatcaagggttaagatctatgggaagatacttatttttctgaggtccttatgtcctgtcatataattaaagactcaagagaatttatgtgaaatgctttctgtatgccccaatctttagattaaaattatatagctgctcctga

SEQ ID NO: 285195 - DNA, 5041 bp, Homo sapiens
ctgccagatcagtttgtcaccacccaggctcccttgcctttggctgggtgcaacttccattttaggtgttggatctgagggggaaaaaaaagagagagggagagagagagaaagaagagcaggaaagatcccgaaaggaggaagaggtggcgaaaaatcaactgccctgctggatttgtctttctcagcaccttggcgaagccttgggtttctttcttaaaggactgatttttagaactccacatttgaggtgtgtggcttttgaagaaaatgtatgtactgacgggaaaaggaagataagcaagtcgaatttttgtcttacggagctatgaagacatgattggtgaggaggtgccatcggatcaatactactgggctcctttggcccagcatgagcgaggaagtttagcaagcttggatagcctgcgcaaaggagggcctccacctcctaattggagacagccagagctgccagaggtgatcgccatgcttggattccgcttggatgctgtcaagtccaatgcagctgcatacctgcaacacttatgctaccgcaatgacaaggtgaagactgacgtgcggaagctcaagggcatcccagtactggtgggattgttagaccatcccaaaaaggaagtgcaccttggagcctgtggagctctcaagaatatctcttttggacgtgaccaggataacaagattgccataaaaaactgtgatggtgtgcctgcccttgtgcgattgcttcgaaaggctcgtgatatggaccttactgaagttattaccggaaccctgtggaatctttcatcccatgactcaatcaaaatggagattgtggaccatgcactgcatgccttgacagatgaagtgatcattcctcattctggttgggagcgggaacctaatgaagactgtaagccacgccatattgagtgggaatcggtgctcaccaacacagctggctgccttaggaatgtaagctcagagaggagtgaagctcgccggaaacttcgggaatgtgatggtttagttgatgccctcattttcattgttcaggctgagattgggcagaaggattcagacagcaagcttgtagagaactgtgtttgccttcttcggaacttatcatatcaagttcaccgggagatcccacaggcagagcgttaccaagaggcagctcccaatgttgccaacaatactgggccacatgctgccagttgctttggggccaagaagggcaaagggaaaaaacctatagaggatccagcaaacgatacagtggatttccctaaaagaacgagtccagctcgaggctatgagctcttatttcagccagaggtggttcggatatacatctcacttcttaaggagagcaagactcctgccatcctagaagcctcagctggagctatccagaacttgtgtgctgggcgctggacgtatggtcgatacatccgctctgctctgcgtcaagagaaggctctttctgccatagctgacctcctgactaatgaacatgaacgggtggtgaaagctgcatctggagcactgagaaacctggctgtggatgctcgcaacaaagaattaattggtaaacatgctattcctaacttggtaaagaatctgccaggaggacagcagaactcctcttggaatttctctgaggacactgtcatctctattttgaacactatcaacgaggttatcgctgagaacttggaggctgccaaaaagcttcgagagacacagggtattgagaagctggtgttgatcaacaaatcagggaaccgctcagaaaaagaagttcgagcagcagcacttgtattacagacaatctggggatataaggaactgcggaagccactggaaaaagaaggatggaagaaatcagactttcaggtgaatctaaacaatgcttcccgaagccagagcagtcattcatatgatgatagtactctccctctcattgaccggaaccaaaaatcagataagaaacctgatcgggaagaaattcagatgagcaatatgggatcaaacacaaaatcactagataacaactattccacaccaaatgagagaggagaccacaatagaacactggatcgatcgggggatctaggcgacatggagccattgaagggaacaacacccttgatgcagaagatttagcaccactatctccgttccatctgggcttatatgtacttttattttttggtggtgaaattgactgatgattttcctttttcttcgctggactattgtgccaactgccaggctgcctcctgcccttacagccctaagtggctgccttctttccatcaactcccaacttcttcctgtgaagtttaattgtctcaacgcctccccctcccccattccctccatttttctcccaagaaacctgactcaattatttgcatattttgagaaactgctgcagattagttctttttgccagttttccctggaactcctggccttttgtggaggggagggatggagagaataggaatcttcactagaagccgtgggaagaattggaagttacatgctgtatatgcaatgtccagcagtctgataaactgacgattcttaatcaagatttttttcctgatggggaagggacttttattttcttttagagaggggaaagtgtgagctcttcccttattcctaatggctatttttgaagcaaagaaggccagcaacattggcacatgccacctggcaaaggacccttgagtaagtgaaggtctcctaaaactgggattaagaaaccttgctctcctcatctccaaggcagggaccatcaagaacctacagactccatctcttctgcaagcctcatgccaaccctgggctattgctgctgccccttaaacacaggctgtccttaacccacctctcctgccctgtgatatgtctgctgagttggcctggccatttccaagaggctgtagaaaggggagaatgtcaaggaagacttttggtagagaaggagcagaaagatgtgtttttgggaagaagaagacctctaggaggagctagtaggaatgtacatgaagcaattagtctgaaactggcttccccactcccccgtttctccttttcctatccttataggcctgtcccttgcctctgccctggattggttggcaaactaaaggacttgatgtacataactcctgtcccttttcccttacaaggtggggattgcccctggctttgcctcttctttgtgcctttggcctggggtgcatctcctcccgcccttccatgtgcctttctttgcctctgcagtctcatttctcataattttgcaaattatattttgttgctttcttacctactattggccctaaatagcagaaagaagagaagtgaccgagagaacctcagattcttcattgaggattggtatagccatgatttcagtcatagcaagcttttgctcaacagcatatgggtgggattttgcaaaaatcctattctgatgaatctcaaagtaaggctggtaagagaagtgagtggtgtgactcttactccttaggtgcccagaatttaccatcatctctgaaggagttacagggaagtggtctccccaattctcccctccctccagtattgccccctctcactttagcatatattaattagcaggttgggctagagaaatcagctgctatgcgggttgattattattattatttctaatccttttccttatttgccttctactccccttaatctaatctaaaagctctgttccatgcaactggagttccttatccctctcttccccttcccttatatattgaggctatggggtaggagaaaagtgcacaacccaccaccccctttactcgtgcattaaaatttcttatttacccttttcccccttcccatttcttcccactttcatctaccttttctggcaaaaaggagccttttgctctctgtgaccctaagagcacactgcacagggaaaattgccccatccagacctggctccactcttgatctctcttgtcctcttctgctcttttcctggtgctcttttttctcggtggggtgtgggtaatagaacagccgtgggcttttggggacctttaacttttttttctctcttttgtttataaaaaacactaaacattcaattccagagaaccaaaaatcccaccttcccaccgaacactactaaggggcttgtgttctgctccataccttttctcttttctttctgtcttgttaatgcttttaaaaacaaatgagttttttatataaataaagtttttaaagtgtgtatgtggggggtctgtgtcatttcttcacttcaagctgttatttcttccctgctttgcatctttgttacttccttatgtatcagtgtcctttccagagcaaccagaaggaggttataccaggatttattttgagctcagccccaactctttatcaagcaacattcttgttaactatatgtgaaacattttttcttctgaagattcttaaaaattgaatgtggctgaagttgaacatgggagcttattgctaatttagagataggaaactgaagcataaagaattaatgacttactttaattactggaattcttctgcaacatttgacaaaactaaccttgaataaggcccactgtaatacgtagctctcttaaatataacacttaggactagaagattagaaactaccaatcccaactacgtaataggaaaatgtaggatcaaaaggcccatgtatataagtactgaccactgggccataatgttgcttctcaggctatatgcagtcctttagtcagaagtcaataggcctatttattaatattttacagaccatattacctggattaccagggactatctttgctgcagagatcaagggttaagatctatgggaagatacttatttttctgaggtccttatgtcctgtcatataattaaagactcaagagaatttatgtgaaatgctttctgtatgccccaatctttagattaaaattatatagctgctcctga

SEQ ID NO: 285196 - DNA, 4992 bp, Homo sapiens
ctgccagatcagtttgtcaccacccaggctcccttgcctttggctgggtgcaacttccattttaggtgttggatctgagggggaaaaaaaagagagagggagagagagagaaagaagagcaggaaagatcccgaaaggaggaagaggtggcgaaaaatcaactgccctgctggatttgtctttctcagcaccttggcgaagccttgggtttctttcttaaaggactgatttttagaactccacatttgaggagctatgaagacatgattggtgaggaggtgccatcggatcaatactactgggctcctttggcccagcatgagcgaggaagtttagcaagcttggatagcctgcgcaaaggagggcctccacctcctaattggagacagccagagctgccagaggtgatcgccatgcttggattccgcttggatgctgtcaagtccaatgcagctgcatacctgcaacacttatgctaccgcaatgacaaggtgaagactgacgtgcggaagctcaagggcatcccagtactggtgggattgttagaccatcccaaaaaggaagtgcaccttggagcctgtggagctctcaagaatatctcttttggacgtgaccaggataacaagattgccataaaaaactgtgatggtgtgcctgcccttgtgcgattgcttcgaaaggctcgtgatatggaccttactgaagttattaccggaaccctgtggaatctttcatcccatgactcaatcaaaatggagattgtggaccatgcactgcatgccttgacagatgaagtgatcattcctcattctggttgggagcgggaacctaatgaagactgtaagccacgccatattgagtgggaatcggtgctcaccaacacagctggctgccttaggaatgtaagctcagagaggagtgaagctcgccggaaacttcgggaatgtgatggtttagttgatgccctcattttcattgttcaggctgagattgggcagaaggattcagacagcaagcttgtagagaactgtgtttgccttcttcggaacttatcatatcaagttcaccgggagatcccacaggcagagcgttaccaagaggcagctcccaatgttgccaacaatactgggccacatgctgccagttgctttggggccaagaagggcaaagggaaaaaacctatagaggatccagcaaacgatacagtggatttccctaaaagaacgagtccagctcgaggctatgagctcttatttcagccagaggtggttcggatatacatctcacttcttaaggagagcaagactcctgccatcctagaagcctcagctggagctatccagaacttgtgtgctgggcgctggacgtatggtcgatacatccgctctgctctgcgtcaagagaaggctctttctgccatagctgacctcctgactaatgaacatgaacgggtggtgaaagctgcatctggagcactgagaaacctggctgtggatgctcgcaacaaagaattaattggtaaacatgctattcctaacttggtaaagaatctgccaggaggacagcagaactcctcttggaatttctctgaggacactgtcatctctattttgaacactatcaacgaggttatcgctgagaacttggaggctgccaaaaagcttcgagagacacagggtattgagaagctggtgttgatcaacaaatcagggaaccgctcagaaaaagaagttcgagcagcagcacttgtattacagacaatctggggatataaggaactgcggaagccactggaaaaagaaggatggaagaaatcagactttcaggtgaatctaaacaatgcttcccgaagccagagcagtcattcatatgatgatagtactctccctctcattgaccggaaccaaaaatcagataacaactattccacaccaaatgagagaggagaccacaatagaacactggatcgatcgggggatctaggcgacatggagccattgaagggaacaacacccttgatgcaggacgaggggcaggaatctctggaggaagagttggatgtgttggttttggatgatgaggggggccaagtgtcttacccctccatgcagaagatttagcaccactatctccgttccatctgggcttatatgtacttttattttttggtggtgaaattgactgatgattttcctttttcttcgctggactattgtgccaactgccaggctgcctcctgcccttacagccctaagtggctgccttctttccatcaactcccaacttcttcctgtgaagtttaattgtctcaacgcctccccctcccccattccctccatttttctcccaagaaacctgactcaattatttgcatattttgagaaactgctgcagattagttctttttgccagttttccctggaactcctggccttttgtggaggggagggatggagagaataggaatcttcactagaagccgtgggaagaattggaagttacatgctgtatatgcaatgtccagcagtctgataaactgacgattcttaatcaagatttttttcctgatggggaagggacttttattttcttttagagaggggaaagtgtgagctcttcccttattcctaatggctatttttgaagcaaagaaggccagcaacattggcacatgccacctggcaaaggacccttgagtaagtgaaggtctcctaaaactgggattaagaaaccttgctctcctcatctccaaggcagggaccatcaagaacctacagactccatctcttctgcaagcctcatgccaaccctgggctattgctgctgccccttaaacacaggctgtccttaacccacctctcctgccctgtgatatgtctgctgagttggcctggccatttccaagaggctgtagaaaggggagaatgtcaaggaagacttttggtagagaaggagcagaaagatgtgtttttgggaagaagaagacctctaggaggagctagtaggaatgtacatgaagcaattagtctgaaactggcttccccactcccccgtttctccttttcctatccttataggcctgtcccttgcctctgccctggattggttggcaaactaaaggacttgatgtacataactcctgtcccttttcccttacaaggtggggattgcccctggctttgcctcttctttgtgcctttggcctggggtgcatctcctcccgcccttccatgtgcctttctttgcctctgcagtctcatttctcataattttgcaaattatattttgttgctttcttacctactattggccctaaatagcagaaagaagagaagtgaccgagagaacctcagattcttcattgaggattggtatagccatgatttcagtcatagcaagcttttgctcaacagcatatgggtgggattttgcaaaaatcctattctgatgaatctcaaagtaaggctggtaagagaagtgagtggtgtgactcttactccttaggtgcccagaatttaccatcatctctgaaggagttacagggaagtggtctccccaattctcccctccctccagtattgccccctctcactttagcatatattaattagcaggttgggctagagaaatcagctgctatgcgggttgattattattattatttctaatccttttccttatttgccttctactccccttaatctaatctaaaagctctgttccatgcaactggagttccttatccctctcttccccttcccttatatattgaggctatggggtaggagaaaagtgcacaacccaccaccccctttactcgtgcattaaaatttcttatttacccttttcccccttcccatttcttcccactttcatctaccttttctggcaaaaaggagccttttgctctctgtgaccctaagagcacactgcacagggaaaattgccccatccagacctggctccactcttgatctctcttgtcctcttctgctcttttcctggtgctcttttttctcggtggggtgtgggtaatagaacagccgtgggcttttggggacctttaacttttttttctctcttttgtttataaaaaacactaaacattcaattccagagaaccaaaaatcccaccttcccaccgaacactactaaggggcttgtgttctgctccataccttttctcttttctttctgtcttgttaatgcttttaaaaacaaatgagttttttatataaataaagtttttaaagtgtgtatgtggggggtctgtgtcatttcttcacttcaagctgttatttcttccctgctttgcatctttgttacttccttatgtatcagtgtcctttccagagcaaccagaaggaggttataccaggatttattttgagctcagccccaactctttatcaagcaacattcttgttaactatatgtgaaacattttttcttctgaagattcttaaaaattgaatgtggctgaagttgaacatgggagcttattgctaatttagagataggaaactgaagcataaagaattaatgacttactttaattactggaattcttctgcaacatttgacaaaactaaccttgaataaggcccactgtaatacgtagctctcttaaatataacacttaggactagaagattagaaactaccaatcccaactacgtaataggaaaatgtaggatcaaaaggcccatgtatataagtactgaccactgggccataatgttgcttctcaggctatatgcagtcctttagtcagaagtcaataggcctatttattaatattttacagaccatattacctggattaccagggactatctttgctgcagagatcaagggttaagatctatgggaagatacttatttttctgaggtccttatgtcctgtcatataattaaagactcaagagaatttatgtgaaatgctttctgtatgccccaatctttagattaaaattatatagctgctcctga

SEQ ID NO: 285197 - DNA, 944 bp, Homo sapiens
gaaacagggtaaatggatttttatacatattataacctgttcctggttatatatggaaatacaaatagaggagctctcacttgacagtagaatccaggttttaatgaaaatgacatccaaggcctaggtatctgaacacaacaaggtctaaagggcacttgtcacattaagcaattccaagtcatattttaaattacttcctttcattcctaatattgccccttgctcttcttgtttttatgtattgggtatattttattttcctctcattcccatttttccttcaaatatttctgcagctctctccttcctgcttcctccttgctgtggtggctgggatgcttcttccatgattttttgaatctagactgggctgttctctgtgttaaaccaatcagttgcgaccttctcttaacaggtgtgtatggaaatatgtttattaagaaggaaaaatcttactttttaagaaatatgtatttttattcctttcatgtcatagcagaaaaaaatctttttaaataccttttttctttatgggttggtgagagggtgggaattggggagaatatttatttcaaaacctgtctttcaacattgtatattttggactggcataaagtctttcatagctataagagagaaaaaaacccattgagtccaacagagtatcactaatgcctgtaaaacctcctgtttatataatggtatggagaactcttcatttttatataactatcttttattgtatagatagcacacatagaccctctagatacttggatatttatcctgagttggaacaaataaaagggtaaaaagatagtctatttaaaacaagagtgtccaatcttttggcttccctgggctacagtggaagaagaattgtgttgggccatacataatgtacgctaaggatagccaatgagctaaaaaagaattgcaaa

SEQ ID NO: 285198 - DNA, 6589 bp, Homo sapiens
tcctgtacctggtaaagtaagagggatccacccaggaacagcagggctgaaaccgatacgggccgttcaaacgctctgggggaaaaacaataccatgtacactgcaaagctcccttgcctttggctgggtgcaacttccattttaggtgttggatctgagggggaaaaaaaagagagagggagagagagagaaagaagagcaggaaagatcccgaaaggaggaagaggtggcgaaaaatcaactgccctgctggatttgtctttctcagcaccttggcgaagccttgggtttctttcttaaaggactgatttttagaactccacatttgagctctctccttcctgcttcctccttgctgtggtggctgggatgcttcttccatgattttttgaatctagactgggctgttctctgtgttaaaccaatcagttgcgaccttctcttaacagtgtgaagtgagggggtctctctccctccttctccttcctctgtgattcaccttcctttttaccctgccctgcggcggctccgccccttaccttcatggacgactcagaggtggagtcgaccgccagcatcttggcctctgtgaaggaacaagaggcccagtttgagaagctgacccgggcgctggaggaggaacggcgccacgtctcggcgcagctggaacgcgtccgggtctcaccacaagatgccaacccactcatggccaacggcacactcacccgccggcatcagaacggccggtttgtgggcgatgctgaccttgaaagacagaaattttcagatttgaaactcaacggaccccaggatcacagtcaccttctatatagcaccatccccaggatgcaggagccggggcagattgtggagacctacacggaggaggatcctgagggagccatgtctgtagtctctgtggagacctcagatgatgggaccactcggcgcacagagaccacggtcaagaaagtagtgaagactgtgacaacacggacagtacagccagtcgctatgggaccagacgggttgcctgtggatgcttcatcagtttctaacaactatatccagactttgggtcgtgatttccgcaagaatggcaatgggggacctggtccctatgtggggcaagctggcactgctacccttcctaggaacttccactaccctcctgatggttatagtcgccactatgaagatggttatccaggtggcagtgataactatggcagtctgtcccgggtgacccgcattgaggagcggtataggcccagcatggaaggctaccgggcacctagtagacaggatgtgtatgggccccaaccccaggttcgggtaggtgggagcagcgtggatctgcatcgctttcatccagagccttatgggctagaggatgaccagcgtagtatgggctatgatgacctggattatggtatgatgtctgattatggcactgcccgtcggactgggacaccctctgaccctcgtcggcgcctcaggagctatgaagacatgattggtgaggaggtgccatcggatcaatactactgggctcctttggcccagcatgagcgaggaagtttagcaagcttggatagcctgcgcaaaggagggcctccacctcctaattggagacagccagagctgccagaggtgatcgccatgcttggattccgcttggatgctgtcaagtccaatgcagctgcatacctgcaacacttatgctaccgcaatgacaaggtgaagactgacgtgcggaagctcaagggcatcccagtactggtgggattgttagaccatcccaaaaaggaagtgcaccttggagcctgtggagctctcaagaatatctcttttggacgtgaccaggataacaagattgccataaaaaactgtgatggtgtgcctgcccttgtgcgattgcttcgaaaggctcgtgatatggaccttactgaagttattaccggaaccctgtggaatctttcatcccatgactcaatcaaaatggagattgtggaccatgcactgcatgccttgacagatgaagtgatcattcctcattctggttgggagcgggaacctaatgaagactgtaagccacgccatattgagtgggaatcggtgctcaccaacacagctggctgccttaggaatgtaagctcagagaggagtgaagctcgccggaaacttcgggaatgtgatggtttagttgatgccctcattttcattgttcaggctgagattgggcagaaggattcagacagcaagcttgtagagaactgtgtttgccttcttcggaacttatcatatcaagttcaccgggagatcccacaggcagagcgttaccaagaggcagctcccaatgttgccaacaatactgggccacatgctgccagttgctttggggccaagaagggcaaagggaaaaaacctatagaggatccagcaaacgatacagtggatttccctaaaagaacgagtccagctcgaggctatgagctcttatttcagccagaggtggttcggatatacatctcacttcttaaggagagcaagactcctgccatcctagaagcctcagctggagctatccagaacttgtgtgctgggcgctggacgtatggtcgatacatccgctctgctctgcgtcaagagaaggctctttctgccatagctgacctcctgactaatgaacatgaacgggtggtgaaagctgcatctggagcactgagaaacctggctgtggatgctcgcaacaaagaattaattggtaaacatgctattcctaacttggtaaagaatctgccaggaggacagcagaactcctcttggaatttctctgaggacactgtcatctctattttgaacactatcaacgaggttatcgctgagaacttggaggctgccaaaaagcttcgagagacacagggtattgagaagctggtgttgatcaacaaatcagggaaccgctcagaaaaagaagttcgagcagcagcacttgtattacagacaatctggggatataaggaactgcggaagccactggaaaaagaaggatggaagaaatcagactttcaggtgaatctaaacaatgcttcccgaagccagagcagtcattcatatgatgatagtactctccctctcattgaccggaaccaaaaatcagataagaaacctgatcgggaagaaattcagatgagcaatatgggatcaaacacaaaatcactagataacaactattccacaccaaatgagagaggagaccacaatagaacactggatcgatcgggggatctaggcgacatggagccattgaagggaacaacacccttgatgcagaagatttagcaccactatctccgttccatctgggcttatatgtacttttattttttggtggtgaaattgactgatgattttcctttttcttcgctggactattgtgccaactgccaggctgcctcctgcccttacagccctaagtggctgccttctttccatcaactcccaacttcttcctgtgaagtttaattgtctcaacgcctccccctcccccattccctccatttttctcccaagaaacctgactcaattatttgcatattttgagaaactgctgcagattagttctttttgccagttttccctggaactcctggccttttgtggaggggagggatggagagaataggaatcttcactagaagccgtgggaagaattggaagttacatgctgtatatgcaatgtccagcagtctgataaactgacgattcttaatcaagatttttttcctgatggggaagggacttttattttcttttagagaggggaaagtgtgagctcttcccttattcctaatggctatttttgaagcaaagaaggccagcaacattggcacatgccacctggcaaaggacccttgagtaagtgaaggtctcctaaaactgggattaagaaaccttgctctcctcatctccaaggcagggaccatcaagaacctacagactccatctcttctgcaagcctcatgccaaccctgggctattgctgctgccccttaaacacaggctgtccttaacccacctctcctgccctgtgatatgtctgctgagttggcctggccatttccaagaggctgtagaaaggggagaatgtcaaggaagacttttggtagagaaggagcagaaagatgtgtttttgggaagaagaagacctctaggaggagctagtaggaatgtacatgaagcaattagtctgaaactggcttccccactcccccgtttctccttttcctatccttataggcctgtcccttgcctctgccctggattggttggcaaactaaaggacttgatgtacataactcctgtcccttttcccttacaaggtggggattgcccctggctttgcctcttctttgtgcctttggcctggggtgcatctcctcccgcccttccatgtgcctttctttgcctctgcagtctcatttctcataattttgcaaattatattttgttgctttcttacctactattggccctaaatagcagaaagaagagaagtgaccgagagaacctcagattcttcattgaggattggtatagccatgatttcagtcatagcaagcttttgctcaacagcatatgggtgggattttgcaaaaatcctattctgatgaatctcaaagtaaggctggtaagagaagtgagtggtgtgactcttactccttaggtgcccagaatttaccatcatctctgaaggagttacagggaagtggtctccccaattctcccctccctccagtattgccccctctcactttagcatatattaattagcaggttgggctagagaaatcagctgctatgcgggttgattattattattatttctaatccttttccttatttgccttctactccccttaatctaatctaaaagctctgttccatgcaactggagttccttatccctctcttccccttcccttatatattgaggctatggggtaggagaaaagtgcacaacccaccaccccctttactcgtgcattaaaatttcttatttacccttttcccccttcccatttcttcccactttcatctaccttttctggcaaaaaggagccttttgctctctgtgaccctaagagcacactgcacagggaaaattgccccatccagacctggctccactcttgatctctcttgtcctcttctgctcttttcctggtgctcttttttctcggtggggtgtgggtaatagaacagccgtgggcttttggggacctttaacttttttttctctcttttgtttataaaaaacactaaacattcaattccagagaaccaaaaatcccaccttcccaccgaacactactaaggggcttgtgttctgctccataccttttctcttttctttctgtcttgttaatgcttttaaaaacaaatgagttttttatataaataaagtttttaaagtgtgtatgtggggggtctgtgtcatttcttcacttcaagctgttatttcttccctgctttgcatctttgttacttccttatgtatcagtgtcctttccagagcaaccagaaggaggttataccaggatttattttgagctcagccccaactctttatcaagcaacattcttgttaactatatgtgaaacattttttcttctgaagattcttaaaaattgaatgtggctgaagttgaacatgggagcttattgctaatttagagataggaaactgaagcataaagaattaatgacttactttaattactggaattcttctgcaacatttgacaaaactaaccttgaataaggcccactgtaatacgtagctctcttaaatataacacttaggactagaagattagaaactaccaatcccaactacgtaataggaaaatgtaggatcaaaaggcccatgtatataagtactgaccactgggccataatgttgcttctcaggctatatgcagtcctttagtcagaagtcaataggcctatttattaatattttacagaccatattacctggattaccagggactatctttgctgcagagatcaagggttaagatctatgggaagatacttatttttctgaggtccttatgtcctgtcatataattaaagactcaagagaatttatgtgaaatgctttctgtatgccccaatctttagattaaaattatatagctgctcctgacctgatgatggtcctgtcttgttttattgaactaggacttgggtatgaaaactttcatgggctagtgagaccaggaaatcaactagcttttaaagcttgatttgtgtctaacaattgtagtgttagattagaggttgaagtacaaagccaaaaagctattaagagtttactttccaaagagttttgatagccctgcttgagatgatttttatctaaatagaaaagcctggctgcttgtcagcaacactttatttccctgttatgttcttatcctttggcattgagctagatacaaaccctactcttctctcttccttctggattggtccatttgtttatctcattcaataaatatttgccaagcacctcct

SEQ ID NO: 285199 - DNA, 6719 bp, Homo sapiens
tcctgtacctggtaaagtaagagggatccacccaggaacagcagggctgaaaccgatacgggccgttcaaacgctctgggggaaaaacaataccatgtacactgcaaagctcccttgcctttggctgggtgcaacttccattttaggtgttggatctgagggggaaaaaaaagagagagggagagagagagaaagaagagcaggaaagatcccgaaaggaggaagaggtggcgaaaaatcaactgccctgctggatttgtctttctcagcaccttggcgaagccttgggtttctttcttaaaggactgatttttagaactccacatttgagctctctccttcctgcttcctccttgctgtggtggctgggatgcttcttccatgattttttgaatctagactgggctgttctctgtgttaaaccaatcagttgcgaccttctcttaacagtgtgaagtgagggggtctctctccctccttctccttcctctgtgattcaccttcctttttaccctgccctgcggcggctccgccccttaccttcatggacgactcagaggtggagtcgaccgccagcatcttggcctctgtgaaggaacaagaggcccagtttgagaagctgacccgggcgctggaggaggaacggcgccacgtctcggcgcagctggaacgcgtccgggtctcaccacaagatgccaacccactcatggccaacggcacactcacccgccggcatcagaacggccggtttgtgggcgatgctgaccttgaaagacagaaattttcagatttgaaactcaacggaccccaggatcacagtcaccttctatatagcaccatccccaggatgcaggagccggggcagattgtggagacctacacggaggaggatcctgagggagccatgtctgtagtctctgtggagacctcagatgatgggaccactcggcgcacagagaccacggtcaagaaagtagtgaagactgtgacaacacggacagtacagccagtcgctatgggaccagacgggttgcctgtggatgcttcatcagtttctaacaactatatccagactttgggtcgtgatttccgcaagaatggcaatgggggacctggtccctatgtggggcaagctggcactgctacccttcctaggaacttccactaccctcctgatggttatagtcgccactatgaagatggttatccaggtggcagtgataactatggcagtctgtcccgggtgacccgcattgaggagcggtataggcccagcatggaaggctaccgggcacctagtagacaggatgtgtatgggccccaaccccaggttcgggtaggtgggagcagcgtggatctgcatcgctttcatccagagccttatgggctagaggatgaccagcgtagtatgggctatgatgacctggattatggtatgatgtctgattatggcactgcccgtcggactgggacaccctctgaccctcgtcggcgcctcaggagctatgaagacatgattggtgaggaggtgccatcggatcaatactactgggctcctttggcccagcatgagcgaggaagtttagcaagcttggatagcctgcgcaaaggagggcctccacctcctaattggagacagccagagctgccagaggtgatcgccatgcttggattccgcttggatgctgtcaagtccaatgcagctgcatacctgcaacacttatgctaccgcaatgacaaggtgaagactgacgtgcggaagctcaagggcatcccagtactggtgggattgttagaccatcccaaaaaggaagtgcaccttggagcctgtggagctctcaagaatatctcttttggacgtgaccaggataacaagattgccataaaaaactgtgatggtgtgcctgcccttgtgcgattgcttcgaaaggctcgtgatatggaccttactgaagttattaccggaaccctgtggaatctttcatcccatgactcaatcaaaatggagattgtggaccatgcactgcatgccttgacagatgaagtgatcattcctcattctggttgggagcgggaacctaatgaagactgtaagccacgccatattgagtgggaatcggtgctcaccaacacagctggctgccttaggaatgtaagctcagagaggagtgaagctcgccggaaacttcgggaatgtgatggtttagttgatgccctcattttcattgttcaggctgagattgggcagaaggattcagacagcaagcttgtagagaactgtgtttgccttcttcggaacttatcatatcaagttcaccgggagatcccacaggcagagcgttaccaagaggcagctcccaatgttgccaacaatactgggccacatgctgccagttgctttggggccaagaagggcaaagggaaaaaacctatagaggatccagcaaacgatacagtggatttccctaaaagaacgagtccagctcgaggctatgagctcttatttcagccagaggtggttcggatatacatctcacttcttaaggagagcaagactcctgccatcctagaagcctcagctggagctatccagaacttgtgtgctgggcgctggacgtatggtcgatacatccgctctgctctgcgtcaagagaaggctctttctgccatagctgacctcctgactaatgaacatgaacgggtggtgaaagctgcatctggagcactgagaaacctggctgtggatgctcgcaacaaagaattaattggtaaacatgctattcctaacttggtaaagaatctgccaggaggacagcagaactcctcttggaatttctctgaggacactgtcatctctattttgaacactatcaacgaggttatcgctgagaacttggaggctgccaaaaagcttcgagagacacagggtattgagaagctggtgttgatcaacaaatcagggaaccgctcagaaaaagaagttcgagcagcagcacttgtattacagacaatctggggatataaggaactgcggaagccactggaaaaagaaggatggaagaaatcagactttcaggtgaatctaaacaatgcttcccgaagccagagcagtcattcatatgatgatagtactctccctctcattgaccggaaccaaaaatcagataagaaacctgatcgggaagaaattcagatgagcaatatgggatcaaacacaaaatcactagataacaactattccacaccaaatgagagaggagaccacaatagaacactggatcgatcgggggatctaggcgacatggagccattgaagggaacaacacccttgatggtaaattctctttatatactgctatctgtctaaggctagttctattttgaagcctatgtgttttgtgaaacacaaaaaaaagtacagagaaagatcgcatccttttctggtaggggttttcaggaaaaagtaagagttctgactcatgttgggatttcttgggccgttattctgcagtggtcaaaatgggggaagcatgtctgtaaaagtgttactgatatgactaacactaactgatctactttcaaacattacctttttcctctccctccctgtttatgaatgttttgcccttctcttactattatatcttgttttgtttgagtttacaaattttcagagtttccctagctctggcacacactcatgaggttcctgtctctactcatactaacaaattgcatgtgttcacagcaggacgaggggcaggaatctctggaggaagagttggatgtgttggttttggatgatgaggggggccaagtgtcttacccctccatgcagaagatttagcaccactatctccgttccatctgggcttatatgtacttttattttttggtggtgaaattgactgatgattttcctttttcttcgctggactattgtgccaactgccaggctgcctcctgcccttacagccctaagtggctgccttctttccatcaactcccaacttcttcctgtgaagtttaattgtctcaacgcctccccctcccccattccctccatttttctcccaagaaacctgactcaattatttgcatattttgagaaactgctgcagattagttctttttgccagttttccctggaactcctggccttttgtggaggggagggatggagagaataggaatcttcactagaagccgtgggaagaattggaagttacatgctgtatatgcaatgtccagcagtctgataaactgacgattcttaatcaagatttttttcctgatggggaagggacttttattttcttttagagaggggaaagtgtgagctcttcccttattcctaatggctatttttgaagcaaagaaggccagcaacattggcacatgccacctggcaaaggacccttgagtaagtgaaggtctcctaaaactgggattaagaaaccttgctctcctcatctccaaggcagggaccatcaagaacctacagactccatctcttctgcaagcctcatgccaaccctgggctattgctgctgccccttaaacacaggctgtccttaacccacctctcctgccctgtgatatgtctgctgagttggcctggccatttccaagaggctgtagaaaggggagaatgtcaaggaagacttttggtagagaaggagcagaaagatgtgtttttgggaagaagaagacctctaggaggagctagtaggaatgtacatgaagcaattagtctgaaactggcttccccactcccccgtttctccttttcctatccttataggcctgtcccttgcctctgccctggattggttggcaaactaaaggacttgatgtacataactcctgtcccttttcccttacaaggtggggattgcccctggctttgcctcttctttgtgcctttggcctggggtgcatctcctcccgcccttccatgtgcctttctttgcctctgcagtctcatttctcataattttgcaaattatattttgttgctttcttacctactattggccctaaatagcagaaagaagagaagtgaccgagagaacctcagattcttcattgaggattggtatagccatgatttcagtcatagcaagcttttgctcaacagcatatgggtgggattttgcaaaaatcctattctgatgaatctcaaagtaaggctggtaagagaagtgagtggtgtgactcttactccttaggtgcccagaatttaccatcatctctgaaggagttacagggaagtggtctccccaattctcccctccctccagtattgccccctctcactttagcatatattaattagcaggttgggctagagaaatcagctgctatgcgggttgattattattattatttctaatccttttccttatttgccttctactccccttaatctaatctaaaagctctgttccatgcaactggagttccttatccctctcttccccttcccttatatattgaggctatggggtaggagaaaagtgcacaacccaccaccccctttactcgtgcattaaaatttcttatttacccttttcccccttcccatttcttcccactttcatctaccttttctggcaaaaaggagccttttgctctctgtgaccctaagagcacactgcacagggaaaattgccccatccagacctggctccactcttgatctctcttgtcctcttctgctcttttcctggtgctcttttttctcggtggggtgtgggtaatagaacagccgtgggcttttggggacctttaacttttttttctctcttttgtttataaaaaacactaaacattcaattccagagaaccaaaaatcccaccttcccaccgaacactactaaggggcttgtgttctgctccataccttttctcttttctttctgtcttgttaatgcttttaaaaacaaatgagttttttatataaataaagtttttaaagtgtgtatgtggggggtctgtgtcatttcttcacttcaagctgttatttcttccctgctttgcatctttgttacttccttatgtatcagtgtcctttccagagcaaccagaaggaggttataccaggatttattttgagctcagccccaactctttatcaagcaacattcttgttaactatatgtgaaacattttttcttctgaagattcttaaaaattgaatgtggctgaagttgaacatgggagcttattgctaatttagagataggaaactgaagcataaagaattaatgacttactttaattactggaattcttctgcaacatttgacaaaactaaccttgaataaggcccactgtaatacgtagctctcttaaatataacacttaggactagaagattagaaactaccaatcccaactacgtaataggaaaatgtaggatcaaaaggcccatgtatataagtactgaccactgggccataatgttgcttctcaggctatatgcagtcctttagtcagaagtcaataggcctatttattaatattttacagaccatattacctggattaccagggactatctttgctgcagagatcaagggttaagatctatgggaagatacttatttttctgaggtccttatgtcctgtcatataattaaagactcaagagaatttatgtgaaatgctttctgtatgccccaatctttagattaaaattatatagctgctcctga

SEQ ID NO: 285200 - DNA, 6155 bp, Homo sapiens
tcctgtacctggtaaagtaagagggatccacccaggaacagcagggctgaaaccgatacgggccgttcaaacgctctgggggaaaaacaataccatgtacactgcaaagctcccttgcctttggctgggtgcaacttccattttaggtgttggatctgagggggaaaaaaaagagagagggagagagagagaaagaagagcaggaaagatcccgaaaggaggaagaggtggcgaaaaatcaactgccctgctggatttgtctttctcagcaccttggcgaagccttgggtttctttcttaaaggactgatttttagaactccacatttgagctctctccttcctgcttcctccttgctgtggtggctgggatgcttcttccatgattttttgaatctagactgggctgttctctgtgttaaaccaatcagttgcgaccttctcttaacagtgtgaagtgagggggtctctctccctccttctccttcctctgtgattcaccttcctttttaccctgccctgcggcggctccgccccttaccttcatggacgactcagaggtggagtcgaccgccagcatcttggcctctgtgaaggaacaagaggcccagtttgagaagctgacccgggcgctggaggaggaacggcgccacgtctcggcgcagctggaacgcgtccgggtctcaccacaagatgccaacccactcatggccaacggcacactcacccgccggcatcagaacggccggtttgtgggcgatgctgaccttgaaagacagaaattttcagatttgaaactcaacggaccccaggatcacagtcaccttctatatagcaccatccccaggatgcaggagccggggcagattgtggagacctacacggaggaggatcctgagggagccatgtctgtagtctctgtggagacctcagatgatgggaccactcggcgcacagagaccacggtcaagaaagtagtgaagactgtgacaacacggacagtacagccagtcgctatgggaccagacgggttgcctgtggatgcttcatcagtttctaacaactatatccagactttgggtcgtgatttccgcaagaatggcaatgggggacctggtccctatgtggggcaagctggcactgctacccttcctaggaacttccactaccctcctgatggttatagtcgccactatgaagatggttatccaggtggcagtgataactatggcagtctgtcccgggtgacccgcattgaggagcggtataggcccagcatggaaggctaccgggcacctagtagacaggatgtgtatgggccccaaccccaggttcgggtaggtgggagcagcgtggatctgcatcgctttcatccagagccttatgggctagaggatgaccagcgtagtatgggctatgatgacctggattatggtatgatgtctgattatggcactgcccgtcggactgggacaccctctgaccctcgtcggcgcctcaggagctatgaagacatgattggtgaggaggtgccatcggatcaatactactgggctcctttggcccagcatgagcgaggaagtttagcaagcttggatagcctgcgcaaaggagggcctccacctcctaattggagacagccagagctgccagaggtgatcgccatgcttggattccgcttggatgctgtcaagtccaatgcagctgcatacctgcaacacttatgctaccgcaatgacaaggtgaagactgacgtgcggaagctcaagggcatcccagtactggtgggattgttagaccatcccaaaaaggaagtgcaccttggagcctgtggagctctcaagaatatctcttttggacgtgaccaggataacaagattgccataaaaaactgtgatggtgtgcctgcccttgtgcgattgcttcgaaaggctcgtgatatggaccttactgaagttattaccggaaccctgtggaatctttcatcccatgactcaatcaaaatggagattgtggaccatgcactgcatgccttgacagatgaagtgatcattcctcattctggttgggagcgggaacctaatgaagactgtaagccacgccatattgagtgggaatcggtgctcaccaacacagctggctgccttaggaatgtaagctcagagaggagtgaagctcgccggaaacttcgggaatgtgatggtttagttgatgccctcattttcattgttcaggctgagattgggcagaaggattcagacagcaagcttgtagagaactgtgtttgccttcttcggaacttatcatatcaagttcaccgggagatcccacaggcagagcgttaccaagaggcagctcccaatgttgccaacaatactgggccacatgctgccagttgctttggggccaagaagggcaaagggaaaaaacctatagaggatccagcaaacgatacagtggatttccctaaaagaacgagtccagctcgaggctatgagctcttatttcagccagaggtggttcggatatacatctcacttcttaaggagagcaagactcctgccatcctagaagcctcagctggagctatccagaacttgtgtgctgggcgctggacgtatggtcgatacatccgctctgctctgcgtcaagagaaggctctttctgccatagctgacctcctgactaatgaacatgaacgggtggtgaaagctgcatctggagcactgagaaacctggctgtggatgctcgcaacaaagaattaattggtaaacatgctattcctaacttggtaaagaatctgccaggaggacagcagaactcctcttggaatttctctgaggacactgtcatctctattttgaacactatcaacgaggttatcgctgagaacttggaggctgccaaaaagcttcgagagacacagggtattgagaagctggtgttgatcaacaaatcagggaaccgctcagaaaaagaagttcgagcagcagcacttgtattacagacaatctggggatataaggaactgcggaagccactggaaaaagaaggatggaagaaatcagactttcaggtgaatctaaacaatgcttcccgaagccagagcagtcattcatatgatgatagtactctccctctcattgaccggaaccaaaaatcagataacaactattccacaccaaatgagagaggagaccacaatagaacactggatcgatcgggggatctaggcgacatggagccattgaagggaacaacacccttgatgcagaagatttagcaccactatctccgttccatctgggcttatatgtacttttattttttggtggtgaaattgactgatgattttcctttttcttcgctggactattgtgccaactgccaggctgcctcctgcccttacagccctaagtggctgccttctttccatcaactcccaacttcttcctgtgaagtttaattgtctcaacgcctccccctcccccattccctccatttttctcccaagaaacctgactcaattatttgcatattttgagaaactgctgcagattagttctttttgccagttttccctggaactcctggccttttgtggaggggagggatggagagaataggaatcttcactagaagccgtgggaagaattggaagttacatgctgtatatgcaatgtccagcagtctgataaactgacgattcttaatcaagatttttttcctgatggggaagggacttttattttcttttagagaggggaaagtgtgagctcttcccttattcctaatggctatttttgaagcaaagaaggccagcaacattggcacatgccacctggcaaaggacccttgagtaagtgaaggtctcctaaaactgggattaagaaaccttgctctcctcatctccaaggcagggaccatcaagaacctacagactccatctcttctgcaagcctcatgccaaccctgggctattgctgctgccccttaaacacaggctgtccttaacccacctctcctgccctgtgatatgtctgctgagttggcctggccatttccaagaggctgtagaaaggggagaatgtcaaggaagacttttggtagagaaggagcagaaagatgtgtttttgggaagaagaagacctctaggaggagctagtaggaatgtacatgaagcaattagtctgaaactggcttccccactcccccgtttctccttttcctatccttataggcctgtcccttgcctctgccctggattggttggcaaactaaaggacttgatgtacataactcctgtcccttttcccttacaaggtggggattgcccctggctttgcctcttctttgtgcctttggcctggggtgcatctcctcccgcccttccatgtgcctttctttgcctctgcagtctcatttctcataattttgcaaattatattttgttgctttcttacctactattggccctaaatagcagaaagaagagaagtgaccgagagaacctcagattcttcattgaggattggtatagccatgatttcagtcatagcaagcttttgctcaacagcatatgggtgggattttgcaaaaatcctattctgatgaatctcaaagtaaggctggtaagagaagtgagtggtgtgactcttactccttaggtgcccagaatttaccatcatctctgaaggagttacagggaagtggtctccccaattctcccctccctccagtattgccccctctcactttagcatatattaattagcaggttgggctagagaaatcagctgctatgcgggttgattattattattatttctaatccttttccttatttgccttctactccccttaatctaatctaaaagctctgttccatgcaactggagttccttatccctctcttccccttcccttatatattgaggctatggggtaggagaaaagtgcacaacccaccaccccctttactcgtgcattaaaatttcttatttacccttttcccccttcccatttcttcccactttcatctaccttttctggcaaaaaggagccttttgctctctgtgaccctaagagcacactgcacagggaaaattgccccatccagacctggctccactcttgatctctcttgtcctcttctgctcttttcctggtgctcttttttctcggtggggtgtgggtaatagaacagccgtgggcttttggggacctttaacttttttttctctcttttgtttataaaaaacactaaacattcaattccagagaaccaaaaatcccaccttcccaccgaacactactaaggggcttgtgttctgctccataccttttctcttttctttctgtcttgttaatgcttttaaaaacaaatgagttttttatataaataaagtttttaaagtgtgtatgtggggggtctgtgtcatttcttcacttcaagctgttatttcttccctgctttgcatctttgttacttccttatgtatcagtgtcctttccagagcaaccagaaggaggttataccaggatttattttgagctcagccccaactctttatcaagcaacattcttgttaactatatgtgaaacattttttcttctgaagattcttaaaaattgaatgtggctgaagttgaacatgggagcttattgctaatttagagataggaaactgaagcataaagaattaatgacttactttaattactggaattcttctgcaacatttgacaaaactaaccttgaataaggcccactgtaatacgtagctctcttaaatataacacttaggactagaagattagaaactaccaatcccaactacgtaataggaaaatgtaggatcaaaaggcccatgtatataagtactgaccactgggccataatgttgcttctcaggctatatgcagtcctttagtcagaagtcaataggcctatttattaatattttacagaccatattacctggattaccagggactatctttgctgcagagatcaagggttaagatctatgggaagatacttatttttctgaggtccttatgtcctgtcatataattaaagactcaagagaatttatgtgaaatgctttctgtatgccccaatctttagattaaaattatatagctgctcctga

SEQ ID NO: 285201 - DNA, 6108 bp, Homo sapiens
tcctgtacctggtaaagtaagagggatccacccaggaacagcagggctgaaaccgatacgggccgttcaaacgctctgggggaaaaacaataccatgtacactgcaaagctcccttgcctttggctgggtgcaacttccattttaggtgttggatctgagggggaaaaaaaagagagagggagagagagagaaagaagagcaggaaagatcccgaaaggaggaagaggtggcgaaaaatcaactgccctgctggatttgtctttctcagcaccttggcgaagccttgggtttctttcttaaaggactgatttttagaactccacatttgagctctctccttcctgcttcctccttgctgtggtggctgggatgcttcttccatgattttttgaatctagactgggctgttctctgtgttaaaccaatcagttgcgaccttctcttaacagtgtgaagtgagggggtctctctccctccttctccttcctctgtgattcaccttcctttttacctggagtcgaccgccagcatcttggcctctgtgaaggaacaagaggcccagtttgagaagctgacccgggcgctggaggaggaacggcgccacgtctcggcgcagctggaacgcgtccgggtctcaccacaagatgccaacccactcatggccaacggcacactcacccgccggcatcagaacggccggtttgtgggcgatgctgaccttgaaagacagaaattttcagatttgaaactcaacggaccccaggatcacagtcaccttctatatagcaccatccccaggatgcaggagccggggcagattgtggagacctacacggaggaggatcctgagggagccatgtctgtagtctctgtggagacctcagatgatgggaccactcggcgcacagagaccacggtcaagaaagtagtgaagactgtgacaacacggacagtacagccagtcgctatgggaccagacgggttgcctgtggatgcttcatcagtttctaacaactatatccagactttgggtcgtgatttccgcaagaatggcaatgggggacctggtccctatgtggggcaagctggcactgctacccttcctaggaacttccactaccctcctgatggttatagtcgccactatgaagatggttatccaggtggcagtgataactatggcagtctgtcccgggtgacccgcattgaggagcggtataggcccagcatggaaggctaccgggcacctagtagacaggatgtgtatgggccccaaccccaggttcgggtaggtgggagcagcgtggatctgcatcgctttcatccagagccttatgggctagaggatgaccagcgtagtatgggctatgatgacctggattatggtatgatgtctgattatggcactgcccgtcggactgggacaccctctgaccctcgtcggcgcctcaggagctatgaagacatgattggtgaggaggtgccatcggatcaatactactgggctcctttggcccagcatgagcgaggaagtttagcaagcttggatagcctgcgcaaaggagggcctccacctcctaattggagacagccagagctgccagaggtgatcgccatgcttggattccgcttggatgctgtcaagtccaatgcagctgcatacctgcaacacttatgctaccgcaatgacaaggtgaagactgacgtgcggaagctcaagggcatcccagtactggtgggattgttagaccatcccaaaaaggaagtgcaccttggagcctgtggagctctcaagaatatctcttttggacgtgaccaggataacaagattgccataaaaaactgtgatggtgtgcctgcccttgtgcgattgcttcgaaaggctcgtgatatggaccttactgaagttattaccggaaccctgtggaatctttcatcccatgactcaatcaaaatggagattgtggaccatgcactgcatgccttgacagatgaagtgatcattcctcattctggttgggagcgggaacctaatgaagactgtaagccacgccatattgagtgggaatcggtgctcaccaacacagctggctgccttaggaatgtaagctcagagaggagtgaagctcgccggaaacttcgggaatgtgatggtttagttgatgccctcattttcattgttcaggctgagattgggcagaaggattcagacagcaagcttgtagagaactgtgtttgccttcttcggaacttatcatatcaagttcaccgggagatcccacaggcagagcgttaccaagaggcagctcccaatgttgccaacaatactgggccacatgctgccagttgctttggggccaagaagggcaaagggaaaaaacctatagaggatccagcaaacgatacagtggatttccctaaaagaacgagtccagctcgaggctatgagctcttatttcagccagaggtggttcggatatacatctcacttcttaaggagagcaagactcctgccatcctagaagcctcagctggagctatccagaacttgtgtgctgggcgctggacgtatggtcgatacatccgctctgctctgcgtcaagagaaggctctttctgccatagctgacctcctgactaatgaacatgaacgggtggtgaaagctgcatctggagcactgagaaacctggctgtggatgctcgcaacaaagaattaattggtaaacatgctattcctaacttggtaaagaatctgccaggaggacagcagaactcctcttggaatttctctgaggacactgtcatctctattttgaacactatcaacgaggttatcgctgagaacttggaggctgccaaaaagcttcgagagacacagggtattgagaagctggtgttgatcaacaaatcagggaaccgctcagaaaaagaagttcgagcagcagcacttgtattacagacaatctggggatataaggaactgcggaagccactggaaaaagaaggatggaagaaatcagactttcaggtgaatctaaacaatgcttcccgaagccagagcagtcattcatatgatgatagtactctccctctcattgaccggaaccaaaaatcagataacaactattccacaccaaatgagagaggagaccacaatagaacactggatcgatcgggggatctaggcgacatggagccattgaagggaacaacacccttgatgcagaagatttagcaccactatctccgttccatctgggcttatatgtacttttattttttggtggtgaaattgactgatgattttcctttttcttcgctggactattgtgccaactgccaggctgcctcctgcccttacagccctaagtggctgccttctttccatcaactcccaacttcttcctgtgaagtttaattgtctcaacgcctccccctcccccattccctccatttttctcccaagaaacctgactcaattatttgcatattttgagaaactgctgcagattagttctttttgccagttttccctggaactcctggccttttgtggaggggagggatggagagaataggaatcttcactagaagccgtgggaagaattggaagttacatgctgtatatgcaatgtccagcagtctgataaactgacgattcttaatcaagatttttttcctgatggggaagggacttttattttcttttagagaggggaaagtgtgagctcttcccttattcctaatggctatttttgaagcaaagaaggccagcaacattggcacatgccacctggcaaaggacccttgagtaagtgaaggtctcctaaaactgggattaagaaaccttgctctcctcatctccaaggcagggaccatcaagaacctacagactccatctcttctgcaagcctcatgccaaccctgggctattgctgctgccccttaaacacaggctgtccttaacccacctctcctgccctgtgatatgtctgctgagttggcctggccatttccaagaggctgtagaaaggggagaatgtcaaggaagacttttggtagagaaggagcagaaagatgtgtttttgggaagaagaagacctctaggaggagctagtaggaatgtacatgaagcaattagtctgaaactggcttccccactcccccgtttctccttttcctatccttataggcctgtcccttgcctctgccctggattggttggcaaactaaaggacttgatgtacataactcctgtcccttttcccttacaaggtggggattgcccctggctttgcctcttctttgtgcctttggcctggggtgcatctcctcccgcccttccatgtgcctttctttgcctctgcagtctcatttctcataattttgcaaattatattttgttgctttcttacctactattggccctaaatagcagaaagaagagaagtgaccgagagaacctcagattcttcattgaggattggtatagccatgatttcagtcatagcaagcttttgctcaacagcatatgggtgggattttgcaaaaatcctattctgatgaatctcaaagtaaggctggtaagagaagtgagtggtgtgactcttactccttaggtgcccagaatttaccatcatctctgaaggagttacagggaagtggtctccccaattctcccctccctccagtattgccccctctcactttagcatatattaattagcaggttgggctagagaaatcagctgctatgcgggttgattattattattatttctaatccttttccttatttgccttctactccccttaatctaatctaaaagctctgttccatgcaactggagttccttatccctctcttccccttcccttatatattgaggctatggggtaggagaaaagtgcacaacccaccaccccctttactcgtgcattaaaatttcttatttacccttttcccccttcccatttcttcccactttcatctaccttttctggcaaaaaggagccttttgctctctgtgaccctaagagcacactgcacagggaaaattgccccatccagacctggctccactcttgatctctcttgtcctcttctgctcttttcctggtgctcttttttctcggtggggtgtgggtaatagaacagccgtgggcttttggggacctttaacttttttttctctcttttgtttataaaaaacactaaacattcaattccagagaaccaaaaatcccaccttcccaccgaacactactaaggggcttgtgttctgctccataccttttctcttttctttctgtcttgttaatgcttttaaaaacaaatgagttttttatataaataaagtttttaaagtgtgtatgtggggggtctgtgtcatttcttcacttcaagctgttatttcttccctgctttgcatctttgttacttccttatgtatcagtgtcctttccagagcaaccagaaggaggttataccaggatttattttgagctcagccccaactctttatcaagcaacattcttgttaactatatgtgaaacattttttcttctgaagattcttaaaaattgaatgtggctgaagttgaacatgggagcttattgctaatttagagataggaaactgaagcataaagaattaatgacttactttaattactggaattcttctgcaacatttgacaaaactaaccttgaataaggcccactgtaatacgtagctctcttaaatataacacttaggactagaagattagaaactaccaatcccaactacgtaataggaaaatgtaggatcaaaaggcccatgtatataagtactgaccactgggccataatgttgcttctcaggctatatgcagtcctttagtcagaagtcaataggcctatttattaatattttacagaccatattacctggattaccagggactatctttgctgcagagatcaagggttaagatctatgggaagatacttatttttctgaggtccttatgtcctgtcatataattaaagactcaagagaatttatgtgaaatgctttctgtatgccccaatctttagattaaaattatatagctgctcctga

SEQ ID NO: 285202 - DNA, 3851 bp, Homo sapiens
ccaagagagatgtagagccgtcccgttttatttcattccgggcggcgttcgttgtagattactggtcctcggtctccaattacaatacagtggattccctaaaagaacgagtccagctcgaggctatgagctcttatttcagccagaggtggttcggatatacatctcacttcttaaggagagcaagactcctgccatcctagaagcctcagctggagctatccagaacttgtgtgctgggcgctggacgtatggtcgatacatccgctctgctctgcgtcaagagaaggctctttctgccatagctgacctcctgactaatgaacatgaacgggtggtgaaagctgcatctggagcactgagaaacctggctgtggatgctcgcaacaaagaattaattggtaaacatgctattcctaacttggtaaagaatctgccaggaggacagcagaactcctcttggaatttctctgaggacactgtcatctctattttgaacactatcaacgaggttatcgctgagaacttggaggctgccaaaaagcttcgagagacacagggtattgagaagctggtgttgatcaacaaatcagggaaccgctcagaaaaagaagttcgagcagcagcacttgtattacagacaatctggggatataaggaactgcggaagccactggaaaaagaaggatggaagaaatcagactttcaggtgaatctaaacaatgcttcccgaagccagagcagtcattcatatgatgatagtactctccctctcattgaccggaaccaaaaatcagataagaaacctgatcgggaagaaattcagatgagcaatatgggatcaaacacaaaatcactagataacaactattccacaccaaatgagagaggagaccacaatagaacactggatcgatcgggggatctaggcgacatggagccattgaagggaacaacacccttgatgcagaagatttagcaccactatctccgttccatctgggcttatatgtacttttattttttggtggtgaaattgactgatgattttcctttttcttcgctggactattgtgccaactgccaggctgcctcctgcccttacagccctaagtggctgccttctttccatcaactcccaacttcttcctgtgaagtttaattgtctcaacgcctccccctcccccattccctccatttttctcccaagaaacctgactcaattatttgcatattttgagaaactgctgcagattagttctttttgccagttttccctggaactcctggccttttgtggaggggagggatggagagaataggaatcttcactagaagccgtgggaagaattggaagttacatgctgtatatgcaatgtccagcagtctgataaactgacgattcttaatcaagatttttttcctgatggggaagggacttttattttcttttagagaggggaaagtgtgagctcttcccttattcctaatggctatttttgaagcaaagaaggccagcaacattggcacatgccacctggcaaaggacccttgagtaagtgaaggtctcctaaaactgggattaagaaaccttgctctcctcatctccaaggcagggaccatcaagaacctacagactccatctcttctgcaagcctcatgccaaccctgggctattgctgctgccccttaaacacaggctgtccttaacccacctctcctgccctgtgatatgtctgctgagttggcctggccatttccaagaggctgtagaaaggggagaatgtcaaggaagacttttggtagagaaggagcagaaagatgtgtttttgggaagaagaagacctctaggaggagctagtaggaatgtacatgaagcaattagtctgaaactggcttccccactcccccgtttctccttttcctatccttataggcctgtcccttgcctctgccctggattggttggcaaactaaaggacttgatgtacataactcctgtcccttttcccttacaaggtggggattgcccctggctttgcctcttctttgtgcctttggcctggggtgcatctcctcccgcccttccatgtgcctttctttgcctctgcagtctcatttctcataattttgcaaattatattttgttgctttcttacctactattggccctaaatagcagaaagaagagaagtgaccgagagaacctcagattcttcattgaggattggtatagccatgatttcagtcatagcaagcttttgctcaacagcatatgggtgggattttgcaaaaatcctattctgatgaatctcaaagtaaggctggtaagagaagtgagtggtgtgactcttactccttaggtgcccagaatttaccatcatctctgaaggagttacagggaagtggtctccccaattctcccctccctccagtattgccccctctcactttagcatatattaattagcaggttgggctagagaaatcagctgctatgcgggttgattattattattatttctaatccttttccttatttgccttctactccccttaatctaatctaaaagctctgttccatgcaactggagttccttatccctctcttccccttcccttatatattgaggctatggggtaggagaaaagtgcacaacccaccaccccctttactcgtgcattaaaatttcttatttacccttttcccccttcccatttcttcccactttcatctaccttttctggcaaaaaggagccttttgctctctgtgaccctaagagcacactgcacagggaaaattgccccatccagacctggctccactcttgatctctcttgtcctcttctgctcttttcctggtgctcttttttctcggtggggtgtgggtaatagaacagccgtgggcttttggggacctttaacttttttttctctcttttgtttataaaaaacactaaacattcaattccagagaaccaaaaatcccaccttcccaccgaacactactaaggggcttgtgttctgctccataccttttctcttttctttctgtcttgttaatgcttttaaaaacaaatgagttttttatataaataaagtttttaaagtgtgtatgtggggggtctgtgtcatttcttcacttcaagctgttatttcttccctgctttgcatctttgttacttccttatgtatcagtgtcctttccagagcaaccagaaggaggttataccaggatttattttgagctcagccccaactctttatcaagcaacattcttgttaactatatgtgaaacattttttcttctgaagattcttaaaaattgaatgtggctgaagttgaacatgggagcttattgctaatttagagataggaaactgaagcataaagaattaatgacttactttaattactggaattcttctgcaacatttgacaaaactaaccttgaataaggcccactgtaatacgtagctctcttaaatataacacttaggactagaagattagaaactaccaatcccaactacgtaataggaaaatgtaggatcaaaaggcccatgtatataagtactgaccactgggccataatgttgcttctcaggctatatgcagtcctttagtcagaagtcaataggcctatttattaatattttacagaccatattacctggattaccagggactatctttgctgcagagatcaagggttaagatctatgggaagatacttatttttctgaggtccttatgtcctgtcatataattaaagactcaagagaatttatgtgaaatgctttctgtatgccccaatctttagattaaaattatatagctgctcctga

SEQ ID NO: 285203 - DNA, 6048 bp, Homo sapiens
tcctgtacctggtaaagtaagagggatccacccaggaacagcagggctgaaaccgatacgggccgttcaaacgctctgggggaaaaacaataccatgtacactgcaaagctcccttgcctttggctgggtgcaacttccattttaggtgttggatctgagggggaaaaaaaagagagagggagagagagagaaagaagagcaggaaagatcccgaaaggaggaagaggtggcgaaaaatcaactgccctgctggatttgtctttctcagcaccttggcgaagccttgggtttctttcttaaaggactgatttttagaactccacatttgagctctctccttcctgcttcctccttgctgtggtggctgggatgcttcttccatgattttttgaatctagactgggctgttctctgtgttaaaccaatcagttgcgaccttctcttaacagtgtgaagtgagggggtctctctccctccttctccttcctctgtgattcaccttcctttttaccctgccctgcggcggctccgccccttaccttcatggacgactcagaggtggagtcgaccgccagcatcttggcctctgtgaaggaacaagaggcccagtttgagaagctgacccgggcgctggaggaggaacggcgccacgtctcggcgcagctggaacgcgtccgggtctcaccacaagatgccaacccactcatggccaacggcacactcacccgccggcatcagaacggccggtttgtgggcgatgctgaccttgaaagacagaaattttcagatttgaaactcaacggaccccaggatcacagtcaccttctatatagcaccatccccaggatgcaggagccggggcagattgtggagacctacacggaggaggatcctgagggagccatgtctgtagtctctgtggagacctcagatgatgggaccactcggcgcacagagaccacggtcaagaaagtagtgaagactgtgacaacacggacagtacagccagtcgctatgggaccagacgggttgcctgtggatgcttcatcagtttctaacaactatatccagactttgggtcgtgatttccgcaagaatggcaatgggggacctggtccctatgtggggcaagctggcactgctacccttcctaggaacttccactaccctcctgatggttatagtcgccactatgaagatggttatccaggtggcagtgataactatggcagtctgtcccgggtgacccgcattgaggagcggtataggcccagcatggaaggctaccgggcacctagtagacaggatgtgtatgggccccaaccccaggttcgggtaggtgggagcagcgtggatctgcatcgctttcatccagagccttatgggctagaggatgaccagcgtagtatgggctatgatgacctggattatggtatgatgtctgattatggcactgcccgtcggactgggacaccctctgaccctcgtcggcgcctcaggagctatgaagacatgattggtgaggaggtgccatcggatcaatactactgggctcctttggcccagcatgagcgaggaagtttagcaagcttggatagcctgcgcaaaggagggcctccacctcctaattggagacagccagagctgccagaggtgatcgccatgcttggattccgcttggatgctgtcaagtccaatgcagctgcatacctgcaacacttatgctaccgcaatgacaaggtgaagactgacgtgcggaagctcaagggcatcccagtactggtgggattgttagaccatcccaaaaaggaagtgcaccttggagcctgtggagctctcaagaatatctcttttggacgtgaccaggataacaagattgccataaaaaactgtgatggtgtgcctgcccttgtgcgattgcttcgaaaggctcgtgatatggaccttactgaagttattaccggaaccctgtggaatctttcatcccatgactcaatcaaaatggagattgtggaccatgcactgcatgccttgacagatgaagtgatcattcctcattctggttgggagcgggaacctaatgaagactgtaagccacgccatattgagtgggaatcggtgctcaccaacacagctggctgccttaggaatgtaagctcagagaggagtgaagctcgccggaaacttcgggaatgtgatggtttagttgatgccctcattttcattgttcaggctgagattgggcagaaggattcagacagcaagcttgtagagaactgtgtttgccttcttcggaacttatcatatcaagttcaccgggagatcccacaggcagagcgttaccaagaggcagctcccaatgttgccaacaatactgggccacatgctgccagttgctttggggccaagaagggcaaagggaaaaaacctatagaggatccagcaaacgatacagtggatttccctaaaagaacgagtccagctcgaggctatgagctcttatttcagccagaggtggttcggatatacatctcacttcttaaggagagcaagactcctgccatcctagaagcctcagctggagctatccagaacttgtgtgctgggcgctggacgtatggtcgatacatccgctctgctctgcgtcaagagaaggctctttctgccatagctgacctcctgactaatgaacatgaacgggtggtgaaagctgcatctggagcactgagaaacctggctgtggatgctcgcaacaaagaattaattggtaaacatgctattcctaacttggtaaagaatctgccaggaggacagcagaactcctcttggaatttctctgaggacactgtcatctctattttgaacactatcaacgaggttatcgctgagaacttggaggctgccaaaaagcttcgagagacacagggtattgagaagctggtgttgatcaacaaatcagggaaccgctcagaaaaagaagttcgagcagcagcacttgtattacagacaatctggggatataaggaactgcggaagccactggaaaaagaaggatggaagaaatcagactttcaggtgaatctaaacaatgcttcccgaagccagagcagtcattcatatgatgatagtactctccctctcattgaccggaaccaaaaatcagataagaaacctgatcgggaagaaattcagatgagcaatatgggatcaaacacaaaatcactagataacaactattccacaccaaatgagagaggagaccacaatagaacactggatcgatcgggggatctaggcgacatggagccattgaagggaacaacacccttgatgcagaagatttagcaccactatctccgttccatctgggcttatatgtacttttattttttggtggtgaaattgactgatgattttcctttttcttcgctggactattgtgccaactgccaggctgcctcctgcccttacagccctaagtggctgccttctttccatcaactcccaacttcttcctgtgaagtttaattgtctcaacgcctccccctcccccattccctccatttttctcccaagaaacctgactcaattatttgcatattttgagaaactgctgcagattagttctttttgccagttttccctggaactcctggccttttgtggaggggagggatggagagaataggaatcttcactagaagccgtgggaagaattggaagttacatgctgtatatgcaatgtccagcagtctgataaactgacgattcttaatcaagatttttttcctgatggggaagggacttttattttcttttagagaggggaaagtgtgagctcttcccttattcctaatggctatttttgaagcaaagaaggccagcaacattggcacatgccacctggcaaaggacccttgagtaagtgaaggtctcctaaaactgggattaagaaaccttgctctcctcatctccaaggcagggaccatcaagaacctacagactccatctcttctgcaagcctcatgccaaccctgggctattgctgctgccccttaaacacaggctgtccttaacccacctctcctgccctgtgatatgtctgctgagttggcctggccatttccaagaggctgtagaaaggggagaatgtcaaggaagacttttggtagagaaggagcagaaagatgtgtttttgggaagaagaagacctctaggaggagctagtaggaatgtacatgaagcaattagtctgaaactggcttccccactcccccgtttctccttttcctatccttataggcctgtcccttgcctctgccctggattggttggcaaactaaaggacttgatgtacataactcctgtcccttttcccttacaaggtggggattgcccctggctttgcctcttctttgtgcctttggcctggggtgcatctcctcccgcccttccatgtgcctttctttgcctctgcagtctcatttctcataattttgcaaattatattttgttgctttcttacctactattggccctaaatagcagaaagaagagaagtgaccgagagaacctcagattcttcattgaggattggtatagccatgatttcagtcatagcaagcttttgctcaacagcatatgggtgggattttgcaaaaatcctcaggttgggctagagaaatcagctgctatgcgggttgattattattattatttctaatccttttccttatttgccttctactccccttaatctaatctaaaagctctgttccatgcaactggagttccttatccctctcttccccttcccttatatattgaggctatggggtaggagaaaagtgcacaacccaccaccccctttactcgtgcattaaaatttcttatttacccttttcccccttcccatttcttcccactttcatctaccttttctggcaaaaaggagccttttgctctctgtgaccctaagagcacactgcacagggaaaattgccccatccagacctggctccactcttgatctctcttgtcctcttctgctcttttcctggtgctcttttttctcggtggggtgtgggtaatagaacagccgtgggcttttggggacctttaacttttttttctctcttttgtttataaaaaacactaaacattcaattccagagaaccaaaaatcccaccttcccaccgaacactactaaggggcttgtgttctgctccataccttttctcttttctttctgtcttgttaatgcttttaaaaacaaatgagttttttatataaataaagtttttaaagtgtgtatgtggggggtctgtgtcatttcttcacttcaagctgttatttcttccctgctttgcatctttgttacttccttatgtatcagtgtcctttccagagcaaccagaaggaggttataccaggatttattttgagctcagccccaactctttatcaagcaacattcttgttaactatatgtgaaacattttttcttctgaagattcttaaaaattgaatgtggctgaagttgaacatgggagcttattgctaatttagagataggaaactgaagcataaagaattaatgacttactttaattactggaattcttctgcaacatttgacaaaactaaccttgaataaggcccactgtaatacgtagctctcttaaatataacacttaggactagaagattagaaactaccaatcccaactacgtaataggaaaatgtaggatcaaaaggcccatgtatataagtactgaccactgggccataatgttgcttctcaggctatatgcagtcctttagtcagaagtcaataggcctatttattaatattttacagaccatattacctggattaccagggactatctttgctgcagagatcaagggttaagatctatgggaagatacttatttttctgaggtccttatgtcctgtcatataattaaagactcaagagaatttatgtgaaatgctttctgtatgccccaatctttagattaaaattatatagctgctcctga

SEQ ID NO: 285204 - DNA, 5737 bp, Homo sapiens
tcctgtacctggtaaagtaagagggatccacccaggaacagcagggctgaaaccgatacgggccgttcaaacgctctgggggaaaaacaataccatgtacactgcaaagctcccttgcctttggctgggtgcaacttccattttaggtgttggatctgagggggaaaaaaaagagagagggagagagagagaaagaagagcaggaaagatcccgaaaggaggaagaggtggcgaaaaatcaactgccctgctggatttgtctttctcagcaccttggcgaagccttgggtttctttcttaaaggactgatttttagaactccacatttgagctctctccttcctgcttcctccttgctgtggtggctgggatgcttcttccatgattttttgaatctagactgggctgttctctgtgttaaaccaatcagttgcgaccttctcttaacagtgtgaagtgagggggtctctctccctccttctccttcctctgtgattcaccttcctttttaccctgccctgcggcggctccgccccttaccttcatggacgactcagaggtggagtcgaccgccagcatcttggcctctgtgaaggaacaagaggcccagtttgagaagctgacccgggcgctggaggaggaacggcgccacgtctcggcgcagctggaacgcgtccgggtctcaccacaagatgccaacccactcatggccaacggcacactcacccgccggcatcagaacggccggtttgtgggcgatgctgaccttgaaagacagaaattttcagatttgaaactcaacggaccccaggatcacagtcaccttctatatagcaccatccccaggatgcaggagccggggcagattgtggagacctacacggaggaggatcctgagggagccatgtctgtagtctctgtggagacctcagatgatgggaccactcggcgcacagagaccacggtcaagaaagtagtgaagactgtgacaacacggacagtacagccagtcgctatgggaccagacgggttgcctgtggatgcttcatcagtttctaacaactatatccagactttgggtcgtgatttccgcaagaatggcaatgggggacctggtccctatgtggggcaagctggcactgctacccttcctaggaacttccactaccctcctgatggttatagtcgccactatgaagatggttatccaggtggcagtgataactatggcagtctgtcccgggtgacccgcattgaggagcggtataggcccagcatggaaggctaccgggcacctagtagacaggatgtgtatgggccccaaccccaggttcgggtaggtgggagcagcgtggatctgcatcgctttcatccagagccttatgggctagaggatgaccagcgtagtatgggctatgatgacctggattatggtatgatgtctgattatggcactgcccgtcggactgggacaccctctgaccctcgtcggcgcctcaggagctatgaagacatgattggtgaggaggtgccatcggatcaatactactgggctcctttggcccagcatgagcgaggaagtttagcaagcttggatagcctgcgcaaaggagggcctccacctcctaattggagacagccagagctgccagaggtgatcgccatgcttggattccgcttggatgctgtcaagtccaatgcagctgcatacctgcaacacttatgctaccgcaatgacaaggtgaagactgacgtgcggaagctcaagggcatcccagtactggtgggattgttagaccatcccaaaaaggaagtgcaccttggagcctgtggagctctcaagaatatctcttttggacgtgaccaggataacaagattgccataaaaaactgtgatggtgtgcctgcccttgtgcgattgcttcgaaaggctcgtgatatggaccttactgaagttattaccggaaccctgtggaatctttcatcccatgactcaatcaaaatggagattgtggaccatgcactgcatgccttgacagatgaagtgatcattcctcattctggttgggagcgggaacctaatgaagactgtaagccacgccatattgagtgggaatcggtgctcaccaacacagctggctgccttaggaatgtaagctcagagaggagtgaagctcgccggaaacttcgggaatgtgatggtttagttgatgccctcattttcattgttcaggctgagattgggcagaaggattcagacagcaagcttgtagagaactgtgtttgccttcttcggaacttatcatatcaagttcaccgggagatcccacaggcagagcgttaccaagaggcagctcccaatgttgccaacaatactgggccacatgctgccagttgctttggggccaagaagggcaaagggaaaaaacctatagaggatccagcaaacgatacagtggatttccctaaaagaacgagtccagctcgaggctatgagctcttatttcagccagaggtggttcggatatacatctcacttcttaaggagagcaagactcctgccatcctagaagcctcagctggagctatccagaacttgtgtgctgggcgctggacgtatggtcgatacatccgctctgctctgcgtcaagagaaggctctttctgccatagctgacctcctgactaatgaacatgaacgggtggtgaaagctgcatctggagcactgagaaacctggctgtggatgctcgcaacaaagaattaattggtaaacatgctattcctaacttggtaaagaatctgccaggaggacagcagaactcctcttggaatttctctgaggacactgtcatctctattttgaacactatcaacgaggttatcgctgagaacttggaggctgccaaaaagcttcgagagacacagggtattgagaagctggtgttgatcaacaaatcagggaaccgctcagaaaaagaagttcgagcagcagcacttgtattacagacaatctggggatataaggaactgcggaagccactggaaaaagaaggatggaagaaatcagactttcaggtgaatctaaacaatgcttcccgaagccagagcagtcattcatatgatgatagtactctccctctcattgaccggaaccaaaaatcagataagaaacctgatcgggaagaaattcagatgagcaatatgggatcaaacacaaaatcactagataacaactattccacaccaaatgagagaggagaccacaatagaacactggatcgatcgggggatctaggcgacatggagccattgaagggaacaacacccttgatgcagaagatttagcaccactatctccgttccatctgggcttatatgtacttttattttttggtggtgaaattgactgatgattttcctttttcttcgctggactattgtgccaactgccaggctgcctcctgcccttacagccctaagtggctgccttctttccatcaactcccaacttcttcctgtgaagtttaattgtctcaacgcctccccctcccccattccctccatttttctcccaagaaacctgactcaattatttgcatattttgagaaactgctgcagattagttctttttgccagttttccctggaactcctggccttttgtggaggggagggatggagagaataggaatcttcactagaagccgtgggaagaattggaagttacatgctgtatatgcaatgtccagcagtctgataaactgacgattcttaatcaagatttttttcctgatggggaagggacttttattttcttttagagaggggaaagtgtgagctcttcccttattcctaatggctatttttgaagcaaagaaggccagcaacattggcacatgccacctggcaaaggacccttgagtaagtgaaggtctcctaaaactgggattaagaaaccttgctctcctcatctccaaggcagggaccatcaagaacctacagactccatctcttctgcaagcctcatgccaaccctgggctattgctgctgccccttaaacacaggctgtccttaacccacctctcctgccctgtgatatgtctgctgagttggcctggccatttccaagaggctgtagaaaggggagaatgtcaaggaagacttttggtagagaaggagcagaaagatgtgtttttgggaagaagaagacctctaggaggagctagtaggaatgtacatgaagcaattagtctgaaactggcttccccactcccccgtttctccttttcctatccttataggcctgtcccttgcctctgccctggattggttggcaaactaaaggacttgatgtacataactcctgtcccttttcccttacaaggtggggattgcccctggctttgcctcttctttgtgcctttggcctggggtgcatctcctcccgcccttccatgtgcctttctttgcctctgcagtctcatttctcataattttgcaaattatattttgttgctttcttacctactattggccctaaatagcagaaagaagagaagtgaccgagagaacctcagattcttcattgaggattggtatagccatgatttcagtcatagcaagcttttgctcaacagcatatgggtgggattttgcaaaaatcctattctgatgaatctcaaagtaaggctggtaagagaagtgagtggtgtgactcttactccttaggtgcccagaatttaccatcatctctgaaggagttacagggaagtggtctccccaattctcccctccctccagtattgccccctctcactttagcatatattaattagcaggttgggctagagaaatcagctgctatgcgggttgattattattattatttctaatccttttccttatttgccttctactccccttaatctaatctaaaagctctgttccatgcaactggagttccttatccctctcttccccttcccttatatattgaggctatggggtaggagaaaagtgcacaacccaccaccccctttactcgtgcattaaaatttcttatttacccttttcccccttcccatttcttcccactttcatctaccttttctggcaaaaaggagccttttgctctctgtgaccctaagagcacactgcacagggaaaattgccccatccagacctggctccactcttgatctctcttgtcctcttctgctcttttcctggtgctcttttttctcggtggggtgtgggtaatagaacagccgtgggcttttggggacctttaacttttttttctctcttttgtttataaaaaacactaaacattcaattccagagaaccaaaaatcccaccttcccaccgaacactactaaggggcttgtgttctgctccataccttttctcttttctttctgtcttgttaatgcttttaaaaacaaatgagttttttatataaataaagtttttaaagtgtgaaaaaaagagaaacaacaaaaaaagaaaaatatgtgggaggcagagggcccgggaaaaggttgttagaccacatggatggaggacagaggcaccaagagtggaacgtcgcaacgtggccaaagagggacccaaagaaacaccgggcacacaacaagggcagggattccccacaaataaaaagacccgggggagaacagagaaggcttgaaacacattcccaaagagtctcgaggacacagggatcaaacaagga

SEQ ID NO: 285205 - DNA, 3258 bp, Homo sapiens
tagacatgatacaatcgagctcgtacccagcagcacttgtattacagacaatctggggatataaggaactgcggaagccactggaaaaagaaggatggaagaaatcagactttcaggtgaatctaaacaatgcttcccgaagccagagcagtcattcatatgatgatagtactctccctctcattgaccggaaccaaaaatcagataagaaacctgatcgggaagaaattcagatgagcaatatgggatcaaacacaaaatcactagataacaactattccacaccaaatgagagaggagaccacaatagaacactggatcgatcgggggatctaggcgacatggagccattgaagggaacaacacccttgatgcagaagatttagcaccactatctccgttccatctgggcttatatgtacttttattttttggtggtgaaattgactgatgattttcctttttcttcgctggactattgtgccaactgccaggctgcctcctgcccttacagccctaagtggctgccttctttccatcaactcccaacttcttcctgtgaagtttaattgtctcaacgcctccccctcccccattccctccatttttctcccaagaaacctgactcaattatttgcatattttgagaaactgctgcagattagttctttttgccagttttccctggaactcctggccttttgtggaggggagggatggagagaataggaatcttcactagaagccgtgggaagaattggaagttacatgctgtatatgcaatgtccagcagtctgataaactgacgattcttaatcaagatttttttcctgatggggaagggacttttattttcttttagagaggggaaagtgtgagctcttcccttattcctaatggctatttttgaagcaaagaaggccagcaacattggcacatgccacctggcaaaggacccttgagtaagtgaaggtctcctaaaactgggattaagaaaccttgctctcctcatctccaaggcagggaccatcaagaacctacagactccatctcttctgcaagcctcatgccaaccctgggctattgctgctgccccttaaacacaggctgtccttaacccacctctcctgccctgtgatatgtctgctgagttggcctggccatttccaagaggctgtagaaaggggagaatgtcaaggaagacttttggtagagaaggagcagaaagatgtgtttttgggaagaagaagacctctaggaggagctagtaggaatgtacatgaagcaattagtctgaaactggcttccccactcccccgtttctccttttcctatccttataggcctgtcccttgcctctgccctggattggttggcaaactaaaggacttgatgtacataactcctgtcccttttcccttacaaggtggggattgcccctggctttgcctcttctttgtgcctttggcctggggtgcatctcctcccgcccttccatgtgcctttctttgcctctgcagtctcatttctcataattttgcaaattatattttgttgctttcttacctactattggccctaaatagcagaaagaagagaagtgaccgagagaacctcagattcttcattgaggattggtatagccatgatttcagtcatagcaagcttttgctcaacagcatatgggtgggattttgcaaaaatcctattctgatgaatctcaaagtaaggctggtaagagaagtgagtggtgtgactcttactccttaggtgcccagaatttaccatcatctctgaaggagttacagggaagtggtctccccaattctcccctccctccagtattgccccctctcactttagcatatattaattagcaggttgggctagagaaatcagctgctatgcgggttgattattattattatttctaatccttttccttatttgccttctactccccttaatctaatctaaaagctctgttccatgcaactggagttccttatccctctcttccccttcccttatatattgaggctatggggtaggagaaaagtgcacaacccaccaccccctttactcgtgcattaaaatttcttatttacccttttcccccttcccatttcttcccactttcatctaccttttctggcaaaaaggagccttttgctctctgtgaccctaagagcacactgcacagggaaaattgccccatccagacctggctccactcttgatctctcttgtcctcttctgctcttttcctggtgctcttttttctcggtggggtgtgggtaatagaacagccgtgggcttttggggacctttaacttttttttctctcttttgtttataaaaaacactaaacattcaattccagagaaccaaaaatcccaccttcccaccgaacactactaaggggcttgtgttctgctccataccttttctcttttctttctgtcttgttaatgcttttaaaaacaaatgagttttttatataaataaagtttttaaagtgtgtatgtggggggtctgtgtcatttcttcacttcaagctgttatttcttccctgctttgcatctttgttacttccttatgtatcagtgtcctttccagagcaaccagaaggaggttataccaggatttattttgagctcagccccaactctttatcaagcaacattcttgttaactatatgtgaaacattttttcttctgaagattcttaaaaattgaatgtggctgaagttgaacatgggagcttattgctaatttagagataggaaactgaagcataaagaattaatgacttactttaattactggaattcttctgcaacatttgacaaaactaaccttgaataaggcccactgtaatacgtagctctcttaaatataacacttaggactagaagattagaaactaccaatcccaactacgtaataggaaaatgtaggatcaaaaggcccatgtatataagtactgaccactgggccataatgttgcttctcaggctatatgcagtcctttagtcagaagtcaataggcctatttattaatattttacagaccatattacctggattaccagggactatctttgctgcagagatcaagggttaagatctatgggaagatacttatttttctgaggtccttatgtcctgtcatataattaaagactcaagagaatttatgtgaaatgctttctgtatgccccaatctttagattaaaattatatagctgctcctga

SEQ ID NO: 285206 - DNA, 3001 bp, Homo sapiens
tgctattgacggggaacaacacccttgatgcaggacgaggggcaggaatctctggaggaagagttggatgtgttggttttggatgatgaggggggccaagtgtcttacccctccatgcagaagatttagcaccactatctccgttccatctgggcttatatgtacttttattttttggtggtgaaattgactgatgattttcctttttcttcgctggactattgtgccaactgccaggctgcctcctgcccttacagccctaagtggctgccttctttccatcaactcccaacttcttcctgtgaagtttaattgtctcaacgcctccccctcccccattccctccatttttctcccaagaaacctgactcaattatttgcatattttgagaaactgctgcagattagttctttttgccagttttccctggaactcctggccttttgtggaggggagggatggagagaataggaatcttcactagaagccgtgggaagaattggaagttacatgctgtatatgcaatgtccagcagtctgataaactgacgattcttaatcaagatttttttcctgatggggaagggacttttattttcttttagagaggggaaagtgtgagctcttcccttattcctaatggctatttttgaagcaaagaaggccagcaacattggcacatgccacctggcaaaggacccttgagtaagtgaaggtctcctaaaactgggattaagaaaccttgctctcctcatctccaaggcagggaccatcaagaacctacagactccatctcttctgcaagcctcatgccaaccctgggctattgctgctgccccttaaacacaggctgtccttaacccacctctcctgccctgtgatatgtctgctgagttggcctggccatttccaagaggctgtagaaaggggagaatgtcaaggaagacttttggtagagaaggagcagaaagatgtgtttttgggaagaagaagacctctaggaggagctagtaggaatgtacatgaagcaattagtctgaaactggcttccccactcccccgtttctccttttcctatccttataggcctgtcccttgcctctgccctggattggttggcaaactaaaggacttgatgtacataactcctgtcccttttcccttacaaggtggggattgcccctggctttgcctcttctttgtgcctttggcctggggtgcatctcctcccgcccttccatgtgcctttctttgcctctgcagtctcatttctcataattttgcaaattatattttgttgctttcttacctactattggccctaaatagcagaaagaagagaagtgaccgagagaacctcagattcttcattgaggattggtatagccatgatttcagtcatagcaagcttttgctcaacagcatatgggtgggattttgcaaaaatcctattctgatgaatctcaaagtaaggctggtaagagaagtgagtggtgtgactcttactccttaggtgcccagaatttaccatcatctctgaaggagttacagggaagtggtctccccaattctcccctccctccagtattgccccctctcactttagcatatattaattagcaggttgggctagagaaatcagctgctatgcgggttgattattattattatttctaatccttttccttatttgccttctactccccttaatctaatctaaaagctctgttccatgcaactggagttccttatccctctcttccccttcccttatatattgaggctatggggtaggagaaaagtgcacaacccaccaccccctttactcgtgcattaaaatttcttatttacccttttcccccttcccatttcttcccactttcatctaccttttctggcaaaaaggagccttttgctctctgtgaccctaagagcacactgcacagggaaaattgccccatccagacctggctccactcttgatctctcttgtcctcttctgctcttttcctggtgctcttttttctcggtggggtgtgggtaatagaacagccgtgggcttttggggacctttaacttttttttctctcttttgtttataaaaaacactaaacattcaattccagagaaccaaaaatcccaccttcccaccgaacactactaaggggcttgtgttctgctccataccttttctcttttctttctgtcttgttaatgcttttaaaaacaaatgagttttttatataaataaagtttttaaagtgtgtatgtggggggtctgtgtcatttcttcacttcaagctgttatttcttccctgctttgcatctttgttacttccttatgtatcagtgtcctttccagagcaaccagaaggaggttataccaggatttattttgagctcagccccaactctttatcaagcaacattcttgttaactatatgtgaaacattttttcttctgaagattcttaaaaattgaatgtggctgaagttgaacatgggagcttattgctaatttagagataggaaactgaagcataaagaattaatgacttactttaattactggaattcttctgcaacatttgacaaaactaaccttgaataaggcccactgtaatacgtagctctcttaaatataacacttaggactagaagattagaaactaccaatcccaactacgtaataggaaaatgtaggatcaaaaggcccatgtatataagtactgaccactgggccataatgttgcttctcaggctatatgcagtcctttagtcagaagtcaataggcctatttattaatattttacagaccatattacctggattaccagggactatctttgctgcagagatcaagggttaagatctatgggaagatacttatttttctgaggtccttatgtcctgtcatataattaaagactcaagagaatttatgtgaaatgctttctgtatgccccaatctttagattaaaattatatagctgctcctga

SEQ ID NO: 285207 - DNA, 2702 bp, Homo sapiens
gaggatgcccccggatccatccctttgccctccattcgcctgccatgtggtgctcccaaagaaacctgactcaattatttgcatattttgagaaactgctgcagattagttctttttgccagttttccctggaactcctggccttttgtggaggggagggatggagagaataggaatcttcactagaagccgtgggaagaattggaagttacatgctgtatatgcaatgtccagcagtctgataaactgacgattcttaatcaagatttttttcctgatggggaagggacttttattttcttttagagaggggaaagtgtgagctcttcccttattcctaatggctatttttgaagcaaagaaggccagcaacattggcacatgccacctggcaaaggacccttgagtaagtgaaggtctcctaaaactgggattaagaaaccttgctctcctcatctccaaggcagggaccatcaagaacctacagactccatctcttctgcaagcctcatgccaaccctgggctattgctgctgccccttaaacacaggctgtccttaacccacctctcctgccctgtgatatgtctgctgagttggcctggccatttccaagaggctgtagaaaggggagaatgtcaaggaagacttttggtagagaaggagcagaaagatgtgtttttgggaagaagaagacctctaggaggagctagtaggaatgtacatgaagcaattagtctgaaactggcttccccactcccccgtttctccttttcctatccttataggcctgtcccttgcctctgccctggattggttggcaaactaaaggacttgatgtacataactcctgtcccttttcccttacaaggtggggattgcccctggctttgcctcttctttgtgcctttggcctggggtgcatctcctcccgcccttccatgtgcctttctttgcctctgcagtctcatttctcataattttgcaaattatattttgttgctttcttacctactattggccctaaatagcagaaagaagagaagtgaccgagagaacctcagattcttcattgaggattggtatagccatgatttcagtcatagcaagcttttgctcaacagcatatgggtgggattttgcaaaaatcctattctgatgaatctcaaagtaaggctggtaagagaagtgagtggtgtgactcttactccttaggtgcccagaatttaccatcatctctgaaggagttacagggaagtggtctccccaattctcccctccctccagtattgccccctctcactttagcatatattaattagcaggttgggctagagaaatcagctgctatgcgggttgattattattattatttctaatccttttccttatttgccttctactccccttaatctaatctaaaagctctgttccatgcaactggagttccttatccctctcttccccttcccttatatattgaggctatggggtaggagaaaagtgcacaacccaccaccccctttactcgtgcattaaaatttcttatttacccttttcccccttcccatttcttcccactttcatctaccttttctggcaaaaaggagccttttgctctctgtgaccctaagagcacactgcacagggaaaattgccccatccagacctggctccactcttgatctctcttgtcctcttctgctcttttcctggtgctcttttttctcggtggggtgtgggtaatagaacagccgtgggcttttggggacctttaacttttttttctctcttttgtttataaaaaacactaaacattcaattccagagaaccaaaaatcccaccttcccaccgaacactactaaggggcttgtgttctgctccataccttttctcttttctttctgtcttgttaatgcttttaaaaacaaatgagttttttatataaataaagtttttaaagtgtgtatgtggggggtctgtgtcatttcttcacttcaagctgttatttcttccctgctttgcatctttgttacttccttatgtatcagtgtcctttccagagcaaccagaaggaggttataccaggatttattttgagctcagccccaactctttatcaagcaacattcttgttaactatatgtgaaacattttttcttctgaagattcttaaaaattgaatgtggctgaagttgaacatgggagcttattgctaatttagagataggaaactgaagcataaagaattaatgacttactttaattactggaattcttctgcaacatttgacaaaactaaccttgaataaggcccactgtaatacgtagctctcttaaatataacacttaggactagaagattagaaactaccaatcccaactacgtaataggaaaatgtaggatcaaaaggcccatgtatataagtactgaccactgggccataatgttgcttctcaggctatatgcagtcctttagtcagaagtcaataggcctatttattaatattttacagaccatattacctggattaccagggactatctttgctgcagagatcaagggttaagatctatgggaagatacttatttttctgaggtccttatgtcctgtcatataattaaagactcaagagaatttatgtgaaatgctttctgtatgccccaatctttagattaaaattatatagctgctcctga

SEQ ID NO: 285208 - DNA, 6146 bp, Homo sapiens
tcctgtacctggtaaagtaagagggatccacccaggaacagcagggctgaaaccgatacgggccgttcaaacgctctgggggaaaaacaataccatgtacactgcaaagctcccttgcctttggctgggtgcaacttccattttaggtgttggatctgagggggaaaaaaaagagagagggagagagagagaaagaagagcaggaaagatcccgaaaggaggaagaggtggcgaaaaatcaactgccctgctggatttgtctttctcagcaccttggcgaagccttgggtttctttcttaaaggactgatttttagaactccacatttgagctctctccttcctgcttcctccttgctgtggtggctgggatgcttcttccatgattttttgaatctagactgggctgttctctgtgttaaaccaatcagttgcgaccttctcttaacagtgtgaagtgagggggtctctctccctccttctccttcctctgtgattcaccttcctttttaccctgccctgcggcggctccgccccttaccttcatggacgactcagaggtggagtcgaccgccagcatcttggcctctgtgaaggaacaagaggcccagtttgagaagctgacccgggcgctggaggaggaacggcgccacgtctcggcgcagctggaacgcgtccgggtctcaccacaagatgccaacccactcatggccaacggcacactcacccgccggcatcagaacggccggtttgtgggcgatgctgaccttgaaagacagaaattttcagatttgaaactcaacggaccccaggatcacagtcaccttctatatagcaccatccccaggatgcaggagccggggcagattgtggagacctacacggaggaggatcctgagggagccatgtctgtagtctctgtggagacctcagatgatgggaccactcggcgcacagagaccacggtcaagaaagtagtgaagactgtgacaacacggacagtacagccagtcgctatgggaccagacgggttgcctgtggatgcttcatcagtttctaacaactatatccagactttgggtcgtgatttccgcaagaatggcaatgggggacctggtccctatgtggggcaagctggcactgctacccttcctaggaacttccactaccctcctgatggttatagtcgccactatgaagatggttatccaggtggcagtgataactatggcagtctgtcccgggtgacccgcattgaggagcggtataggcccagcatggaaggctaccgggcacctagtagacaggatgtgtatgggccccaaccccaggttcgggtaggtgggagcagcgtggatctgcatcgctttcatccagagccttatgggctagaggatgaccagcgtagtatgggctatgatgacctggattatggtatgatgtctgattatggcactgcccgtcggactgggacaccctctgaccctcgtcggcgcctcaggagctatgaagacatgattggtgaggaggtgccatcggatcaatactactgggctcctttggcccagcatgagcgaggaagtttagcaagcttggatagcctgcgcaaaggagggcctccacctcctaattggagacagccagagctgccagaggtgatcgccatgcttggattccgcttggatgctgtcaagtccaatgcagctgcatacctgcaacacttatgctaccgcaatgacaaggtgaagactgacgtgcggaagctcaagggcatcccagtactggtgggattgttagaccatcccaaaaaggaagtgcaccttggagcctgtggagctctcaagaatatctcttttggacgtgaccaggataacaagattgccataaaaaactgtgatggtgtgcctgcccttgtgcgattgcttcgaaaggctcgtgatatggaccttactgaagttattaccggaaccctgtggaatctttcatcccatgactcaatcaaaatggagattgtggaccatgcactgcatgccttgacagatgaagtgatcattcctcattctggttgggagcgggaacctaatgaagactgtaagccacgccatattgagtgggaatcggtgctcaccaacacagctggctgccttaggaatgtaagctcagagaggagtgaagctcgccggaaacttcgggaatgtgatggtttagttgatgccctcattttcattgttcaggctgagattgggcagaaggattcagacagcaagcttgtagagaactgtgtttgccttcttcggaacttatcatatcaagttcaccgggagatcccacaggcagagcgttaccaagaggcagctcccaatgttgccaacaatactgggccacatgctgccagttgctttggggccaagaagggcaaagggaaaaaacctatagaggatccagcaaacgatacagtggatttccctaaaagaacgagtccagctcgaggctatgagctcttatttcagccagaggtggttcggatatacatctcacttcttaaggagagcaagactcctgccatcctagaagcctcagctggagctatccagaacttgtgtgctgggcgctggacgtatggtcgatacatccgctctgctctgcgtcaagagaaggctctttctgccatagctgacctcctgactaatgaacatgaacgggtggtgaaagctgcatctggagcactgagaaacctggctgtggatgctcgcaacaaagaattaattggtaaacatgctattcctaacttggtaaagaatctgccaggaggacagcagaactcctcttggaatttctctgaggacactgtcatctctattttgaacactatcaacgaggttatcgctgagaacttggaggctgccaaaaagcttcgagagacacagggtattgagaagctggtgttgatcaacaaatcagggaaccgctcagaaaaagaagttcgagcagcagcacttgtattacagacaatctggggatataaggaactgcggaagccactggaaaaagaaggatggaagaaatcagactttcaggtgaatctaaacaatgcttcccgaagccagagcagtcattcatatgatgatagtactctccctctcattgaccggaaccaaaaatcagataagaaacctgatcgggaagaaattcagatgagcaatatgggatcaaacacaaaatcactagataacaactattccacaccaaatgagagaggagaccacaatagaacactggatcgatcgggggatctaggcgacatggagccattgaagggaacaacacccttgatgcagaagatttagcaccactatctccgttccatctgggcttatatgtacttttattttttggtggtgaaattgactgatgattttcctttttcttcgctggactattgtgccaactgccaggctgcctcctgcccttacagccctaagtggctgccttctttccatcaactcccaacttcttcctgtgaagtttaattgtctcaacgcctccccctcccccattccctccatttttctcccaagaaacctgactcaattatttgcatattttgagaaactgctgcagattagttctttttgccagttttccctggaactcctggccttttgtggaggggagggatggagagaataggaatcttcactagaagccgtgggaagaattggaagttacatgctgtatatgcaatgtccagcagtctgataaactgacgattcttaatcaagatttttttcctgatggggaagggacttttattttcttttagagaggggaaagtgtgagctcttcccttattcctaatggctatttttgaagcaaagaaggccagcaacattggcacatgccacctggcaaaggacccttgagtaagtgaaggtctcctaaaactgggattaagaaaccttgctctcctcatctccaaggcagggaccatcaagaacctacagactccatctcttctgcaagcctcatgccaaccctgggctattgctgctgccccttaaacacaggctgtccttaacccacctctcctgccctgtgatatgtctgctgagttggcctggccatttccaagaggctgtagaaaggggagaatgtcaaggaagacttttggtagagaaggagcagaaagatgtgtttttgggaagaagaagacctctaggaggagctagtaggaatgtacatgaagcaattagtctgaaactggcttccccactcccccgtttctccttttcctatccttataggcctgtcccttgcctctgccctggattggttggcaaactaaaggacttgatgtacataactcctgtcccttttcccttacaaggtggggattgcccctggctttgcctcttctttgtgcctttggcctggggtgcatctcctcccgcccttccatgtgcctttctttgcctctgcagtctcatttctcataattttgcaaattatattttgttgctttcttacctactattggccctaaatagcagaaagaagagaagtgaccgagagaacctcagattcttcattgaggattggtatagccatgatttcagtcatagcaagcttttgctcaacagcatatgggtgggattttgcaaaaatcctattctgatgaatctcaaagtaaggctggtaagagaagtgagtggtgtgactcttactccttaggtgcccagaatttaccatcatctctgaaggagttacagggaagtggtctccccaattctcccctccctccagtattgccccctctcactttagcatatattaattagcaggttgggctagagaaatcagctgctatgcgggttgattattattattatttctaatccttttccttatttgccttctactccccttaatctaatctaaaagctctgttccatgcaactggagttccttatccctctcttccccttcccttatatattgaggctatggggtaggagtcgtgcattaaaatttcttatttacccttttcccccttcccatttcttcccactttcatctaccttttctggcaaaaaggagccttttgctctctgtgaccctaagagcacactgcacagggaaaattgccccatccagacctggctccactcttgatctctcttgtcctcttctgctcttttcctggtgctcttttttctcggtggggtgtgggtaatagaacagccgtgggcttttggggacctttaacttttttttctctcttttgtttataaaaaacactaaacattcaattccagagaaccaaaaatcccaccttcccaccgaacactactaaggggcttgtgttctgctccataccttttctcttttctttctgtcttgttaatgcttttatatgtggggggtctgtgtcatttcttcacttcaagctgttatttcttccctgctttgcatctttgttacttccttatgtatcagtgtcctttccagagcaaccagaaggaggttataccaggatttattttgagctcagccccaactctttatcaagcaacattcttgttaactatatgtgaaacattttttcttctgaagattcttaaaaattgaatgtggctgaagttgaacatgggagcttattgctaatttagagataggaaactgaagcataaagaattaatgacttactttaattactggaattcttctgcaacatttgacaaaactaaccttgaataaggcccactgtaatacgtagctctcttaaatataacacttaggactagaagattagaaactaccaatcccaactacgtaataggaaaatgtaggatcaaaaggcccatgtatataagtactgaccactgggccataatgttgcttctcaggctatatgcagtcctttagtcagaagtcaataggcctatttattaatattttacagaccatattacctggattaccagggactatctttgctgcagagatcaagggttaagatctatgggaagatacttatttttctgaggtccttatgtcctgtcatataattaaagactcaagagaatttatgtgaaatgctttctgtatgccccaatctttagattaaaattatatagctgctcctga

SEQ ID NO: 285209 - DNA, 1690 bp, Homo sapiens
gccggctccgggtttactagaagatagaggacaacaccgagagaacctcagattcttcattgaggattggtatagccatgatttcagtcatagcaagcttttgctcaacagcatatgggtgggattttgcaaaaatcctattctgatgaatctcaaagtaaggctggtaagagaagtgagtggtgtgactcttactccttaggtgcccagaatttaccatcatctctgaaggagttacagggaagtggtctccccaattctcccctccctccagtattgccccctctcactttagcatatattaattagcaggttgggctagagaaatcagctgctatgcgggttgattattattattatttctaatccttttccttatttgccttctactccccttaatctaatctaaaagctctgttccatgcaactggagttccttatccctctcttccccttcccttatatattgaggctatggggtaggagaaaagtgcacaacccaccaccccctttactcgtgcattaaaatttcttatttacccttttcccccttcccatttcttcccactttcatctaccttttctggcaaaaaggagccttttgctctctgtgaccctaagagcacactgcacagggaaaattgccccatccagacctggctccactcttgatctctcttgtcctcttctgctcttttcctggtgctcttttttctcggtggggtgtgggtaatagaacagccgtgggcttttggggacctttaacttttttttctctcttttgtttataaaaaacactaaacattcaattccagagaaccaaaaatcccaccttcccaccgaacactactaaggggcttgtgttctgctccataccttttctcttttctttctgtcttgttaatgcttttaaaaacaaatgagttttttatataaataaagtttttaaagtgtgtatgtggggggtctgtgtcatttcttcacttcaagctgttatttcttccctgctttgcatctttgttacttccttatgtatcagtgtcctttccagagcaaccagaaggaggttataccaggatttattttgagctcagccccaactctttatcaagcaacattcttgttaactatatgtgaaacattttttcttctgaagattcttaaaaattgaatgtggctgaagttgaacatgggagcttattgctaatttagagataggaaactgaagcataaagaattaatgacttactttaattactggaattcttctgcaacatttgacaaaactaaccttgaataaggcccactgtaatacgtagctctcttaaatataacacttaggactagaagattagaaactaccaatcccaactacgtaataggaaaatgtaggatcaaaaggcccatgtatataagtactgaccactgggccataatgttgcttctcaggctatatgcagtcctttagtcagaagtcaataggcctatttattaatattttacagaccatattacctggattaccagggactatctttgctgcagagatcaagggttaagatctatgggaagatacttatttttctgaggtccttatgtcctgtcatataattaaagactcaagagaatttatgtgaaatgctttctgtatgccccaatctttagattaaaattatatagctgctcctga

SEQ ID NO: 285210 - DNA, 1537 bp, Homo sapiens
gaggctgattagaggaccctcaggtgatggtgtgactcttactccttaggtgcccagaatttaccatcatctctgaaggagttacagggaagtggtctccccaattctcccctccctccagtattgccccctctcactttagcatatattaattagcaggttgggctagagaaatcagctgctatgcgggttgattattattattatttctaatccttttccttatttgccttctactccccttaatctaatctaaaagctctgttccatgcaactggagttccttatccctctcttccccttcccttatatattgaggctatggggtaggagaaaagtgcacaacccaccaccccctttactcgtgcattaaaatttcttatttacccttttcccccttcccatttcttcccactttcatctaccttttctggcaaaaaggagccttttgctctctgtgaccctaagagcacactgcacagggaaaattgccccatccagacctggctccactcttgatctctcttgtcctcttctgctcttttcctggtgctcttttttctcggtggggtgtgggtaatagaacagccgtgggcttttggggacctttaacttttttttctctcttttgtttataaaaaacactaaacattcaattccagagaaccaaaaatcccaccttcccaccgaacactactaaggggcttgtgttctgctccataccttttctcttttctttctgtcttgttaatgcttttaaaaacaaatgagttttttatataaataaagtttttaaagtgtgtatgtggggggtctgtgtcatttcttcacttcaagctgttatttcttccctgctttgcatctttgttacttccttatgtatcagtgtcctttccagagcaaccagaaggaggttataccaggatttattttgagctcagccccaactctttatcaagcaacattcttgttaactatatgtgaaacattttttcttctgaagattcttaaaaattgaatgtggctgaagttgaacatgggagcttattgctaatttagagataggaaactgaagcataaagaattaatgacttactttaattactggaattcttctgcaacatttgacaaaactaaccttgaataaggcccactgtaatacgtagctctcttaaatataacacttaggactagaagattagaaactaccaatcccaactacgtaataggaaaatgtaggatcaaaaggcccatgtatataagtactgaccactgggccataatgttgcttctcaggctatatgcagtcctttagtcagaagtcaataggcctatttattaatattttacagaccatattacctggattaccagggactatctttgctgcagagatcaagggttaagatctatgggaagatacttatttttctgaggtccttatgtcctgtcatataattaaagactcaagagaatttatgtgaaatgctttctgtatgccccaatctttagattaaaattatatagctgctcctga

SEQ ID NO: 285211 - DNA, 4113 bp, Homo sapiens
tcctgtacctggtaaagtaagagggatccacccaggaacagcagggctgaaaccgatacgggccgttcaaacgctctgggggaaaaacaataccatgtacactgcaaagctcccttgcctttggctgggtgcaacttccattttaggtgttggatctgagggggaaaaaaaagagagagggagagagagagaaagaagagcaggaaagatcccgaaaggaggaagaggtggcgaaaaatcaactgccctgctggatttgtctttctcagcaccttggcgaagccttgggtttctttcttaaaggactgatttttagaactccacatttgagctctctccttcctgcttcctccttgctgtggtggctgggatgcttcttccatgattttttgaatctagactgggctgttctctgtgttaaaccaatcagttgcgaccttctcttaacagtgtgaagtgagggggtctctctccctccttctccttcctctgtgattcaccttcctttttaccctgccctgcggcggctccgccccttaccttcatggacgactcagaggtggagtcgaccgccagcatcttggcctctgtgaaggaacaagaggcccagtttgagaagctgacccgggcgctggaggaggaacggcgccacgtctcggcgcagctggaacgcgtccgggtctcaccacaagatgccaacccactcatggccaacggcacactcacccgccggcatcagaacggccggtttgtgggcgatgctgaccttgaaagacagaaattttcagatttgaaactcaacggaccccaggatcacagtcaccttctatatagcaccatccccaggatgcaggagccggggcagattgtggagacctacacggaggaggatcctgagggagccatgtctgtagtctctgtggagacctcagatgatgggaccactcggcgcacagagaccacggtcaagaaagtagtgaagactgtgacaacacggacagtacagccagtcgctatgggaccagacgggttgcctgtggatgcttcatcagtttctaacaactatatccagactttgggtcgtgatttccgcaagaatggcaatgggggacctggtccctatgtggggcaagctggcactgctacccttcctaggaacttccactaccctcctgatggttatagtcgccactatgaagatggttatccaggtggcagtgataactatggcagtctgtcccgggtgacccgcattgaggagcggtataggcccagcatggaaggctaccgggcacctagtagacaggatgtgtatgggccccaaccccaggttcgggtaggtgggagcagcgtggatctgcatcgctttcatccagagccttatgggctagaggatgaccagcgtagtatgggctatgatgacctggattatggtatgatgtctgattatggcactgcccgtcggactgggacaccctctgaccctcgtcggcgcctcaggagctatgaagacatgattggtgaggaggtgccatcggatcaatactactgggctcctttggcccagcatgagcgaggaagtttagcaagcttggatagcctgcgcaaaggagggcctccacctcctaattggagacagccagagctgccagaggtgatcgccatgcttggattccgcttggatgctgtcaagtccaatgcagctgcatacctgcaacacttatgctaccgcaatgacaaggtgaagactgacgtgcggaagctcaagggcatcccagtactggtgggattgttagaccatcccaaaaaggaagtgcaccttggagcctgtggagctctcaagaatatctcttttggacgtgaccaggataacaagattgccataaaaaactgtgatggtgtgcctgcccttgtgcgattgcttcgaaaggctcgtgatatggaccttactgaagttattaccggaaccctgtggaatctttcatcccatgactcaatcaaaatggagattgtggaccatgcactgcatgccttgacagatgaagtgatcattcctcattctggttgggagcgggaacctaatgaagactgtaagccacgccatattgagtgggaatcggtgctcaccaacacagctggctgccttaggaatgtaagctcagagaggagtgaagctcgccggaaacttcgggaatgtgatggtttagttgatgccctcattttcattgttcaggctgagattgggcagaaggattcagacagcaagcttgtagagaactgtgtttgccttcttcggaacttatcatatcaagttcaccgggagatcccacaggcagagcgttaccaagaggcagctcccaatgttgccaacaatactgggccacatgctgccagttgctttggggccaagaagggcaaagggaaaaaacctatagaggatccagcaaacgatacagtggatttccctaaaagaacgagtccagctcgaggctatgagctcttatttcagccagaggtggttcggatatacatctcacttcttaaggagagcaagactcctgccatcctagaagcctcagctggagctatccagaacttgtgtgctgggcgctggacgtatggtcgatacatccgctctgctctgcgtcaagagaaggctctttctgccatagctgacctcctgactaatgaacatgaacgggtggtgaaagctgcatctggagcactgagaaacctggctgtggatgctcgcaacaaagaattaattggtaaacatgctattcctaacttggtaaagaatctgccaggaggacagcagaactcctcttggaatttctctgaggacactgtcatctctattttgaacactatcaacgaggttatcgctgagaacttggaggctgccaaaaagcttcgagagacacagggtattgagaagctggtgttgatcaacaaatcagggaaccgctcagaaaaagaagttcgagcagcagcacttgtattacagacaatctggggatataaggaactgcggaagccactggaaaaagaaggatggaagaaatcagactttcaggtgaatctaaacaatgcttcccgaagccagagcagtcattcatatgatgatagtactctccctctcattgaccggaaccaaaaatcagataagaaacctgatcgggaagaaattcagatgagcaatatgggatcaaacacaaaatcactagataacaactattccacaccaaatgagagaggagaccacaatagaacactggatcgatcgggggatctaggcgacatggagccattgaagggaacaacacccttgatgcagaagatttagcaccactatctccgttccatctgggcttatatgtacttttattttttggtggtgaaattgactgatgattttcctttttcttcgctggactattgtgccaactgccaggctgcctcctgcccttacagccctaagtggctgccttctttccatcaactcccaacttcttcctgtgaagtttaattgtctcaacgcctccccctcccccattccctccatttttctcccaagaaacctgactcaattatttgcatattttgagaaactgctgcagattagttctttttgccagttttccctggaactcctggccttttgtggaggggagggatggagagaataggaatcttcactagaagccgtgggaagaattggaagttacatgctgtatatgcaatgtccagcagtctgataaactgacgattcttaatcaagatttttttcctgatggggaagggacttttattttcttttagagaggggaaagtgtgagctcttcccttattcctaatggctatttttgaagcaaagaaggccagcaacattggcacatgccacctggcaaaggaccctttaacttttttttctctcttttgtttataaaaaacactaaacattcaattccagagaaccaaaaatcccaccttcccaccgaacactactaaggggcttgtgttctgctccataccttttctcttttctttctgtcttgttaatgcttttaaaaacaaatgagttttttatataaataaagtttttaaagtgtg

SEQ ID NO: 285212 - DNA, 2885 bp, Homo sapiens
tcctgtacctggtaaagtaagagggatccacccaggaacagcagggctgaaaccgatacgggccgttcaaacgctctgggggaaaaacaataccatgtacactgcaaagctcccttgcctttggctgggtgcaacttccattttaggtgttggatctgagggggaaaaaaaagagagagggagagagagagaaagaagagcaggaaagatcccgaaaggaggaagaggtggcgaaaaatcaactgccctgctggatttgtctttctcagcaccttggcgaagccttgggtttctttcttaaaggactgatttttagaactccacatttgagctctctccttcctgcttcctccttgctgtggtggctgggatgcttcttccatgattttttgaatctagactgggctgttctctgtgttaaaccaatcagttgcgaccttctcttaacagtgtgaagtgagggggtctctctccctccttctccttcctctgtgattcaccttcctttttaccctgccctgcggcggctccgccccttaccttcatggacgactcagaggtggagtcgaccgccagcatcttggcctctgtgaaggaacaagaggcccagtttgagaagctgacccgggcgctggaggaggaacggcgccacgtctcggcgcagctggaacgcgtccgggtctcaccacaagatgccaacccactcatggccaacggcacactcacccgccggcatcagaacggccggtttgtgggcgatgctgaccttgaaagacagaaattttcagatttgaaactcaacggaccccaggatcacagtcaccttctatatagcaccatccccaggatgcaggagccggggcagattgtggagacctacacggaggaggatcctgagggagccatgtctgtagtctctgtggagacctcagatgatgggaccactcggcgcacagagaccacggtcaagaaagtagtgaagactgtgacaacacggacagtacagccagtcgctatgggaccagacgggttgcctgtggatgcttcatcagtttctaacaactatatccagactttgggtcgtgatttccgcaagaatggcaatgggggacctggtccctatgtggggcaagctggcactgctacccttcctaggaacttccactaccctcctgatggttatagtcgccactatgaagatggttatccaggtggcagtgataactatggcagtctgtcccgggtgacccgcattgaggagcggtataggcccagcatggaaggctaccgggcacctagtagacaggatgtgtatgggccccaaccccaggttcgggtaggtgggagcagcgtggatctgcatcgctttcatccagagccttatgggctagaggatgaccagcgtagtatgggctatgatgacctggattatggtatgatgtctgattatggcactgcccgtcggactgggacaccctctgaccctcgtcggcgcctcaggagctatgaagacatgattggtgaggaggtgccatcggatcaatactactgggctcctttggcccagcatgagcgaggaagtttagcaagcttggatagcctgcgcaaaggagggcctccacctcctaattggagacagccagagctgccagaggtgatcgccatgcttggattccgcttggatgctgtcaagtccaatgcagctgcatacctgcaacacttatgctaccgcaatgacaaggtgaagactgacgtgcggaagctcaagggcatcccagtactggtgggattgttagaccatcccaaaaaggaagtgcaccttggagcctgtggagctctcaagaatatctcttttggacgtgaccaggataacaagattgccataaaaaactgtgatggtgtgcctgcccttgtgcgattgcttcgaaaggctcgtgatatggaccttactgaagttattaccggaaccctgtggaatctttcatcccatgactcaatcaaaatggagattgtggaccatgcactgcatgccttgacagatgaagtgatcattcctcattctggttgggagcgggaacctaatgaagactgtaagccacgccatattgagtgggaatcggtgctcaccaacacagctggctgccttaggaatgtaagctcagagaggagtgaagctcgccggaaacttcgggaatgtgatggtttagttgatgccctcattttcattgttcaggctgagattgggcagaaggattcagacagcaagcttgtagagaactgtgtttgccttcttcggaacttatcatatcaagttcaccgggagatcccacaggcagagcgttaccaagaggcagctcccaatgttgccaacaatactgggccacatgctgccagttgctttggggccaagaagggcaaagggaaaaaacctatagaggatccagcaaacgatacagtggatttccctaaaagaacgagtccagctcgaggctatgagctcttatttcagccagaggtggttcggatatacatctcacttcttaaggagagcaagactcctgccatcctagaagcctcagctggagctatccagaacttgtgtgctgggcgctggacgtatggtcgatacatccgctctgctctgcgtcaagagaaggctctttctgccatagctgacctcctgactaatgaacatgaacgggtggtgaaagctgcatctggaacagaatgaagaaagtcagggggactgcaaaggccaatgttggtgctggcaaaaagaagtgagctggagattggatcacagccgaaggagtaaaggtgctgcaatgatgttagctgtggccactgtggatttttcgcaagaacattaataaactaaaaacttc

SEQ ID NO: 285213 - DNA, 2333 bp, Homo sapiens
tcctgtacctggtaaagtaagagggatccacccaggaacagcagggctgaaaccgatacgggccgttcaaacgctctgggggaaaaacaataccatgtacactgcaaagctcccttgcctttggctgggtgcaacttccattttaggtgttggatctgagggggaaaaaaaagagagagggagagagagagaaagaagagcaggaaagatcccgaaaggaggaagaggtggcgaaaaatcaactgccctgctggatttgtctttctcagcaccttggcgaagccttgggtttctttcttaaaggactgatttttagaactccacatttgagctctctccttcctgcttcctccttgctgtggtggctgggatgcttcttccatgattttttgaatctagactgggctgttctctgtgttaaaccaatcagttgcgaccttctcttaacagtgtgaagtgagggggtctctctccctccttctccttcctctgtgattcaccttcctttttaccctgccctgcggcggctccgccccttaccttcatggacgactcagaggtggagtcgaccgccagcatcttggcctctgtgaaggaacaagaggcccagtttgagaagctgacccgggcgctggaggaggaacggcgccacgtctcggcgcagctggaacgcgtccgggtctcaccacaagatgccaacccactcatggccaacggcacactcacccgccggcatcagaacggccggtttgtgggcgatgctgaccttgaaagacagaaattttcagatttgaaactcaacggaccccaggatcacagtcaccttctatatagcaccatccccaggatgcaggagccggggcagattgtggagacctacacggaggaggatcctgagggagccatgtctgtagtctctgtggagacctcagatgatgggaccactcggcgcacagagaccacggtcaagaaagtagtgaagactgtgacaacacggacagtacagccagtcgctatgggaccagacgggttgcctgtggatgcttcatcagtttctaacaactatatccagactttgggtcgtgatttccgcaagaatggcaatgggggacctggtccctatgtggggcaagctggcactgctacccttcctaggaacttccactaccctcctgatggttatagtcgccactatgaagatggttatccaggtggcagtgataactatggcagtctgtcccgggtgacccgcattgaggagcggtataggcccagcatggaaggctaccgggcacctagtagacaggatgtgtatgggccccaaccccaggttcgggtaggtgggagcagcgtggatctgcatcgctttcatccagagccttatgggctagaggatgaccagcgtagtatgggctatgatgacctggattatggtatgatgtctgattatggcactgcccgtcggactgggacaccctctgaccctcgtcggcgcctcaggagctatgaagacatgattggtgaggaggtgccatcggatcaatactactgggctcctttggcccagcatgagcgaggaagtttagcaagcttggatagcctgcgcaaaggagggcctccacctcctaattggagacagccagagctgccagaggtgatcgccatgcttggattccgcttggatgctgtcaagtccaatgcagctgcatacctgcaacacttatgctaccgcaatgacaaggtgaagactgacgtgcggaagctcaagggcatcccagtactggtgggattgttagaccatcccaaaaaggaagtgcaccttggagcctgtggagctctcaagaatatctcttttggacgtgaccaggataacaagattgccataaaaaactgtgatggtgtgcctgcccttgtgcgattgcttcgaaaggctcgtgatatggaccttactgaagttattaccggaaccctgtggaatctttcatcccatgactcaatcaaaatggagattgtggaccatgcactgcatgccttgacagatgaagtgatcattcctcattctggttgggagcgggaacctaatgaagactgtaagccacgccatattgagtgggaatcggtgctcaccaacacagctggctgccttaggtaacagtagggactttgagaatatgaagatgaatttttgaggactgacttaaatttcctaaaaaaaaaaaaaattaaaattctttagcctattctttagcctccattcctatctgtattgcatactgtaactccaacctttctatctttgttgctattctctcatgtataccacatgtacctat

SEQ ID NO: 285214 - DNA, 2527 bp, Homo sapiens
tcctgtacctggtaaagtaagagggatccacccaggaacagcagggctgaaaccgatacgggccgttcaaacgctctgggggaaaaacaataccatgtacactgcaaagctcccttgcctttggctgggtgcaacttccattttaggtgttggatctgagggggaaaaaaaagagagagggagagagagagaaagaagagcaggaaagatcccgaaaggaggaagaggtggcgaaaaatcaactgccctgctggatttgtctttctcagcaccttggcgaagccttgggtttctttcttaaaggactgatttttagaactccacatttgagctctctccttcctgcttcctccttgctgtggtggctgggatgcttcttccatgattttttgaatctagactgggctgttctctgtgttaaaccaatcagttgcgaccttctcttaacagtgtgaagtgagggggtctctctccctccttctccttcctctgtgattcaccttcctttttaccctgccctgcggcggctccgccccttaccttcatggacgactcagaggtggagtcgaccgccagcatcttggcctctgtgaaggaacaagaggcccagtttgagaagctgacccgggcgctggaggaggaacggcgccacgtctcggcgcagctggaacgcgtccgggtctcaccacaagatgccaacccactcatggccaacggcacactcacccgccggcatcagaacggccggtttgtgggcgatgctgaccttgaaagacagaaattttcagatttgaaactcaacggaccccaggatcacagtcaccttctatatagcaccatccccaggatgcaggagccggggcagattgtggagacctacacggaggaggatcctgagggagccatgtctgtagtctctgtggagacctcagatgatgggaccactcggcgcacagagaccacggtcaagaaagtagtgaagactgtgacaacacggacagtacagccagtcgctatgggaccagacgggttgcctgtggatgcttcatcagtttctaacaactatatccagactttgggtcgtgatttccgcaagaatggcaatgggggacctggtccctatgtggggcaagctggcactgctacccttcctaggaacttccactaccctcctgatggttatagtcgccactatgaagatggttatccaggtggcagtgataactatggcagtctgtcccgggtgacccgcattgaggagcggtataggcccagcatggaaggctaccgggcacctagtagacaggatgtgtatgggccccaaccccaggttcgggtaggtgggagcagcgtggatctgcatcgctttcatccagagccttatgggctagaggatgaccagcgtagtatgggctatgatgacctggattatggtatgatgtctgattatggcactgcccgtcggactgggacaccctctgaccctcgtcggcgcctcaggagctatgaagacatgattggtgaggaggtgccatcggatcaatactactgggctcctttggcccagcatgagcgaggaagtttagcaagcttggatagcctgcgcaaaggagggcctccacctcctaattggagacagccagagctgccagaggtgatcgccatgcttggattccgcttggatgctgtcaagtccaatgcagctgcatacctgcaacacttatgctaccgcaatgacaaggtgaagactgacgtgcggaagctcaagggcatcccagtactggtgggattgttagaccatcccaaaaaggaagtgcaccttggagcctgtggagctctcaagaatatctcttttggacgtgaccaggataacaagattgccataaaaaactgtgatggtgtgcctgcccttgtgcgattgcttcgaaaggctcgtgatatggaccttactgaagttattaccggaaccctgtggaatctttcatcccatgactcaatcaaaatggagattgtggaccatgcactgcatgccttgacagatgaagtgatcattcctcattctggttgggagcgggaacctaatgaagactgtaagccacgccatattgagtgggaatcggtgctcaccaacacagctggctgccttaggaatgtaagctcagagaggagtgaagctcgccggaaacttcgggaatgtgatggtttagttgatgccctcattttcattgttcaggctgagattgggcagaaggattcagacagcaagcttgtagagaactgtgtttgccttcttcggaacttatcatatcaagttcaccgggagatcccacaggcagagcgttaccaagaggcagctcccaatgttgccaacaatactgggccacatgctgccagttgctttggggccaagaagggcaaaggtcttggttcctgtttcttagtctttaatgtgggatagggaaaggaaggaacactttagcttaaggtacaaaatacttggcaacagtatgggagtctgcctggttat

SEQ ID NO: 285215 - DNA, 1049 bp, Homo sapiens
tcctgtacctggtaaagtaagagggatccacccaggaacagcagggctgaaaccgatacgggccgttcaaacgctctgggggaaaaacaataccatgtacactgcaaagctcccttgcctttggctgggtgcaacttccattttaggtgttggatctgagggggaaaaaaaagagagagggagagagagagaaagaagagcaggaaagatcccgaaaggaggaagaggtggcgaaaaatcaactgccctgctggatttgtctttctcagcaccttggcgaagccttgggtttctttcttaaaggactgatttttagaactccacatttgaggtgtgtggcttttgaagaaaatgtatgtactgacgggaaaaggaagataagcaagtcgaatttttgtcttacgctctctccttcctgcttcctccttgctgtggtggctgggatgcttcttccatgattttttgaatctagactgggctgttctctgtgttaaaccaatcagttgcgaccttctcttaacaggtgtgtatggaaatatgtttattaagaaggaaaaatcttactttttaagaaatatgtatttttattcctttcatgtcatagcagaaaaaaatctttttaaataccttttttctttatgggttggtgagagggtgggaattggggagaatatttatttcaaaacctgtctttcaacattgtatattttggactggcataaagtctttcatagctataagagagaaaaaaacccattgagtccaacagagtatcactaatgcctgtaaaacctcctgtttatataatggtatggagaactcttcatttttatataactatcttttattgtatagatagcacacatagaccctctagatacttggatatttatcctgagttggaacaaataaaagggtaaaaagatagtctatttaaaacaagagtgtccaatcttttggcttccctgggctacagtggaagaagaattgtgttgggccatacataatgtacgctaaggatagccaatgagctaaaaaagaattgcaaa

SEQ ID NO: 285216 - DNA, 497 bp, Homo sapiens
gagaccctgtctgccagagttccaggcctgattttcaattttgaggaaagtgctaagactaaagagtgaatggttcttttatgagtactgacacaaggactccaggccacacatatcttcttgaaagcccttttcctgtttgaaaaaaagatcgtttgtatttgatagagcaaaagaaggccacaaaatgaattgtcttcttgtgggctgtgtttcagaacggccggtttgtgggcgatgctgaccttgaaagacagaaattttcagatttgaaactcaacggaccccaggtaattctttggctcaagacctgggttgcttcattcatattttcttatttccccagcctataagagcatatttgtgtcttgtaaggtgcctggcacattgtacatactcgtcaattagtttcttttatttacgaaaacaaagaagtggagctccaaagtatatatgcagttttgttttggaatgaattttaatgaccattgatcttt

SEQ ID NO: 285217 - DNA, 314 bp, Homo sapiens
tctctttgacgttcttcagacatattgtcttgaatgctcaagagccatctgatgaattgtctcttccaggaaccctgtggaatctttcatcccatgactcaatcaaaatggagattgtggaccatgcactgcatgccttgacagatgaagtgatcattcctcattctggttgggagcgggaacctaatgaagactgtaagccacgccatattgagtgggaatcggtgctcaccaacacagctggctgccttaggtaacagtagggactttgagaatatgaagatgaatttttgaggactgacttaaatttccta

SEQ ID NO: 285218 - DNA, 5995 bp, Homo sapiens
ctgccagatcagtttgtcaccacccaggctcccttgcctttggctgggtgcaacttccattttaggtgttggatctgagggggaaaaaaaagagagagggagagagagagaaagaagagcaggaaagatcccgaaaggaggaagaggtggcgaaaaatcaactgccctgctggatttgtctttctcagcaccttggcgaagccttgggtttctttcttaaaggactgatttttagaactccacatttgagtggagtcgaccgccagcatcttggcctctgtgaaggaacaagaggcccagtttgagaagctgacccgggcgctggaggaggaacggcgccacgtctcggcgcagctggaacgcgtccgggtctcaccacaagatgccaacccactcatggccaacggcacactcacccgccggcatcagaacggccggtttgtgggcgatgctgaccttgaaagacagaaattttcagatttgaaactcaacggaccccaggatcacagtcaccttctatatagcaccatccccaggatgcaggagccggggcagattgtggagacctacacggaggaggatcctgagggagccatgtctgtagtctctgtggagacctcagatgatgggaccactcggcgcacagagaccacggtcaagaaagtagtgaagactgtgacaacacggacagtacagccagtcgctatgggaccagacgggttgcctgtggatgcttcatcagtttctaacaactatatccagactttgggtcgtgatttccgcaagaatggcaatgggggacctggtccctatgtggggcaagctggcactgctacccttcctaggaacttccactaccctcctgatggttatagtcgccactatgaagatggttatccaggtggcagtgataactatggcagtctgtcccgggtgacccgcattgaggagcggtataggcccagcatggaaggctaccgggcacctagtagacaggatgtgtatgggccccaaccccaggttcgggtaggtgggagcagcgtggatctgcatcgctttcatccagagccttatgggctagaggatgaccagcgtagtatgggctatgatgacctggattatggtatgatgtctgattatggcactgcccgtcggactgggacaccctctgaccctcgtcggcgcctcaggagctatgaagacatgattggtgaggaggtgccatcggatcaatactactgggctcctttggcccagcatgagcgaggaagtttagcaagcttggatagcctgcgcaaaggagggcctccacctcctaattggagacagccagagctgccagaggtgatcgccatgcttggattccgcttggatgctgtcaagtccaatgcagctgcatacctgcaacacttatgctaccgcaatgacaaggtgaagactgacgtgcggaagctcaagggcatcccagtactggtgggattgttagaccatcccaaaaaggaagtgcaccttggagcctgtggagctctcaagaatatctcttttggacgtgaccaggataacaagattgccataaaaaactgtgatggtgtgcctgcccttgtgcgattgcttcgaaaggctcgtgatatggaccttactgaagttattaccggaaccctgtggaatctttcatcccatgactcaatcaaaatggagattgtggaccatgcactgcatgccttgacagatgaagtgatcattcctcattctggttgggagcgggaacctaatgaagactgtaagccacgccatattgagtgggaatcggtgctcaccaacacagctggctgccttaggaatgtaagctcagagaggagtgaagctcgccggaaacttcgggaatgtgatggtttagttgatgccctcattttcattgttcaggctgagattgggcagaaggattcagacagcaagcttgtagagaactgtgtttgccttcttcggaacttatcatatcaagttcaccgggagatcccacaggcagagcgttaccaagaggcagctcccaatgttgccaacaatactgggccacatgctgccagttgctttggggccaagaagggcaaagggaaaaaacctatagaggatccagcaaacgatacagtggatttccctaaaagaacgagtccagctcgaggctatgagctcttatttcagccagaggtggttcggatatacatctcacttcttaaggagagcaagactcctgccatcctagaagcctcagctggagctatccagaacttgtgtgctgggcgctggacgtatggtcgatacatccgctctgctctgcgtcaagagaaggctctttctgccatagctgacctcctgactaatgaacatgaacgggtggtgaaagctgcatctggagcactgagaaacctggctgtggatgctcgcaacaaagaattaattggtaaacatgctattcctaacttggtaaagaatctgccaggaggacagcagaactcctcttggaatttctctgaggacactgtcatctctattttgaacactatcaacgaggttatcgctgagaacttggaggctgccaaaaagcttcgagagacacagggtattgagaagctggtgttgatcaacaaatcagggaaccgctcagaaaaagaagttcgagcagcagcacttgtattacagacaatctggggatataaggaactgcggaagccactggaaaaagaaggatggaagaaatcagactttcaggtgaatctaaacaatgcttcccgaagccagagcagtcattcatatgatgatagtactctccctctcattgaccggaaccaaaaatcagataagaaacctgatcgggaagaaattcagatgagcaatatgggatcaaacacaaaatcactagataacaactattccacaccaaatgagagaggagaccacaatagaacactggatcgatcgggggatctaggcgacatggagccattgaagggaacaacacccttgatgcaggacgaggggcaggaatctctggaggaagagttggatgtgttggttttggatgatgaggggggccaagtgtcttacccctccatgcagaagatttagcaccactatctccgttccatctgggcttatatgtacttttattttttggtggtgaaattgactgatgattttcctttttcttcgctggactattgtgccaactgccaggctgcctcctgcccttacagccctaagtggctgccttctttccatcaactcccaacttcttcctgtgaagtttaattgtctcaacgcctccccctcccccattccctccatttttctcccaagaaacctgactcaattatttgcatattttgagaaactgctgcagattagttctttttgccagttttccctggaactcctggccttttgtggaggggagggatggagagaataggaatcttcactagaagccgtgggaagaattggaagttacatgctgtatatgcaatgtccagcagtctgataaactgacgattcttaatcaagatttttttcctgatggggaagggacttttattttcttttagagaggggaaagtgtgagctcttcccttattcctaatggctatttttgaagcaaagaaggccagcaacattggcacatgccacctggcaaaggacccttgagtaagtgaaggtctcctaaaactgggattaagaaaccttgctctcctcatctccaaggcagggaccatcaagaacctacagactccatctcttctgcaagcctcatgccaaccctgggctattgctgctgccccttaaacacaggctgtccttaacccacctctcctgccctgtgatatgtctgctgagttggcctggccatttccaagaggctgtagaaaggggagaatgtcaaggaagacttttggtagagaaggagcagaaagatgtgtttttgggaagaagaagacctctaggaggagctagtaggaatgtacatgaagcaattagtctgaaactggcttccccactcccccgtttctccttttcctatccttataggcctgtcccttgcctctgccctggattggttggcaaactaaaggacttgatgtacataactcctgtcccttttcccttacaaggtggggattgcccctggctttgcctcttctttgtgcctttggcctggggtgcatctcctcccgcccttccatgtgcctttctttgcctctgcagtctcatttctcataattttgcaaattatattttgttgctttcttacctactattggccctaaatagcagaaagaagagaagtgaccgagagaacctcagattcttcattgaggattggtatagccatgatttcagtcatagcaagcttttgctcaacagcatatgggtgggattttgcaaaaatcctattctgatgaatctcaaagtaaggctggtaagagaagtgagtggtgtgactcttactccttaggtgcccagaatttaccatcatctctgaaggagttacagggaagtggtctccccaattctcccctccctccagtattgccccctctcactttagcatatattaattagcaggttgggctagagaaatcagctgctatgcgggttgattattattattatttctaatccttttccttatttgccttctactccccttaatctaatctaaaagctctgttccatgcaactggagttccttatccctctcttccccttcccttatatattgaggctatggggtaggagaaaagtgcacaacccaccaccccctttactcgtgcattaaaatttcttatttacccttttcccccttcccatttcttcccactttcatctaccttttctggcaaaaaggagccttttgctctctgtgaccctaagagcacactgcacagggaaaattgccccatccagacctggctccactcttgatctctcttgtcctcttctgctcttttcctggtgctcttttttctcggtggggtgtgggtaatagaacagccgtgggcttttggggacctttaacttttttttctctcttttgtttataaaaaacactaaacattcaattccagagaaccaaaaatcccaccttcccaccgaacactactaaggggcttgtgttctgctccataccttttctcttttctttctgtcttgttaatgcttttaaaaacaaatgagttttttatataaataaagtttttaaagtgtgtatgtggggggtctgtgtcatttcttcacttcaagctgttatttcttccctgctttgcatctttgttacttccttatgtatcagtgtcctttccagagcaaccagaaggaggttataccaggatttattttgagctcagccccaactctttatcaagcaacattcttgttaactatatgtgaaacattttttcttctgaagattcttaaaaattgaatgtggctgaagttgaacatgggagcttattgctaatttagagataggaaactgaagcataaagaattaatgacttactttaattactggaattcttctgcaacatttgacaaaactaaccttgaataaggcccactgtaatacgtagctctcttaaatataacacttaggactagaagattagaaactaccaatcccaactacgtaataggaaaatgtaggatcaaaaggcccatgtatataagtactgaccactgggccataatgttgcttctcaggctatatgcagtcctttagtcagaagtcaataggcctatttattaatattttacagaccatattacctggattaccagggactatctttgctgcagagatcaagggttaagatctatgggaagatacttatttttctgaggtccttatgtcctgtcatataattaaagactcaagagaatttatgtgaaatgctttctgtatgccccaatctttagattaaaattatatagctgctcctga

SEQ ID NO: 285219 - DNA, 6137 bp, Homo sapiens
ctgccagatcagtttgtcaccacccaggctcccttgcctttggctgggtgcaacttccattttaggtgttggatctgagggggaaaaaaaagagagagggagagagagagaaagaagagcaggaaagatcccgaaaggaggaagaggtggcgaaaaatcaactgccctgctggatttgtctttctcagcaccttggcgaagccttgggtttctttcttaaaggactgatttttagaactccacatttgagctctctccttcctgcttcctccttgctgtggtggctgggatgcttcttccatgattttttgaatctagactgggctgttctctgtgttaaaccaatcagttgcgaccttctcttaacagtgtgaagtgagggggtctctctccctccttctccttcctctgtgattcaccttcctttttaccctgccctgcggcggctccgccccttaccttcatggacgactcagaggtggagtcgaccgccagcatcttggcctctgtgaaggaacaagaggcccagtttgagaagctgacccgggcgctggaggaggaacggcgccacgtctcggcgcagctggaacgcgtccgggtctcaccacaagatgccaacccactcatggccaacggcacactcacccgccggcatcagaacggccggtttgtgggcgatgctgaccttgaaagacagaaattttcagatttgaaactcaacggaccccaggatcacagtcaccttctatatagcaccatccccaggatgcaggagccggggcagattgtggagacctacacggaggaggatcctgagggagccatgtctgtagtctctgtggagacctcagatgatgggaccactcggcgcacagagaccacggtcaagaaagtagtgaagactgtgacaacacggacagtacagccagtcgctatgggaccagacgggttgcctgtggatgcttcatcagtttctaacaactatatccagactttgggtcgtgatttccgcaagaatggcaatgggggacctggtccctatgtggggcaagctggcactgctacccttcctaggaacttccactaccctcctgatggttatagtcgccactatgaagatggttatccaggtggcagtgataactatggcagtctgtcccgggtgacccgcattgaggagcggtataggcccagcatggaaggctaccgggcacctagtagacaggatgtgtatgggccccaaccccaggttcgggtaggtgggagcagcgtggatctgcatcgctttcatccagagccttatgggctagaggatgaccagcgtagtatgggctatgatgacctggattatggtatgatgtctgattatggcactgcccgtcggactgggacaccctctgaccctcgtcggcgcctcaggagctatgaagacatgattggtgaggaggtgccatcggatcaatactactgggctcctttggcccagcatgagcgaggaagtttagcaagcttggatagcctgcgcaaaggagggcctccacctcctaattggagacagccagagctgccagaggtgatcgccatgcttggattccgcttggatgctgtcaagtccaatgcagctgcatacctgcaacacttatgctaccgcaatgacaaggtgaagactgacgtgcggaagctcaagggcatcccagtactggtgggattgttagaccatcccaaaaaggaagtgcaccttggagcctgtggagctctcaagaatatctcttttggacgtgaccaggataacaagattgccataaaaaactgtgatggtgtgcctgcccttgtgcgattgcttcgaaaggctcgtgatatggaccttactgaagttattaccggaaccctgtggaatctttcatcccatgactcaatcaaaatggagattgtggaccatgcactgcatgccttgacagatgaagtgatcattcctcattctggttgggagcgggaacctaatgaagactgtaagccacgccatattgagtgggaatcggtgctcaccaacacagctggctgccttaggaatgtaagctcagagaggagtgaagctcgccggaaacttcgggaatgtgatggtttagttgatgccctcattttcattgttcaggctgagattgggcagaaggattcagacagcaagcttgtagagaactgtgtttgccttcttcggaacttatcatatcaagttcaccgggagatcccacaggcagagcgttaccaagaggcagctcccaatgttgccaacaatactgggccacatgctgccagttgctttggggccaagaagggcaaagggaaaaaacctatagaggatccagcaaacgatacagtggatttccctaaaagaacgagtccagctcgaggctatgagctcttatttcagccagaggtggttcggatatacatctcacttcttaaggagagcaagactcctgccatcctagaagcctcagctggagctatccagaacttgtgtgctgggcgctggacgtatggtcgatacatccgctctgctctgcgtcaagagaaggctctttctgccatagctgacctcctgactaatgaacatgaacgggtggtgaaagctgcatctggagcactgagaaacctggctgtggatgctcgcaacaaagaattaattggtaaacatgctattcctaacttggtaaagaatctgccaggaggacagcagaactcctcttggaatttctctgaggacactgtcatctctattttgaacactatcaacgaggttatcgctgagaacttggaggctgccaaaaagcttcgagagacacagggtattgagaagctggtgttgatcaacaaatcagggaaccgctcagaaaaagaagttcgagcagcagcacttgtattacagacaatctggggatataaggaactgcggaagccactggaaaaagaaggatggaagaaatcagactttcaggtgaatctaaacaatgcttcccgaagccagagcagtcattcatatgatgatagtactctccctctcattgaccggaaccaaaaatcagataagaaacctgatcgggaagaaattcagatgagcaatatgggatcaaacacaaaatcactagataacaactattccacaccaaatgagagaggagaccacaatagaacactggatcgatcgggggatctaggcgacatggagccattgaagggaacaacacccttgatgcagaagatttagcaccactatctccgttccatctgggcttatatgtacttttattttttggtggtgaaattgactgatgattttcctttttcttcgctggactattgtgccaactgccaggctgcctcctgcccttacagccctaagtggctgccttctttccatcaactcccaacttcttcctgtgaagtttaattgtctcaacgcctccccctcccccattccctccatttttctcccaagaaacctgactcaattatttgcatattttgagaaactgctgcagattagttctttttgccagttttccctggaactcctggccttttgtggaggggagggatggagagaataggaatcttcactagaagccgtgggaagaattggaagttacatgctgtatatgcaatgtccagcagtctgataaactgacgattcttaatcaagatttttttcctgatggggaagggacttttattttcttttagagaggggaaagtgtgagctcttcccttattcctaatggctatttttgaagcaaagaaggccagcaacattggcacatgccacctggcaaaggacccttgagtaagtgaaggtctcctaaaactgggattaagaaaccttgctctcctcatctccaaggcagggaccatcaagaacctacagactccatctcttctgcaagcctcatgccaaccctgggctattgctgctgccccttaaacacaggctgtccttaacccacctctcctgccctgtgatatgtctgctgagttggcctggccatttccaagaggctgtagaaaggggagaatgtcaaggaagacttttggtagagaaggagcagaaagatgtgtttttgggaagaagaagacctctaggaggagctagtaggaatgtacatgaagcaattagtctgaaactggcttccccactcccccgtttctccttttcctatccttataggcctgtcccttgcctctgccctggattggttggcaaactaaaggacttgatgtacataactcctgtcccttttcccttacaaggtggggattgcccctggctttgcctcttctttgtgcctttggcctggggtgcatctcctcccgcccttccatgtgcctttctttgcctctgcagtctcatttctcataattttgcaaattatattttgttgctttcttacctactattggccctaaatagcagaaagaagagaagtgaccgagagaacctcagattcttcattgaggattggtatagccatgatttcagtcatagcaagcttttgctcaacagcatatgggtgggattttgcaaaaatcctattctgatgaatctcaaagtaaggctggtaagagaagtgagtggtgtgactcttactccttaggtgcccagaatttaccatcatctctgaaggagttacagggaagtggtctccccaattctcccctccctccagtattgccccctctcactttagcatatattaattagcaggttgggctagagaaatcagctgctatgcgggttgattattattattatttctaatccttttccttatttgccttctactccccttaatctaatctaaaagctctgttccatgcaactggagttccttatccctctcttccccttcccttatatattgaggctatggggtaggagaaaagtgcacaacccaccaccccctttactcgtgcattaaaatttcttatttacccttttcccccttcccatttcttcccactttcatctaccttttctggcaaaaaggagccttttgctctctgtgaccctaagagcacactgcacagggaaaattgccccatccagacctggctccactcttgatctctcttgtcctcttctgctcttttcctggtgctcttttttctcggtggggtgtgggtaatagaacagccgtgggcttttggggacctttaacttttttttctctcttttgtttataaaaaacactaaacattcaattccagagaaccaaaaatcccaccttcccaccgaacactactaaggggcttgtgttctgctccataccttttctcttttctttctgtcttgttaatgcttttaaaaacaaatgagttttttatataaataaagtttttaaagtgtgtatgtggggggtctgtgtcatttcttcacttcaagctgttatttcttccctgctttgcatctttgttacttccttatgtatcagtgtcctttccagagcaaccagaaggaggttataccaggatttattttgagctcagccccaactctttatcaagcaacattcttgttaactatatgtgaaacattttttcttctgaagattcttaaaaattgaatgtggctgaagttgaacatgggagcttattgctaatttagagataggaaactgaagcataaagaattaatgacttactttaattactggaattcttctgcaacatttgacaaaactaaccttgaataaggcccactgtaatacgtagctctcttaaatataacacttaggactagaagattagaaactaccaatcccaactacgtaataggaaaatgtaggatcaaaaggcccatgtatataagtactgaccactgggccataatgttgcttctcaggctatatgcagtcctttagtcagaagtcaataggcctatttattaatattttacagaccatattacctggattaccagggactatctttgctgcagagatcaagggttaagatctatgggaagatacttatttttctgaggtccttatgtcctgtcatataattaaagactcaagagaatttatgtgaaatgctttctgtatgccccaatctttagattaaaattatatagctgctcctga

SEQ ID NO: 285220 - DNA, 6297 bp, Homo sapiens
ctgccagatcagtttgtcaccacccaggctcccttgcctttggctgggtgcaacttccattttaggtgttggatctgagggggaaaaaaaagagagagggagagagagagaaagaagagcaggaaagatcccgaaaggaggaagaggtggcgaaaaatcaactgccctgctggatttgtctttctcagcaccttggcgaagccttgggtttctttcttaaaggactgatttttagaactccacatttgaggtgtgtggcttttgaagaaaatgtatgtactgacgggaaaaggaagataagcaagtcgaatttttgtcttacgctctctccttcctgcttcctccttgctgtggtggctgggatgcttcttccatgattttttgaatctagactgggctgttctctgtgttaaaccaatcagttgcgaccttctcttaacagtgtgaagtgagggggtctctctccctccttctccttcctctgtgattcaccttcctttttaccctgccctgcggcggctccgccccttaccttcatggacgactcagaggtggagtcgaccgccagcatcttggcctctgtgaaggaacaagaggcccagtttgagaagctgacccgggcgctggaggaggaacggcgccacgtctcggcgcagctggaacgcgtccgggtctcaccacaagatgccaacccactcatggccaacggcacactcacccgccggcatcagaacggccggtttgtgggcgatgctgaccttgaaagacagaaattttcagatttgaaactcaacggaccccaggatcacagtcaccttctatatagcaccatccccaggatgcaggagccggggcagattgtggagacctacacggaggaggatcctgagggagccatgtctgtagtctctgtggagacctcagatgatgggaccactcggcgcacagagaccacggtcaagaaagtagtgaagactgtgacaacacggacagtacagccagtcgctatgggaccagacgggttgcctgtggatgcttcatcagtttctaacaactatatccagactttgggtcgtgatttccgcaagaatggcaatgggggacctggtccctatgtggggcaagctggcactgctacccttcctaggaacttccactaccctcctgatggttatagtcgccactatgaagatggttatccaggtggcagtgataactatggcagtctgtcccgggtgacccgcattgaggagcggtataggcccagcatggaaggctaccgggcacctagtagacaggatgtgtatgggccccaaccccaggttcgggtaggtgggagcagcgtggatctgcatcgctttcatccagagccttatgggctagaggatgaccagcgtagtatgggctatgatgacctggattatggtatgatgtctgattatggcactgcccgtcggactgggacaccctctgaccctcgtcggcgcctcaggagctatgaagacatgattggtgaggaggtgccatcggatcaatactactgggctcctttggcccagcatgagcgaggaagtttagcaagcttggatagcctgcgcaaaggagggcctccacctcctaattggagacagccagagctgccagaggtgatcgccatgcttggattccgcttggatgctgtcaagtccaatgcagctgcatacctgcaacacttatgctaccgcaatgacaaggtgaagactgacgtgcggaagctcaagggcatcccagtactggtgggattgttagaccatcccaaaaaggaagtgcaccttggagcctgtggagctctcaagaatatctcttttggacgtgaccaggataacaagattgccataaaaaactgtgatggtgtgcctgcccttgtgcgattgcttcgaaaggctcgtgatatggaccttactgaagttattaccggaaccctgtggaatctttcatcccatgactcaatcaaaatggagattgtggaccatgcactgcatgccttgacagatgaagtgatcattcctcattctggttgggagcgggaacctaatgaagactgtaagccacgccatattgagtgggaatcggtgctcaccaacacagctggctgccttaggaatgtaagctcagagaggagtgaagctcgccggaaacttcgggaatgtgatggtttagttgatgccctcattttcattgttcaggctgagattgggcagaaggattcagacagcaagcttgtagagaactgtgtttgccttcttcggaacttatcatatcaagttcaccgggagatcccacaggcagagcgttaccaagaggcagctcccaatgttgccaacaatactgggccacatgctgccagttgctttggggccaagaagggcaaagggaaaaaacctatagaggatccagcaaacgatacagtggatttccctaaaagaacgagtccagctcgaggctatgagctcttatttcagccagaggtggttcggatatacatctcacttcttaaggagagcaagactcctgccatcctagaagcctcagctggagctatccagaacttgtgtgctgggcgctggacgtatggtcgatacatccgctctgctctgcgtcaagagaaggctctttctgccatagctgacctcctgactaatgaacatgaacgggtggtgaaagctgcatctggagcactgagaaacctggctgtggatgctcgcaacaaagaattaattggtaaacatgctattcctaacttggtaaagaatctgccaggaggacagcagaactcctcttggaatttctctgaggacactgtcatctctattttgaacactatcaacgaggttatcgctgagaacttggaggctgccaaaaagcttcgagagacacagggtattgagaagctggtgttgatcaacaaatcagggaaccgctcagaaaaagaagttcgagcagcagcacttgtattacagacaatctggggatataaggaactgcggaagccactggaaaaagaaggatggaagaaatcagactttcaggtgaatctaaacaatgcttcccgaagccagagcagtcattcatatgatgatagtactctccctctcattgaccggaaccaaaaatcagataagaaacctgatcgggaagaaattcagatgagcaatatgggatcaaacacaaaatcactagataacaactattccacaccaaatgagagaggagaccacaatagaacactggatcgatcgggggatctaggcgacatggagccattgaagggaacaacacccttgatgcaggacgaggggcaggaatctctggaggaagagttggatgtgttggttttggatgatgaggggggccaagtgtcttacccctccatgcagaagatttagcaccactatctccgttccatctgggcttatatgtacttttattttttggtggtgaaattgactgatgattttcctttttcttcgctggactattgtgccaactgccaggctgcctcctgcccttacagccctaagtggctgccttctttccatcaactcccaacttcttcctgtgaagtttaattgtctcaacgcctccccctcccccattccctccatttttctcccaagaaacctgactcaattatttgcatattttgagaaactgctgcagattagttctttttgccagttttccctggaactcctggccttttgtggaggggagggatggagagaataggaatcttcactagaagccgtgggaagaattggaagttacatgctgtatatgcaatgtccagcagtctgataaactgacgattcttaatcaagatttttttcctgatggggaagggacttttattttcttttagagaggggaaagtgtgagctcttcccttattcctaatggctatttttgaagcaaagaaggccagcaacattggcacatgccacctggcaaaggacccttgagtaagtgaaggtctcctaaaactgggattaagaaaccttgctctcctcatctccaaggcagggaccatcaagaacctacagactccatctcttctgcaagcctcatgccaaccctgggctattgctgctgccccttaaacacaggctgtccttaacccacctctcctgccctgtgatatgtctgctgagttggcctggccatttccaagaggctgtagaaaggggagaatgtcaaggaagacttttggtagagaaggagcagaaagatgtgtttttgggaagaagaagacctctaggaggagctagtaggaatgtacatgaagcaattagtctgaaactggcttccccactcccccgtttctccttttcctatccttataggcctgtcccttgcctctgccctggattggttggcaaactaaaggacttgatgtacataactcctgtcccttttcccttacaaggtggggattgcccctggctttgcctcttctttgtgcctttggcctggggtgcatctcctcccgcccttccatgtgcctttctttgcctctgcagtctcatttctcataattttgcaaattatattttgttgctttcttacctactattggccctaaatagcagaaagaagagaagtgaccgagagaacctcagattcttcattgaggattggtatagccatgatttcagtcatagcaagcttttgctcaacagcatatgggtgggattttgcaaaaatcctattctgatgaatctcaaagtaaggctggtaagagaagtgagtggtgtgactcttactccttaggtgcccagaatttaccatcatctctgaaggagttacagggaagtggtctccccaattctcccctccctccagtattgccccctctcactttagcatatattaattagcaggttgggctagagaaatcagctgctatgcgggttgattattattattatttctaatccttttccttatttgccttctactccccttaatctaatctaaaagctctgttccatgcaactggagttccttatccctctcttccccttcccttatatattgaggctatggggtaggagaaaagtgcacaacccaccaccccctttactcgtgcattaaaatttcttatttacccttttcccccttcccatttcttcccactttcatctaccttttctggcaaaaaggagccttttgctctctgtgaccctaagagcacactgcacagggaaaattgccccatccagacctggctccactcttgatctctcttgtcctcttctgctcttttcctggtgctcttttttctcggtggggtgtgggtaatagaacagccgtgggcttttggggacctttaacttttttttctctcttttgtttataaaaaacactaaacattcaattccagagaaccaaaaatcccaccttcccaccgaacactactaaggggcttgtgttctgctccataccttttctcttttctttctgtcttgttaatgcttttaaaaacaaatgagttttttatataaataaagtttttaaagtgtgtatgtggggggtctgtgtcatttcttcacttcaagctgttatttcttccctgctttgcatctttgttacttccttatgtatcagtgtcctttccagagcaaccagaaggaggttataccaggatttattttgagctcagccccaactctttatcaagcaacattcttgttaactatatgtgaaacattttttcttctgaagattcttaaaaattgaatgtggctgaagttgaacatgggagcttattgctaatttagagataggaaactgaagcataaagaattaatgacttactttaattactggaattcttctgcaacatttgacaaaactaaccttgaataaggcccactgtaatacgtagctctcttaaatataacacttaggactagaagattagaaactaccaatcccaactacgtaataggaaaatgtaggatcaaaaggcccatgtatataagtactgaccactgggccataatgttgcttctcaggctatatgcagtcctttagtcagaagtcaataggcctatttattaatattttacagaccatattacctggattaccagggactatctttgctgcagagatcaagggttaagatctatgggaagatacttatttttctgaggtccttatgtcctgtcatataattaaagactcaagagaatttatgtgaaatgctttctgtatgccccaatctttagattaaaattatatagctgctcctga

SEQ ID NO: 285221 - DNA, 5751 bp, Homo sapiens
ctgccagatcagtttgtcaccacccaggctcccttgcctttggctgggtgcaacttccattttaggtgttggatctgagggggaaaaaaaagagagagggagagagagagaaagaagagcaggaaagatcccgaaaggaggaagaggtggcgaaaaatcaactgccctgctggatttgtctttctcagcaccttggcgaagccttgggtttctttcttaaaggactgatttttagaactccacatttgaggtgtgtggcttttgaagaaaataacggccggtttgtgggcgatgctgaccttgaaagacagaaattttcagatttgaaactcaacggaccccaggatcacagtcaccttctatatagcaccatccccaggatgcaggagccggggcagattgtggagacctacacggaggaggatcctgagggagccatgtctgtagtctctgtggagacctcagatgatgggaccactcggcgcacagagaccacggtcaagaaagtagtgaagactgtgacaacacggacagtacagccagtcgctatgggaccagacgggttgcctgtggatgcttcatcagtttctaacaactatatccagactttgggtcgtgatttccgcaagaatggcaatgggggacctggtccctatgtggggcaagctggcactgctacccttcctaggaacttccactaccctcctgatggttatagtcgccactatgaagatggttatccaggtggcagtgataactatggcagtctgtcccgggtgacccgcattgaggagcggtataggcccagcatggaaggctaccgggcacctagtagacaggatgtgtatgggccccaaccccaggttcgggtaggtgggagcagcgtggatctgcatcgctttcatccagagccttatgggctagaggatgaccagcgtagtatgggctatgatgacctggattatggtatgatgtctgattatggcactgcccgtcggactgggacaccctctgaccctcgtcggcgcctcaggagctatgaagacatgattggtgaggaggtgccatcggatcaatactactgggctcctttggcccagcatgagcgaggaagtttagcaagcttggatagcctgcgcaaaggagggcctccacctcctaattggagacagccagagctgccagaggtgatcgccatgcttggattccgcttggatgctgtcaagtccaatgcagctgcatacctgcaacacttatgctaccgcaatgacaaggtgaagactgacgtgcggaagctcaagggcatcccagtactggtgggattgttagaccatcccaaaaaggaagtgcaccttggagcctgtggagctctcaagaatatctcttttggacgtgaccaggataacaagattgccataaaaaactgtgatggtgtgcctgcccttgtgcgattgcttcgaaaggctcgtgatatggaccttactgaagttattaccggaaccctgtggaatctttcatcccatgactcaatcaaaatggagattgtggaccatgcactgcatgccttgacagatgaagtgatcattcctcattctggttgggagcgggaacctaatgaagactgtaagccacgccatattgagtgggaatcggtgctcaccaacacagctggctgccttaggaatgtaagctcagagaggagtgaagctcgccggaaacttcgggaatgtgatggtttagttgatgccctcattttcattgttcaggctgagattgggcagaaggattcagacagcaagcttgtagagaactgtgtttgccttcttcggaacttatcatatcaagttcaccgggagatcccacaggcagagcgttaccaagaggcagctcccaatgttgccaacaatactgggccacatgctgccagttgctttggggccaagaagggcaaagggaaaaaacctatagaggatccagcaaacgatacagtggatttccctaaaagaacgagtccagctcgaggctatgagctcttatttcagccagaggtggttcggatatacatctcacttcttaaggagagcaagactcctgccatcctagaagcctcagctggagctatccagaacttgtgtgctgggcgctggacgtatggtcgatacatccgctctgctctgcgtcaagagaaggctctttctgccatagctgacctcctgactaatgaacatgaacgggtggtgaaagctgcatctggagcactgagaaacctggctgtggatgctcgcaacaaagaattaattggtaaacatgctattcctaacttggtaaagaatctgccaggaggacagcagaactcctcttggaatttctctgaggacactgtcatctctattttgaacactatcaacgaggttatcgctgagaacttggaggctgccaaaaagcttcgagagacacagggtattgagaagctggtgttgatcaacaaatcagggaaccgctcagaaaaagaagttcgagcagcagcacttgtattacagacaatctggggatataaggaactgcggaagccactggaaaaagaaggatggaagaaatcagactttcaggtgaatctaaacaatgcttcccgaagccagagcagtcattcatatgatgatagtactctccctctcattgaccggaaccaaaaatcagataagaaacctgatcgggaagaaattcagatgagcaatatgggatcaaacacaaaatcactagataacaactattccacaccaaatgagagaggagaccacaatagaacactggatcgatcgggggatctaggcgacatggagccattgaagggaacaacacccttgatgcagaagatttagcaccactatctccgttccatctgggcttatatgtacttttattttttggtggtgaaattgactgatgattttcctttttcttcgctggactattgtgccaactgccaggctgcctcctgcccttacagccctaagtggctgccttctttccatcaactcccaacttcttcctgtgaagtttaattgtctcaacgcctccccctcccccattccctccatttttctcccaagaaacctgactcaattatttgcatattttgagaaactgctgcagattagttctttttgccagttttccctggaactcctggccttttgtggaggggagggatggagagaataggaatcttcactagaagccgtgggaagaattggaagttacatgctgtatatgcaatgtccagcagtctgataaactgacgattcttaatcaagatttttttcctgatggggaagggacttttattttcttttagagaggggaaagtgtgagctcttcccttattcctaatggctatttttgaagcaaagaaggccagcaacattggcacatgccacctggcaaaggacccttgagtaagtgaaggtctcctaaaactgggattaagaaaccttgctctcctcatctccaaggcagggaccatcaagaacctacagactccatctcttctgcaagcctcatgccaaccctgggctattgctgctgccccttaaacacaggctgtccttaacccacctctcctgccctgtgatatgtctgctgagttggcctggccatttccaagaggctgtagaaaggggagaatgtcaaggaagacttttggtagagaaggagcagaaagatgtgtttttgggaagaagaagacctctaggaggagctagtaggaatgtacatgaagcaattagtctgaaactggcttccccactcccccgtttctccttttcctatccttataggcctgtcccttgcctctgccctggattggttggcaaactaaaggacttgatgtacataactcctgtcccttttcccttacaaggtggggattgcccctggctttgcctcttctttgtgcctttggcctggggtgcatctcctcccgcccttccatgtgcctttctttgcctctgcagtctcatttctcataattttgcaaattatattttgttgctttcttacctactattggccctaaatagcagaaagaagagaagtgaccgagagaacctcagattcttcattgaggattggtatagccatgatttcagtcatagcaagcttttgctcaacagcatatgggtgggattttgcaaaaatcctattctgatgaatctcaaagtaaggctggtaagagaagtgagtggtgtgactcttactccttaggtgcccagaatttaccatcatctctgaaggagttacagggaagtggtctccccaattctcccctccctccagtattgccccctctcactttagcatatattaattagcaggttgggctagagaaatcagctgctatgcgggttgattattattattatttctaatccttttccttatttgccttctactccccttaatctaatctaaaagctctgttccatgcaactggagttccttatccctctcttccccttcccttatatattgaggctatggggtaggagaaaagtgcacaacccaccaccccctttactcgtgcattaaaatttcttatttacccttttcccccttcccatttcttcccactttcatctaccttttctggcaaaaaggagccttttgctctctgtgaccctaagagcacactgcacagggaaaattgccccatccagacctggctccactcttgatctctcttgtcctcttctgctcttttcctggtgctcttttttctcggtggggtgtgggtaatagaacagccgtgggcttttggggacctttaacttttttttctctcttttgtttataaaaaacactaaacattcaattccagagaaccaaaaatcccaccttcccaccgaacactactaaggggcttgtgttctgctccataccttttctcttttctttctgtcttgttaatgcttttaaaaacaaatgagttttttatataaataaagtttttaaagtgtgtatgtggggggtctgtgtcatttcttcacttcaagctgttatttcttccctgctttgcatctttgttacttccttatgtatcagtgtcctttccagagcaaccagaaggaggttataccaggatttattttgagctcagccccaactctttatcaagcaacattcttgttaactatatgtgaaacattttttcttctgaagattcttaaaaattgaatgtggctgaagttgaacatgggagcttattgctaatttagagataggaaactgaagcataaagaattaatgacttactttaattactggaattcttctgcaacatttgacaaaactaaccttgaataaggcccactgtaatacgtagctctcttaaatataacacttaggactagaagattagaaactaccaatcccaactacgtaataggaaaatgtaggatcaaaaggcccatgtatataagtactgaccactgggccataatgttgcttctcaggctatatgcagtcctttagtcagaagtcaataggcctatttattaatattttacagaccatattacctggattaccagggactatctttgctgcagagatcaagggttaagatctatgggaagatacttatttttctgaggtccttatgtcctgtcatataattaaagactcaagagaatttatgtgaaatgctttctgtatgccccaatctttagattaaaattatatagctgctcctga

SEQ ID NO: 285222 - DNA, 5753 bp, Homo sapiens
ctgccagatcagtttgtcaccacccaggctcccttgcctttggctgggtgcaacttccattttaggtgttggatctgagggggaaaaaaaagagagagggagagagagagaaagaagagcaggaaagatcccgaaaggaggaagaggtggcgaaaaatcaactgccctgctggatttgtctttctcagcaccttggcgaagccttgggtttctttcttaaaggactgatttttagaactccacatttgagaacggccggtttgtgggcgatgctgaccttgaaagacagaaattttcagatttgaaactcaacggaccccaggatcacagtcaccttctatatagcaccatccccaggatgcaggagccggggcagattgtggagacctacacggaggaggatcctgagggagccatgtctgtagtctctgtggagacctcagatgatgggaccactcggcgcacagagaccacggtcaagaaagtagtgaagactgtgacaacacggacagtacagccagtcgctatgggaccagacgggttgcctgtggatgcttcatcagtttctaacaactatatccagactttgggtcgtgatttccgcaagaatggcaatgggggacctggtccctatgtggggcaagctggcactgctacccttcctaggaacttccactaccctcctgatggttatagtcgccactatgaagatggttatccaggtggcagtgataactatggcagtctgtcccgggtgacccgcattgaggagcggtataggcccagcatggaaggctaccgggcacctagtagacaggatgtgtatgggccccaaccccaggttcgggtaggtgggagcagcgtggatctgcatcgctttcatccagagccttatgggctagaggatgaccagcgtagtatgggctatgatgacctggattatggtatgatgtctgattatggcactgcccgtcggactgggacaccctctgaccctcgtcggcgcctcaggagctatgaagacatgattggtgaggaggtgccatcggatcaatactactgggctcctttggcccagcatgagcgaggaagtttagcaagcttggatagcctgcgcaaaggagggcctccacctcctaattggagacagccagagctgccagaggtgatcgccatgcttggattccgcttggatgctgtcaagtccaatgcagctgcatacctgcaacacttatgctaccgcaatgacaaggtgaagactgacgtgcggaagctcaagggcatcccagtactggtgggattgttagaccatcccaaaaaggaagtgcaccttggagcctgtggagctctcaagaatatctcttttggacgtgaccaggataacaagattgccataaaaaactgtgatggtgtgcctgcccttgtgcgattgcttcgaaaggctcgtgatatggaccttactgaagttattaccggaaccctgtggaatctttcatcccatgactcaatcaaaatggagattgtggaccatgcactgcatgccttgacagatgaagtgatcattcctcattctggttgggagcgggaacctaatgaagactgtaagccacgccatattgagtgggaatcggtgctcaccaacacagctggctgccttaggaatgtaagctcagagaggagtgaagctcgccggaaacttcgggaatgtgatggtttagttgatgccctcattttcattgttcaggctgagattgggcagaaggattcagacagcaagcttgtagagaactgtgtttgccttcttcggaacttatcatatcaagttcaccgggagatcccacaggcagagcgttaccaagaggcagctcccaatgttgccaacaatactgggccacatgctgccagttgctttggggccaagaagggcaaagggaaaaaacctatagaggatccagcaaacgatacagtggatttccctaaaagaacgagtccagctcgaggctatgagctcttatttcagccagaggtggttcggatatacatctcacttcttaaggagagcaagactcctgccatcctagaagcctcagctggagctatccagaacttgtgtgctgggcgctggacgtatggtcgatacatccgctctgctctgcgtcaagagaaggctctttctgccatagctgacctcctgactaatgaacatgaacgggtggtgaaagctgcatctggagcactgagaaacctggctgtggatgctcgcaacaaagaattaattggtaaacatgctattcctaacttggtaaagaatctgccaggaggacagcagaactcctcttggaatttctctgaggacactgtcatctctattttgaacactatcaacgaggttatcgctgagaacttggaggctgccaaaaagcttcgagagacacagggtattgagaagctggtgttgatcaacaaatcagggaaccgctcagaaaaagaagttcgagcagcagcacttgtattacagacaatctggggatataaggaactgcggaagccactggaaaaagaaggatggaagaaatcagactttcaggtgaatctaaacaatgcttcccgaagccagagcagtcattcatatgatgatagtactctccctctcattgaccggaaccaaaaatcagataacaactattccacaccaaatgagagaggagaccacaatagaacactggatcgatcgggggatctaggcgacatggagccattgaagggaacaacacccttgatgcaggacgaggggcaggaatctctggaggaagagttggatgtgttggttttggatgatgaggggggccaagtgtcttacccctccatgcagaagatttagcaccactatctccgttccatctgggcttatatgtacttttattttttggtggtgaaattgactgatgattttcctttttcttcgctggactattgtgccaactgccaggctgcctcctgcccttacagccctaagtggctgccttctttccatcaactcccaacttcttcctgtgaagtttaattgtctcaacgcctccccctcccccattccctccatttttctcccaagaaacctgactcaattatttgcatattttgagaaactgctgcagattagttctttttgccagttttccctggaactcctggccttttgtggaggggagggatggagagaataggaatcttcactagaagccgtgggaagaattggaagttacatgctgtatatgcaatgtccagcagtctgataaactgacgattcttaatcaagatttttttcctgatggggaagggacttttattttcttttagagaggggaaagtgtgagctcttcccttattcctaatggctatttttgaagcaaagaaggccagcaacattggcacatgccacctggcaaaggacccttgagtaagtgaaggtctcctaaaactgggattaagaaaccttgctctcctcatctccaaggcagggaccatcaagaacctacagactccatctcttctgcaagcctcatgccaaccctgggctattgctgctgccccttaaacacaggctgtccttaacccacctctcctgccctgtgatatgtctgctgagttggcctggccatttccaagaggctgtagaaaggggagaatgtcaaggaagacttttggtagagaaggagcagaaagatgtgtttttgggaagaagaagacctctaggaggagctagtaggaatgtacatgaagcaattagtctgaaactggcttccccactcccccgtttctccttttcctatccttataggcctgtcccttgcctctgccctggattggttggcaaactaaaggacttgatgtacataactcctgtcccttttcccttacaaggtggggattgcccctggctttgcctcttctttgtgcctttggcctggggtgcatctcctcccgcccttccatgtgcctttctttgcctctgcagtctcatttctcataattttgcaaattatattttgttgctttcttacctactattggccctaaatagcagaaagaagagaagtgaccgagagaacctcagattcttcattgaggattggtatagccatgatttcagtcatagcaagcttttgctcaacagcatatgggtgggattttgcaaaaatcctattctgatgaatctcaaagtaaggctggtaagagaagtgagtggtgtgactcttactccttaggtgcccagaatttaccatcatctctgaaggagttacagggaagtggtctccccaattctcccctccctccagtattgccccctctcactttagcatatattaattagcaggttgggctagagaaatcagctgctatgcgggttgattattattattatttctaatccttttccttatttgccttctactccccttaatctaatctaaaagctctgttccatgcaactggagttccttatccctctcttccccttcccttatatattgaggctatggggtaggagaaaagtgcacaacccaccaccccctttactcgtgcattaaaatttcttatttacccttttcccccttcccatttcttcccactttcatctaccttttctggcaaaaaggagccttttgctctctgtgaccctaagagcacactgcacagggaaaattgccccatccagacctggctccactcttgatctctcttgtcctcttctgctcttttcctggtgctcttttttctcggtggggtgtgggtaatagaacagccgtgggcttttggggacctttaacttttttttctctcttttgtttataaaaaacactaaacattcaattccagagaaccaaaaatcccaccttcccaccgaacactactaaggggcttgtgttctgctccataccttttctcttttctttctgtcttgttaatgcttttaaaaacaaatgagttttttatataaataaagtttttaaagtgtgtatgtggggggtctgtgtcatttcttcacttcaagctgttatttcttccctgctttgcatctttgttacttccttatgtatcagtgtcctttccagagcaaccagaaggaggttataccaggatttattttgagctcagccccaactctttatcaagcaacattcttgttaactatatgtgaaacattttttcttctgaagattcttaaaaattgaatgtggctgaagttgaacatgggagcttattgctaatttagagataggaaactgaagcataaagaattaatgacttactttaattactggaattcttctgcaacatttgacaaaactaaccttgaataaggcccactgtaatacgtagctctcttaaatataacacttaggactagaagattagaaactaccaatcccaactacgtaataggaaaatgtaggatcaaaaggcccatgtatataagtactgaccactgggccataatgttgcttctcaggctatatgcagtcctttagtcagaagtcaataggcctatttattaatattttacagaccatattacctggattaccagggactatctttgctgcagagatcaagggttaagatctatgggaagatacttatttttctgaggtccttatgtcctgtcatataattaaagactcaagagaatttatgtgaaatgctttctgtatgccccaatctttagattaaaattatatagctgctcctga

SEQ ID NO: 285223 - DNA, 5729 bp, Homo sapiens
ctgccagatcagtttgtcaccacccaggctcccttgcctttggctgggtgcaacttccattttaggtgttggatctgagggggaaaaaaaagagagagggagagagagagaaagaagagcaggaaagatcccgaaaggaggaagaggtggcgaaaaatcaactgccctgctggatttgtctttctcagcaccttggcgaagccttgggtttctttcttaaaggactgatttttagaactccacatttgagaacggccggtttgtgggcgatgctgaccttgaaagacagaaattttcagatttgaaactcaacggaccccaggatcacagtcaccttctatatagcaccatccccaggatgcaggagccggggcagattgtggagacctacacggaggaggatcctgagggagccatgtctgtagtctctgtggagacctcagatgatgggaccactcggcgcacagagaccacggtcaagaaagtagtgaagactgtgacaacacggacagtacagccagtcgctatgggaccagacgggttgcctgtggatgcttcatcagtttctaacaactatatccagactttgggtcgtgatttccgcaagaatggcaatgggggacctggtccctatgtggggcaagctggcactgctacccttcctaggaacttccactaccctcctgatggttatagtcgccactatgaagatggttatccaggtggcagtgataactatggcagtctgtcccgggtgacccgcattgaggagcggtataggcccagcatggaaggctaccgggcacctagtagacaggatgtgtatgggccccaaccccaggttcgggtaggtgggagcagcgtggatctgcatcgctttcatccagagccttatgggctagaggatgaccagcgtagtatgggctatgatgacctggattatggtatgatgtctgattatggcactgcccgtcggactgggacaccctctgaccctcgtcggcgcctcaggagctatgaagacatgattggtgaggaggtgccatcggatcaatactactgggctcctttggcccagcatgagcgaggaagtttagcaagcttggatagcctgcgcaaaggagggcctccacctcctaattggagacagccagagctgccagaggtgatcgccatgcttggattccgcttggatgctgtcaagtccaatgcagctgcatacctgcaacacttatgctaccgcaatgacaaggtgaagactgacgtgcggaagctcaagggcatcccagtactggtgggattgttagaccatcccaaaaaggaagtgcaccttggagcctgtggagctctcaagaatatctcttttggacgtgaccaggataacaagattgccataaaaaactgtgatggtgtgcctgcccttgtgcgattgcttcgaaaggctcgtgatatggaccttactgaagttattaccggaaccctgtggaatctttcatcccatgactcaatcaaaatggagattgtggaccatgcactgcatgccttgacagatgaagtgatcattcctcattctggttgggagcgggaacctaatgaagactgtaagccacgccatattgagtgggaatcggtgctcaccaacacagctggctgccttaggaatgtaagctcagagaggagtgaagctcgccggaaacttcgggaatgtgatggtttagttgatgccctcattttcattgttcaggctgagattgggcagaaggattcagacagcaagcttgtagagaactgtgtttgccttcttcggaacttatcatatcaagttcaccgggagatcccacaggcagagcgttaccaagaggcagctcccaatgttgccaacaatactgggccacatgctgccagttgctttggggccaagaagggcaaagggaaaaaacctatagaggatccagcaaacgatacagtggatttccctaaaagaacgagtccagctcgaggctatgagctcttatttcagccagaggtggttcggatatacatctcacttcttaaggagagcaagactcctgccatcctagaagcctcagctggagctatccagaacttgtgtgctgggcgctggacgtatggtcgatacatccgctctgctctgcgtcaagagaaggctctttctgccatagctgacctcctgactaatgaacatgaacgggtggtgaaagctgcatctggagcactgagaaacctggctgtggatgctcgcaacaaagaattaattggtaaacatgctattcctaacttggtaaagaatctgccaggaggacagcagaactcctcttggaatttctctgaggacactgtcatctctattttgaacactatcaacgaggttatcgctgagaacttggaggctgccaaaaagcttcgagagacacagggtattgagaagctggtgttgatcaacaaatcagggaaccgctcagaaaaagaagttcgagcagcagcacttgtattacagacaatctggggatataaggaactgcggaagccactggaaaaagaaggatggaagaaatcagactttcaggtgaatctaaacaatgcttcccgaagccagagcagtcattcatatgatgatagtactctccctctcattgaccggaaccaaaaatcagataagaaacctgatcgggaagaaattcagatgagcaatatgggatcaaacacaaaatcactagataacaactattccacaccaaatgagagaggagaccacaatagaacactggatcgatcgggggatctaggcgacatggagccattgaagggaacaacacccttgatgcagaagatttagcaccactatctccgttccatctgggcttatatgtacttttattttttggtggtgaaattgactgatgattttcctttttcttcgctggactattgtgccaactgccaggctgcctcctgcccttacagccctaagtggctgccttctttccatcaactcccaacttcttcctgtgaagtttaattgtctcaacgcctccccctcccccattccctccatttttctcccaagaaacctgactcaattatttgcatattttgagaaactgctgcagattagttctttttgccagttttccctggaactcctggccttttgtggaggggagggatggagagaataggaatcttcactagaagccgtgggaagaattggaagttacatgctgtatatgcaatgtccagcagtctgataaactgacgattcttaatcaagatttttttcctgatggggaagggacttttattttcttttagagaggggaaagtgtgagctcttcccttattcctaatggctatttttgaagcaaagaaggccagcaacattggcacatgccacctggcaaaggacccttgagtaagtgaaggtctcctaaaactgggattaagaaaccttgctctcctcatctccaaggcagggaccatcaagaacctacagactccatctcttctgcaagcctcatgccaaccctgggctattgctgctgccccttaaacacaggctgtccttaacccacctctcctgccctgtgatatgtctgctgagttggcctggccatttccaagaggctgtagaaaggggagaatgtcaaggaagacttttggtagagaaggagcagaaagatgtgtttttgggaagaagaagacctctaggaggagctagtaggaatgtacatgaagcaattagtctgaaactggcttccccactcccccgtttctccttttcctatccttataggcctgtcccttgcctctgccctggattggttggcaaactaaaggacttgatgtacataactcctgtcccttttcccttacaaggtggggattgcccctggctttgcctcttctttgtgcctttggcctggggtgcatctcctcccgcccttccatgtgcctttctttgcctctgcagtctcatttctcataattttgcaaattatattttgttgctttcttacctactattggccctaaatagcagaaagaagagaagtgaccgagagaacctcagattcttcattgaggattggtatagccatgatttcagtcatagcaagcttttgctcaacagcatatgggtgggattttgcaaaaatcctattctgatgaatctcaaagtaaggctggtaagagaagtgagtggtgtgactcttactccttaggtgcccagaatttaccatcatctctgaaggagttacagggaagtggtctccccaattctcccctccctccagtattgccccctctcactttagcatatattaattagcaggttgggctagagaaatcagctgctatgcgggttgattattattattatttctaatccttttccttatttgccttctactccccttaatctaatctaaaagctctgttccatgcaactggagttccttatccctctcttccccttcccttatatattgaggctatggggtaggagaaaagtgcacaacccaccaccccctttactcgtgcattaaaatttcttatttacccttttcccccttcccatttcttcccactttcatctaccttttctggcaaaaaggagccttttgctctctgtgaccctaagagcacactgcacagggaaaattgccccatccagacctggctccactcttgatctctcttgtcctcttctgctcttttcctggtgctcttttttctcggtggggtgtgggtaatagaacagccgtgggcttttggggacctttaacttttttttctctcttttgtttataaaaaacactaaacattcaattccagagaaccaaaaatcccaccttcccaccgaacactactaaggggcttgtgttctgctccataccttttctcttttctttctgtcttgttaatgcttttaaaaacaaatgagttttttatataaataaagtttttaaagtgtgtatgtggggggtctgtgtcatttcttcacttcaagctgttatttcttccctgctttgcatctttgttacttccttatgtatcagtgtcctttccagagcaaccagaaggaggttataccaggatttattttgagctcagccccaactctttatcaagcaacattcttgttaactatatgtgaaacattttttcttctgaagattcttaaaaattgaatgtggctgaagttgaacatgggagcttattgctaatttagagataggaaactgaagcataaagaattaatgacttactttaattactggaattcttctgcaacatttgacaaaactaaccttgaataaggcccactgtaatacgtagctctcttaaatataacacttaggactagaagattagaaactaccaatcccaactacgtaataggaaaatgtaggatcaaaaggcccatgtatataagtactgaccactgggccataatgttgcttctcaggctatatgcagtcctttagtcagaagtcaataggcctatttattaatattttacagaccatattacctggattaccagggactatctttgctgcagagatcaagggttaagatctatgggaagatacttatttttctgaggtccttatgtcctgtcatataattaaagactcaagagaatttatgtgaaatgctttctgtatgccccaatctttagattaaaattatatagctgctcctga

SEQ ID NO: 285224 - DNA, 6018 bp, Homo sapiens
ctgccagatcagtttgtcaccacccaggctcccttgcctttggctgggtgcaacttccattttaggtgttggatctgagggggaaaaaaaagagagagggagagagagagaaagaagagcaggaaagatcccgaaaggaggaagaggtggcgaaaaatcaactgccctgctggatttgtctttctcagcaccttggcgaagccttgggtttctttcttaaaggactgatttttagaactccacatttgagtgtgaagtgagggggtctctctccctccttctccttcctctgtgattcaccttcctttttaccctgccctgcggcggctccgccccttaccttcatggacgactcagaggtggagtcgaccgccagcatcttggcctctgtgaaggaacaagaggcccagtttgagaagctgacccgggcgctggaggaggaacggcgccacgtctcggcgcagctggaacgcgtccgggtctcaccacaagatgccaacccactcatggccaacggcacactcacccgccggcatcagaacggccggtttgtgggcgatgctgaccttgaaagacagaaattttcagatttgaaactcaacggaccccaggatcacagtcaccttctatatagcaccatccccaggatgcaggagccggggcagattgtggagacctacacggaggaggatcctgagggagccatgtctgtagtctctgtggagacctcagatgatgggaccactcggcgcacagagaccacggtcaagaaagtagtgaagactgtgacaacacggacagtacagccagtcgctatgggaccagacgggttgcctgtggatgcttcatcagtttctaacaactatatccagactttgggtcgtgatttccgcaagaatggcaatgggggacctggtccctatgtggggcaagctggcactgctacccttcctaggaacttccactaccctcctgatggttatagtcgccactatgaagatggttatccaggtggcagtgataactatggcagtctgtcccgggtgacccgcattgaggagcggtataggcccagcatggaaggctaccgggcacctagtagacaggatgtgtatgggccccaaccccaggttcgggtaggtgggagcagcgtggatctgcatcgctttcatccagagccttatgggctagaggatgaccagcgtagtatgggctatgatgacctggattatggtatgatgtctgattatggcactgcccgtcggactgggacaccctctgaccctcgtcggcgcctcaggagctatgaagacatgattggtgaggaggtgccatcggatcaatactactgggctcctttggcccagcatgagcgaggaagtttagcaagcttggatagcctgcgcaaaggagggcctccacctcctaattggagacagccagagctgccagaggtgatcgccatgcttggattccgcttggatgctgtcaagtccaatgcagctgcatacctgcaacacttatgctaccgcaatgacaaggtgaagactgacgtgcggaagctcaagggcatcccagtactggtgggattgttagaccatcccaaaaaggaagtgcaccttggagcctgtggagctctcaagaatatctcttttggacgtgaccaggataacaagattgccataaaaaactgtgatggtgtgcctgcccttgtgcgattgcttcgaaaggctcgtgatatggaccttactgaagttattaccggaaccctgtggaatctttcatcccatgactcaatcaaaatggagattgtggaccatgcactgcatgccttgacagatgaagtgatcattcctcattctggttgggagcgggaacctaatgaagactgtaagccacgccatattgagtgggaatcggtgctcaccaacacagctggctgccttaggaatgtaagctcagagaggagtgaagctcgccggaaacttcgggaatgtgatggtttagttgatgccctcattttcattgttcaggctgagattgggcagaaggattcagacagcaagcttgtagagaactgtgtttgccttcttcggaacttatcatatcaagttcaccgggagatcccacaggcagagcgttaccaagaggcagctcccaatgttgccaacaatactgggccacatgctgccagttgctttggggccaagaagggcaaagggaaaaaacctatagaggatccagcaaacgatacagtggatttccctaaaagaacgagtccagctcgaggctatgagctcttatttcagccagaggtggttcggatatacatctcacttcttaaggagagcaagactcctgccatcctagaagcctcagctggagctatccagaacttgtgtgctgggcgctggacgtatggtcgatacatccgctctgctctgcgtcaagagaaggctctttctgccatagctgacctcctgactaatgaacatgaacgggtggtgaaagctgcatctggagcactgagaaacctggctgtggatgctcgcaacaaagaattaattggtaaacatgctattcctaacttggtaaagaatctgccaggaggacagcagaactcctcttggaatttctctgaggacactgtcatctctattttgaacactatcaacgaggttatcgctgagaacttggaggctgccaaaaagcttcgagagacacagggtattgagaagctggtgttgatcaacaaatcagggaaccgctcagaaaaagaagttcgagcagcagcacttgtattacagacaatctggggatataaggaactgcggaagccactggaaaaagaaggatggaagaaatcagactttcaggtgaatctaaacaatgcttcccgaagccagagcagtcattcatatgatgatagtactctccctctcattgaccggaaccaaaaatcagataagaaacctgatcgggaagaaattcagatgagcaatatgggatcaaacacaaaatcactagataacaactattccacaccaaatgagagaggagaccacaatagaacactggatcgatcgggggatctaggcgacatggagccattgaagggaacaacacccttgatgcagaagatttagcaccactatctccgttccatctgggcttatatgtacttttattttttggtggtgaaattgactgatgattttcctttttcttcgctggactattgtgccaactgccaggctgcctcctgcccttacagccctaagtggctgccttctttccatcaactcccaacttcttcctgtgaagtttaattgtctcaacgcctccccctcccccattccctccatttttctcccaagaaacctgactcaattatttgcatattttgagaaactgctgcagattagttctttttgccagttttccctggaactcctggccttttgtggaggggagggatggagagaataggaatcttcactagaagccgtgggaagaattggaagttacatgctgtatatgcaatgtccagcagtctgataaactgacgattcttaatcaagatttttttcctgatggggaagggacttttattttcttttagagaggggaaagtgtgagctcttcccttattcctaatggctatttttgaagcaaagaaggccagcaacattggcacatgccacctggcaaaggacccttgagtaagtgaaggtctcctaaaactgggattaagaaaccttgctctcctcatctccaaggcagggaccatcaagaacctacagactccatctcttctgcaagcctcatgccaaccctgggctattgctgctgccccttaaacacaggctgtccttaacccacctctcctgccctgtgatatgtctgctgagttggcctggccatttccaagaggctgtagaaaggggagaatgtcaaggaagacttttggtagagaaggagcagaaagatgtgtttttgggaagaagaagacctctaggaggagctagtaggaatgtacatgaagcaattagtctgaaactggcttccccactcccccgtttctccttttcctatccttataggcctgtcccttgcctctgccctggattggttggcaaactaaaggacttgatgtacataactcctgtcccttttcccttacaaggtggggattgcccctggctttgcctcttctttgtgcctttggcctggggtgcatctcctcccgcccttccatgtgcctttctttgcctctgcagtctcatttctcataattttgcaaattatattttgttgctttcttacctactattggccctaaatagcagaaagaagagaagtgaccgagagaacctcagattcttcattgaggattggtatagccatgatttcagtcatagcaagcttttgctcaacagcatatgggtgggattttgcaaaaatcctattctgatgaatctcaaagtaaggctggtaagagaagtgagtggtgtgactcttactccttaggtgcccagaatttaccatcatctctgaaggagttacagggaagtggtctccccaattctcccctccctccagtattgccccctctcactttagcatatattaattagcaggttgggctagagaaatcagctgctatgcgggttgattattattattatttctaatccttttccttatttgccttctactccccttaatctaatctaaaagctctgttccatgcaactggagttccttatccctctcttccccttcccttatatattgaggctatggggtaggagaaaagtgcacaacccaccaccccctttactcgtgcattaaaatttcttatttacccttttcccccttcccatttcttcccactttcatctaccttttctggcaaaaaggagccttttgctctctgtgaccctaagagcacactgcacagggaaaattgccccatccagacctggctccactcttgatctctcttgtcctcttctgctcttttcctggtgctcttttttctcggtggggtgtgggtaatagaacagccgtgggcttttggggacctttaacttttttttctctcttttgtttataaaaaacactaaacattcaattccagagaaccaaaaatcccaccttcccaccgaacactactaaggggcttgtgttctgctccataccttttctcttttctttctgtcttgttaatgcttttaaaaacaaatgagttttttatataaataaagtttttaaagtgtgtatgtggggggtctgtgtcatttcttcacttcaagctgttatttcttccctgctttgcatctttgttacttccttatgtatcagtgtcctttccagagcaaccagaaggaggttataccaggatttattttgagctcagccccaactctttatcaagcaacattcttgttaactatatgtgaaacattttttcttctgaagattcttaaaaattgaatgtggctgaagttgaacatgggagcttattgctaatttagagataggaaactgaagcataaagaattaatgacttactttaattactggaattcttctgcaacatttgacaaaactaaccttgaataaggcccactgtaatacgtagctctcttaaatataacacttaggactagaagattagaaactaccaatcccaactacgtaataggaaaatgtaggatcaaaaggcccatgtatataagtactgaccactgggccataatgttgcttctcaggctatatgcagtcctttagtcagaagtcaataggcctatttattaatattttacagaccatattacctggattaccagggactatctttgctgcagagatcaagggttaagatctatgggaagatacttatttttctgaggtccttatgtcctgtcatataattaaagactcaagagaatttatgtgaaatgctttctgtatgccccaatctttagattaaaattatatagctgctcctga

SEQ ID NO: 285225 - DNA, 6218 bp, Homo sapiens
tcctgtacctggtaaagtaagagggatccacccaggaacagcagggctgaaaccgatacgggccgttcaaacgctctgggggaaaaacaataccatgtacactgcaaagctcccttgcctttggctgggtgcaacttccattttaggtgttggatctgagggggaaaaaaaagagagagggagagagagagaaagaagagcaggaaagatcccgaaaggaggaagaggtggcgaaaaatcaactgccctgctggatttgtctttctcagcaccttggcgaagccttgggtttctttcttaaaggactgatttttagaactccacatttgagctctctccttcctgcttcctccttgctgtggtggctgggatgcttcttccatgattttttgaatctagactgggctgttctctgtgttaaaccaatcagttgcgaccttctcttaacagtgtgaagtgagggggtctctctccctccttctccttcctctgtgattcaccttcctttttaccctgccctgcggcggctccgccccttaccttcatggacgactcagaggtggagtcgaccgccagcatcttggcctctgtgaaggaacaagaggcccagtttgagaagctgacccgggcgctggaggaggaacggcgccacgtctcggcgcagctggaacgcgtccgggtctcaccacaagatgccaacccactcatggccaacggcacactcacccgccggcatcagaacggccggtttgtgggcgatgctgaccttgaaagacagaaattttcagatttgaaactcaacggaccccaggatcacagtcaccttctatatagcaccatccccaggatgcaggagccggggcagattgtggagacctacacggaggaggatcctgagggagccatgtctgtagtctctgtggagacctcagatgatgggaccactcggcgcacagagaccacggtcaagaaagtagtgaagactgtgacaacacggacagtacagccagtcgctatgggaccagacgggttgcctgtggatgcttcatcagtttctaacaactatatccagactttgggtcgtgatttccgcaagaatggcaatgggggacctggtccctatgtggggcaagctggcactgctacccttcctaggaacttccactaccctcctgatggttatagtcgccactatgaagatggttatccaggtggcagtgataactatggcagtctgtcccgggtgacccgcattgaggagcggtataggcccagcatggaaggctaccgggcacctagtagacaggatgtgtatgggccccaaccccaggttcgggtaggtgggagcagcgtggatctgcatcgctttcatccagagccttatgggctagaggatgaccagcgtagtatgggctatgatgacctggattatggtatgatgtctgattatggcactgcccgtcggactgggacaccctctgaccctcgtcggcgcctcaggagctatgaagacatgattggtgaggaggtgccatcggatcaatactactgggctcctttggcccagcatgagcgaggaagtttagcaagcttggatagcctgcgcaaaggagggcctccacctcctaattggagacagccagagctgccagaggtgatcgccatgcttggattccgcttggatgctgtcaagtccaatgcagctgcatacctgcaacacttatgctaccgcaatgacaaggtgaagactgacgtgcggaagctcaagggcatcccagtactggtgggattgttagaccatcccaaaaaggaagtgcaccttggagcctgtggagctctcaagaatatctcttttggacgtgaccaggataacaagattgccataaaaaactgtgatggtgtgcctgcccttgtgcgattgcttcgaaaggctcgtgatatggaccttactgaagttattaccggaaccctgtggaatctttcatcccatgactcaatcaaaatggagattgtggaccatgcactgcatgccttgacagatgaagtgatcattcctcattctggttgggagcgggaacctaatgaagactgtaagccacgccatattgagtgggaatcggtgctcaccaacacagctggctgccttaggaatgtaagctcagagaggagtgaagctcgccggaaacttcgggaatgtgatggtttagttgatgccctcattttcattgttcaggctgagattgggcagaaggattcagacagcaagcttgtagagaactgtgtttgccttcttcggaacttatcatatcaagttcaccgggagatcccacaggcagagcgttaccaagaggcagctcccaatgttgccaacaatactgggccacatgctgccagttgctttggggccaagaagggcaaagggaaaaaacctatagaggatccagcaaacgatacagtggatttccctaaaagaacgagtccagctcgaggctatgagctcttatttcagccagaggtggttcggatatacatctcacttcttaaggagagcaagactcctgccatcctagaagcctcagctggagctatccagaacttgtgtgctgggcgctggacgtatggtcgatacatccgctctgctctgcgtcaagagaaggctctttctgccatagctgacctcctgactaatgaacatgaacgggtggtgaaagctgcatctggagcactgagaaacctggctgtggatgctcgcaacaaagaattaattggtaaacatgctattcctaacttggtaaagaatctgccaggaggacagcagaactcctcttggaatttctctgaggacactgtcatctctattttgaacactatcaacgaggttatcgctgagaacttggaggctgccaaaaagcttcgagagacacagggtattgagaagctggtgttgatcaacaaatcagggaaccgctcagaaaaagaagttcgagcagcagcacttgtattacagacaatctggggatataaggaactgcggaagccactggaaaaagaaggatggaagaaatcagactttcaggtgaatctaaacaatgcttcccgaagccagagcagtcattcatatgatgatagtactctccctctcattgaccggaaccaaaaatcagataagaaacctgatcgggaagaaattcagatgagcaatatgggatcaaacacaaaatcactagataacaactattccacaccaaatgagagaggagaccacaatagaacactggatcgatcgggggatctaggcgacatggagccattgaagggaacaacacccttgatgcagaagatttagcaccactatctccgttccatctgggcttatatgtacttttattttttggtggtgaaattgactgatgattttcctttttcttcgctggactattgtgccaactgccaggctgcctcctgcccttacagccctaagtggctgccttctttccatcaactcccaacttcttcctgtgaagtttaattgtctcaacgcctccccctcccccattccctccatttttctcccaagaaacctgactcaattatttgcatattttgagaaactgctgcagattagttctttttgccagttttccctggaactcctggccttttgtggaggggagggatggagagaataggaatcttcactagaagccgtgggaagaattggaagttacatgctgtatatgcaatgtccagcagtctgataaactgacgattcttaatcaagatttttttcctgatggggaagggacttttattttcttttagagaggggaaagtgtgagctcttcccttattcctaatggctatttttgaagcaaagaaggccagcaacattggcacatgccacctggcaaaggacccttgagtaagtgaaggtctcctaaaactgggattaagaaaccttgctctcctcatctccaaggcagggaccatcaagaacctacagactccatctcttctgcaagcctcatgccaaccctgggctattgctgctgccccttaaacacaggctgtccttaacccacctctcctgccctgtgatatgtctgctgagttggcctggccatttccaagaggctgtagaaaggggagaatgtcaaggaagacttttggtagagaaggagcagaaagatgtgtttttgggaagaagaagacctctaggaggagctagtaggaatgtacatgaagcaattagtctgaaactggcttccccactcccccgtttctccttttcctatccttataggcctgtcccttgcctctgccctggattggttggcaaactaaaggacttgatgtacataactcctgtcccttttcccttacaaggtggggattgcccctggctttgcctcttctttgtgcctttggcctggggtgcatctcctcccgcccttccatgtgcctttctttgcctctgcagtctcatttctcataattttgcaaattatattttgttgctttcttacctactattggccctaaatagcagaaagaagagaagtgaccgagagaacctcagattcttcattgaggattggtatagccatgatttcagtcatagcaagcttttgctcaacagcatatgggtgggattttgcaaaaatcctattctgatgaatctcaaagtaaggctggtaagagaagtgagtggtgtgactcttactccttaggtgcccagaatttaccatcatctctgaaggagttacagggaagtggtctccccaattctcccctccctccagtattgccccctctcactttagcatatattaattagcaggttgggctagagaaatcagctgctatgcgggttgattattattattatttctaatccttttccttatttgccttctactccccttaatctaatctaaaagctctgttccatgcaactggagttccttatccctctcttccccttcccttatatattgaggctatggggtaggagaaaagtgcacaacccaccaccccctttactcgtgcattaaaatttcttatttacccttttcccccttcccatttcttcccactttcatctaccttttctggcaaaaaggagccttttgctctctgtgaccctaagagcacactgcacagggaaaattgccccatccagacctggctccactcttgatctctcttgtcctcttctgctcttttcctggtgctcttttttctcggtggggtgtgggtaatagaacagccgtgggcttttggggacctttaacttttttttctctcttttgtttataaaaaacactaaacattcaattccagagaaccaaaaatcccaccttcccaccgaacactactaaggggcttgtgttctgctccataccttttctcttttctttctgtcttgttaatgcttttaaaaacaaatgagttttttatataaataaagtttttaaagtgtgtatgtggggggtctgtgtcatttcttcacttcaagctgttatttcttccctgctttgcatctttgttacttccttatgtatcagtgtcctttccagagcaaccagaaggaggttataccaggatttattttgagctcagccccaactctttatcaagcaacattcttgttaactatatgtgaaacattttttcttctgaagattcttaaaaattgaatgtggctgaagttgaacatgggagcttattgctaatttagagataggaaactgaagcataaagaattaatgacttactttaattactggaattcttctgcaacatttgacaaaactaaccttgaataaggcccactgtaatacgtagctctcttaaatataacacttaggactagaagattagaaactaccaatcccaactacgtaataggaaaatgtaggatcaaaaggcccatgtatataagtactgaccactgggccataatgttgcttctcaggctatatgcagtcctttagtcagaagtcaataggcctatttattaatattttacagaccatattacctggattaccagggactatctttgctgcagagatcaagggttaagatctatgggaagatacttatttttctgaggtccttatgtcctgtcatataattaaagactcaagagaatttatgtgaaatgctttctgtatgccccaatctttagattaaaattatatagctgctcctga

SEQ ID NO: 285226 - DNA, 6551 bp, Homo sapiens
  misc_feature (6225)..(6226): n is a, c, g, or t
tcctgtacctggtaaagtaagagggatccacccaggaacagcagggctgaaaccgatacgggccgttcaaacgctctgggggaaaaacaataccatgtacactgcaaagctcccttgcctttggctgggtgcaacttccattttaggtgttggatctgagggggaaaaaaaagagagagggagagagagagaaagaagagcaggaaagatcccgaaaggaggaagaggtggcgaaaaatcaactgccctgctggatttgtctttctcagcaccttggcgaagccttgggtttctttcttaaaggactgatttttagaactccacatttgagctctctccttcctgcttcctccttgctgtggtggctgggatgcttcttccatgattttttgaatctagactgggctgttctctgtgttaaaccaatcagttgcgaccttctcttaacagtgtgaagtgagggggtctctctccctccttctccttcctctgtgattcaccttcctttttaccctgccctgcggcggctccgccccttaccttcatggacgactcagaggtggagtcgaccgccagcatcttggcctctgtgaaggaacaagaggcccagtttgagaagctgacccgggcgctggaggaggaacggcgccacgtctcggcgcagctggaacgcgtccgggtctcaccacaagatgccaacccactcatggccaacggcacactcacccgccggcatcagaacggccggtttgtgggcgatgctgaccttgaaagacagaaattttcagatttgaaactcaacggaccccaggatcacagtcaccttctatatagcaccatccccaggatgcaggagccggggcagattgtggagacctacacggaggaggatcctgagggagccatgtctgtagtctctgtggagacctcagatgatgggaccactcggcgcacagagaccacggtcaagaaagtagtgaagactgtgacaacacggacagtacagccagtcgctatgggaccagacgggttgcctgtggatgcttcatcagtttctaacaactatatccagactttgggtcgtgatttccgcaagaatggcaatgggggacctggtccctatgtggggcaagctggcactgctacccttcctaggaacttccactaccctcctgatggttatagtcgccactatgaagatggttatccaggtggcagtgataactatggcagtctgtcccgggtgacccgcattgaggagcggtataggcccagcatggaaggctaccgggcacctagtagacaggatgtgtatgggccccaaccccaggttcgggtaggtgggagcagcgtggatctgcatcgctttcatccagagccttatgggctagaggatgaccagcgtagtatgggctatgatgacctggattatggtatgatgtctgattatggcactgcccgtcggactgggacaccctctgaccctcgtcggcgcctcaggagctatgaagacatgattggtgaggaggtgccatcggatcaatactactgggctcctttggcccagcatgagcgaggaagtttagcaagcttggatagcctgcgcaaaggagggcctccacctcctaattggagacagccagagctgccagaggtgatcgccatgcttggattccgcttggatgctgtcaagtccaatgcagctgcatacctgcaacacttatgctaccgcaatgacaaggtgaagactgacgtgcggaagctcaagggcatcccagtactggtgggattgttagaccatcccaaaaaggaagtgcaccttggagcctgtggagctctcaagaatatctcttttggacgtgaccaggataacaagattgccataaaaaactgtgatggtgtgcctgcccttgtgcgattgcttcgaaaggctcgtgatatggaccttactgaagttattaccggaaccctgtggaatctttcatcccatgactcaatcaaaatggagattgtggaccatgcactgcatgccttgacagatgaagtgatcattcctcattctggttgggagcgggaacctaatgaagactgtaagccacgccatattgagtgggaatcggtgctcaccaacacagctggctgccttaggaatgtaagctcagagaggagtgaagctcgccggaaacttcgggaatgtgatggtttagttgatgccctcattttcattgttcaggctgagattgggcagaaggattcagacagcaagcttgtagagaactgtgtttgccttcttcggaacttatcatatcaagttcaccgggagatcccacaggcagagcgttaccaagaggcagctcccaatgttgccaacaatactgggccacatgctgccagttgctttggggccaagaagggcaaagggaaaaaacctatagaggatccagcaaacgatacagtggatttccctaaaagaacgagtccagctcgaggctatgagctcttatttcagccagaggtggttcggatatacatctcacttcttaaggagagcaagactcctgccatcctagaagcctcagctggagctatccagaacttgtgtgctgggcgctggacgtatggtcgatacatccgctctgctctgcgtcaagagaaggctctttctgccatagctgacctcctgactaatgaacatgaacgggtggtgaaagctgcatctggagcactgagaaacctggctgtggatgctcgcaacaaagaattaattggtaaacatgctattcctaacttggtaaagaatctgccaggaggacagcagaactcctcttggaatttctctgaggacactgtcatctctattttgaacactatcaacgaggttatcgctgagaacttggaggctgccaaaaagcttcgagagacacagggtattgagaagctggtgttgatcaacaaatcagggaaccgctcagaaaaagaagttcgagcagcagcacttgtattacagacaatctggggatataaggaactgcggaagccactggaaaaagaaggatggaagaaatcagactttcaggtgaatctaaacaatgcttcccgaagccagagcagtcattcatatgatgatagtactctccctctcattgaccggaaccaaaaatcagataagaaacctgatcgggaagaaattcagatgagcaatatgggatcaaacacaaaatcactagataacaactattccacaccaaatgagagaggagaccacaatagaacactggatcgatcgggggatctaggcgacatggagccattgaagggaacaacacccttgatgcagaagatttagcaccactatctccgttccatctgggcttatatgtacttttattttttggtggtgaaattgactgatgattttcctttttcttcgctggactattgtgccaactgccaggctgcctcctgcccttacagccctaagtggctgccttctttccatcaactcccaacttcttcctgtgaagtttaattgtctcaacgcctccccctcccccattccctccatttttctcccaagaaacctgactcaattatttgcatattttgagaaactgctgcagattagttctttttgccagttttccctggaactcctggccttttgtggaggggagggatggagagaataggaatcttcactagaagccgtgggaagaattggaagttacatgctgtatatgcaatgtccagcagtctgataaactgacgattcttaatcaagatttttttcctgatggggaagggacttttattttcttttagagaggggaaagtgtgagctcttcccttattcctaatggctatttttgaagcaaagaaggccagcaacattggcacatgccacctggcaaaggacccttgagtaagtgaaggtctcctaaaactgggattaagaaaccttgctctcctcatctccaaggcagggaccatcaagaacctacagactccatctcttctgcaagcctcatgccaaccctgggctattgctgctgccccttaaacacaggctgtccttaacccacctctcctgccctgtgatatgtctgctgagttggcctggccatttccaagaggctgtagaaaggggagaatgtcaaggaagacttttggtagagaaggagcagaaagatgtgtttttgggaagaagaagacctctaggaggagctagtaggaatgtacatgaagcaattagtctgaaactggcttccccactcccccgtttctccttttcctatccttataggcctgtcccttgcctctgccctggattggttggcaaactaaaggacttgatgtacataactcctgtcccttttcccttacaaggtggggattgcccctggctttgcctcttctttgtgcctttggcctggggtgcatctcctcccgcccttccatgtgcctttctttgcctctgcagtctcatttctcataattttgcaaattatattttgttgctttcttacctactattggccctaaatagcagaaagaagagaagtgaccgagagaacctcagattcttcattgaggattggtatagccatgatttcagtcatagcaagcttttgctcaacagcatatgggtgggattttgcaaaaatcctattctgatgaatctcaaagtaaggctggtaagagaagtgagtggtgtgactcttactccttaggtgcccagaatttaccatcatctctgaaggagttacagggaagtggtctccccaattctcccctccctccagtattgccccctctcactttagcatatattaattagcaggttgggctagagaaatcagctgctatgcgggttgattattattattatttctaatccttttccttatttgccttctactccccttaatctaatctaaaagctctgttccatgcaactggagttccttatccctctcttccccttcccttatatattgaggctatggggtaggagaaaagtgcacaacccaccaccccctttactcgtgcattaaaatttcttatttacccttttcccccttcccatttcttcccactttcatctaccttttctggcaaaaaggagccttttgctctctgtgaccctaagagcacactgcacagggaaaattgccccatccagacctggctccactcttgatctctcttgtcctcttctgctcttttcctggtgctcttttttctcggtggggtgtgggtaatagaacagccgtgggcttttggggacctttaacttttttttctctcttttgtttataaaaaacactaaacattcaattccagagaaccaaaaatcccaccttcccaccgaacactactaaggggcttgtgttctgctccataccttttctcttttctttctgtcttgttaatgcttttaaaaacaaatgagttttttatataaataaagtttttaaagtgtgtatgtggggggtctgtgtcatttcttcacttcaagctgttatttcttccctgctttgcatctttgttacttccttatgtatcagtgtcctttccagagcaaccagaaggaggttataccaggatttattttgagctcagccccaactctttatcaagcaacattcttgttaactatatgtgaaacattttttcttctgaagattcttaaaaattgaatgtggctgaagttgaacatgggagcttattgctaatttagagataggaaactgaagcataaagaattaatgacttactttaattactggaattcttctgcaacatttgacaaaactaaccttgaataaggcccactgtaatacgtagctctcttaaatataacacttaggactagaagattagaaactaccaatcccaactacgtaataggaaaatgtaggatcaaaaggcccatgtatataagtactgaccactgggccataatgttgcttctcaggctatatgcagtcctttagtcagaagtcaataggcctatttattaatattttacagaccatattacctggattaccagggactatctttgctgcagagatcaagggttaagatctatgggaagatacttatttttctgaggtccttatgtcctgtcatataattaaagactcaagagaatttatgtgaaatgctttctgtatgccccaatctttagattaaaattatatagctgctcctgaaaaaaannaaaaaaaaaaaaaaaaaaaaaaaaaaaaaagggggggggggtaaaaattccgggggggcccaaagtataacgcgatcaccaagtgtttttgtggtacagggggcgccataatagggagccggtaattaaataaacaaaggacgtgggggcgggtgtaacaaacggtccgcgtgtgagacaacgtgctacgccgggcaatcttggagaaggacccttaccttgggggtgcgactagtgtgcacatcctcaaaagaataaggcttaggaaataaattgtaggtatagtgtaccacgatatcgtcgaaaattgtcagaatgttcgaat

SEQ ID NO: 285227 - DNA, 6305 bp, Homo sapiens
tcctgtacctggtaaagtaagagggatccacccaggaacagcagggctgaaaccgatacgggccgttcaaacgctctgggggaaaaacaataccatgtacactgcaaagctcccttgcctttggctgggtgcaacttccattttaggtgttggatctgagggggaaaaaaaagagagagggagagagagagaaagaagagcaggaaagatcccgaaaggaggaagaggtggcgaaaaatcaactgccctgctggatttgtctttctcagcaccttggcgaagccttgggtttctttcttaaaggactgatttttagaactccacatttgagctctctccttcctgcttcctccttgctgtggtggctgggatgcttcttccatgattttttgaatctagactgggctgttctctgtgttaaaccaatcagttgcgaccttctcttaacagtgtgaagtgagggggtctctctccctccttctccttcctctgtgattcaccttcctttttaccctgccctgcggcggctccgccccttaccttcatggacgactcagaggtggagtcgaccgccagcatcttggcctctgtgaaggaacaagaggcccagtttgagaagctgacccgggcgctggaggaggaacggcgccacgtctcggcgcagctggaacgcgtccgggtctcaccacaagatgccaacccactcatggccaacggcacactcacccgccggcatcagaacggccggtttgtgggcgatgctgaccttgaaagacagaaattttcagatttgaaactcaacggaccccaggatcacagtcaccttctatatagcaccatccccaggatgcaggagccggggcagattgtggagacctacacggaggaggatcctgagggagccatgtctgtagtctctgtggagacctcagatgatgggaccactcggcgcacagagaccacggtcaagaaagtagtgaagactgtgacaacacggacagtacagccagtcgctatgggaccagacgggttgcctgtggatgcttcatcagtttctaacaactatatccagactttgggtcgtgatttccgcaagaatggcaatgggggacctggtccctatgtggggcaagctggcactgctacccttcctaggaacttccactaccctcctgatggttatagtcgccactatgaagatggttatccaggtggcagtgataactatggcagtctgtcccgggtgacccgcattgaggagcggtataggcccagcatggaaggctaccgggcacctagtagacaggatgtgtatgggccccaaccccaggttcgggtaggtgggagcagcgtggatctgcatcgctttcatccagagccttatgggctagaggatgaccagcgtagtatgggctatgatgacctggattatggtatgatgtctgattatggcactgcccgtcggactgggacaccctctgaccctcgtcggcgcctcaggagctatgaagacatgattggtgaggaggtgccatcggatcaatactactgggctcctttggcccagcatgagcgaggaagtttagcaagcttggatagcctgcgcaaaggagggcctccacctcctaattggagacagccagagctgccagaggtgatcgccatgcttggattccgcttggatgctgtcaagtccaatgcagctgcatacctgcaacacttatgctaccgcaatgacaaggtgaagactgacgtgcggaagctcaagggcatcccagtactggtgggattgttagaccatcccaaaaaggaagtgcaccttggagcctgtggagctctcaagaatatctcttttggacgtgaccaggataacaagattgccataaaaaactgtgatggtgtgcctgcccttgtgcgattgcttcgaaaggctcgtgatatggaccttactgaagttattaccggaaccctgtggaatctttcatcccatgactcaatcaaaatggagattgtggaccatgcactgcatgccttgacagatgaagtgatcattcctcattctggttgggagcgggaacctaatgaagactgtaagccacgccatattgagtgggaatcggtgctcaccaacacagctggctgccttaggaatgtaagctcagagaggagtgaagctcgccggaaacttcgggaatgtgatggtttagttgatgccctcattttcattgttcaggctgagattgggcagaaggattcagacagcaagcttgtagagaactgtgtttgccttcttcggaacttatcatatcaagttcaccgggagatcccacaggcagagcgttaccaagaggcagctcccaatgttgccaacaatactgggccacatgctgccagttgctttggggccaagaagggcaaagggaaaaaacctatagaggatccagcaaacgatacagtggatttccctaaaagaacgagtccagctcgaggctatgagctcttatttcagccagaggtggttcggatatacatctcacttcttaaggagagcaagactcctgccatcctagaagcctcagctggagctatccagaacttgtgtgctgggcgctggacgtatggtcgatacatccgctctgctctgcgtcaagagaaggctctttctgccatagctgacctcctgactaatgaacatgaacgggtggtgaaagctgcatctggagcactgagaaacctggctgtggatgctcgcaacaaagaattaattggtaaacatgctattcctaacttggtaaagaatctgccaggaggacagcagaactcctcttggaatttctctgaggacactgtcatctctattttgaacactatcaacgaggttatcgctgagaacttggaggctgccaaaaagcttcgagagacacagggtattgagaagctggtgttgatcaacaaatcagggaaccgctcagaaaaagaagttcgagcagcagcacttgtattacagacaatctggggatataaggaactgcggaagccactggaaaaagaaggatggaagaaatcagactttcaggtgaatctaaacaatgcttcccgaagccagagcagtcattcatatgatgatagtactctccctctcattgaccggaaccaaaaatcagataagaaacctgatcgggaagaaattcagatgagcaatatgggatcaaacacaaaatcactagataacaactattccacaccaaatgagagaggagaccacaatagaacactggatcgatcgggggatctaggcgacatggagccattgaagggaacaacacccttgatgcaggacgaggggcaggaatctctggaggaagagttggatgtgttggttttggatgatgaggggggccaagtgtcttacccctccatgcagaagatttagcaccactatctccgttccatctgggcttatatgtacttttattttttggtggtgaaattgactgatgattttcctttttcttcgctggactattgtgccaactgccaggctgcctcctgcccttacagccctaagtggctgccttctttccatcaactcccaacttcttcctgtgaagtttaattgtctcaacgcctccccctcccccattccctccatttttctcccaagaaacctgactcaattatttgcatattttgagaaactgctgcagattagttctttttgccagttttccctggaactcctggccttttgtggaggggagggatggagagaataggaatcttcactagaagccgtgggaagaattggaagttacatgctgtatatgcaatgtccagcagtctgataaactgacgattcttaatcaagatttttttcctgatggggaagggacttttattttcttttagagaggggaaagtgtgagctcttcccttattcctaatggctatttttgaagcaaagaaggccagcaacattggcacatgccacctggcaaaggacccttgagtaagtgaaggtctcctaaaactgggattaagaaaccttgctctcctcatctccaaggcagggaccatcaagaacctacagactccatctcttctgcaagcctcatgccaaccctgggctattgctgctgccccttaaacacaggctgtccttaacccacctctcctgccctgtgatatgtctgctgagttggcctggccatttccaagaggctgtagaaaggggagaatgtcaaggaagacttttggtagagaaggagcagaaagatgtgtttttgggaagaagaagacctctaggaggagctagtaggaatgtacatgaagcaattagtctgaaactggcttccccactcccccgtttctccttttcctatccttataggcctgtcccttgcctctgccctggattggttggcaaactaaaggacttgatgtacataactcctgtcccttttcccttacaaggtggggattgcccctggctttgcctcttctttgtgcctttggcctggggtgcatctcctcccgcccttccatgtgcctttctttgcctctgcagtctcatttctcataattttgcaaattatattttgttgctttcttacctactattggccctaaatagcagaaagaagagaagtgaccgagagaacctcagattcttcattgaggattggtatagccatgatttcagtcatagcaagcttttgctcaacagcatatgggtgggattttgcaaaaatcctattctgatgaatctcaaagtaaggctggtaagagaagtgagtggtgtgactcttactccttaggtgcccagaatttaccatcatctctgaaggagttacagggaagtggtctccccaattctcccctccctccagtattgccccctctcactttagcatatattaattagcaggttgggctagagaaatcagctgctatgcgggttgattattattattatttctaatccttttccttatttgccttctactccccttaatctaatctaaaagctctgttccatgcaactggagttccttatccctctcttccccttcccttatatattgaggctatggggtaggagaaaagtgcacaacccaccaccccctttactcgtgcattaaaatttcttatttacccttttcccccttcccatttcttcccactttcatctaccttttctggcaaaaaggagccttttgctctctgtgaccctaagagcacactgcacagggaaaattgccccatccagacctggctccactcttgatctctcttgtcctcttctgctcttttcctggtgctcttttttctcggtggggtgtgggtaatagaacagccgtgggcttttggggacctttaacttttttttctctcttttgtttataaaaaacactaaacattcaattccagagaaccaaaaatcccaccttcccaccgaacactactaaggggcttgtgttctgctccataccttttctcttttctttctgtcttgttaatgcttttaaaaacaaatgagttttttatataaataaagtttttaaagtgtgtatgtggggggtctgtgtcatttcttcacttcaagctgttatttcttccctgctttgcatctttgttacttccttatgtatcagtgtcctttccagagcaaccagaaggaggttataccaggatttattttgagctcagccccaactctttatcaagcaacattcttgttaactatatgtgaaacattttttcttctgaagattcttaaaaattgaatgtggctgaagttgaacatgggagcttattgctaatttagagataggaaactgaagcataaagaattaatgacttactttaattactggaattcttctgcaacatttgacaaaactaaccttgaataaggcccactgtaatacgtagctctcttaaatataacacttaggactagaagattagaaactaccaatcccaactacgtaataggaaaatgtaggatcaaaaggcccatgtatataagtactgaccactgggccataatgttgcttctcaggctatatgcagtcctttagtcagaagtcaataggcctatttattaatattttacagaccatattacctggattaccagggactatctttgctgcagagatcaagggttaagatctatgggaagatacttatttttctgaggtccttatgtcctgtcatataattaaagactcaagagaatttatgtgaaatgctttctgtatgccccaatctttagattaaaattatatagctgctcctga

SEQ ID NO: 285228 - DNA, 4541 bp, Homo sapiens
gacacaactgcacccactgactgcagctgcatacctgcaacacttatgctaccgcaatgacaaggtgaagactgacgtgcggaagctcaagggcatcccagtactggtgggattgttagaccatcccaaaaaggaagtgcaccttggagcctgtggagctctcaagaatatctcttttggacgtgaccaggataacaagattgccataaaaaactgtgatggtgtgcctgcccttgtgcgattgcttcgaaaggctcgtgatatggaccttactgaagttattaccggaaccctgtggaatctttcatcccatgactcaatcaaaatggagattgtggaccatgcactgcatgccttgacagatgaagtgatcattcctcattctggttgggagcgggaacctaatgaagactgtaagccacgccatattgagtgggaatcggtgctcaccaacacagctggctgccttaggaatgtaagctcagagaggagtgaagctcgccggaaacttcgggaatgtgatggtttagttgatgccctcattttcattgttcaggctgagattgggcagaaggattcagacagcaagcttgtagagaactgtgtttgccttcttcggaacttatcatatcaagttcaccgggagatcccacaggcagagcgttaccaagaggcagctcccaatgttgccaacaatactgggccacatgctgccagttgctttggggccaagaagggcaaagggaaaaaacctatagaggatccagcaaacgatacagtggatttccctaaaagaacgagtccagctcgaggctatgagctcttatttcagccagaggtggttcggatatacatctcacttcttaaggagagcaagactcctgccatcctagaagcctcagctggagctatccagaacttgtgtgctgggcgctggacgtatggtcgatacatccgctctgctctgcgtcaagagaaggctctttctgccatagctgacctcctgactaatgaacatgaacgggtggtgaaagctgcatctggagcactgagaaacctggctgtggatgctcgcaacaaagaattaattggtaaacatgctattcctaacttggtaaagaatctgccaggaggacagcagaactcctcttggaatttctctgaggacactgtcatctctattttgaacactatcaacgaggttatcgctgagaacttggaggctgccaaaaagcttcgagagacacagggtattgagaagctggtgttgatcaacaaatcagggaaccgctcagaaaaagaagttcgagcagcagcacttgtattacagacaatctggggatataaggaactgcggaagccactggaaaaagaaggatggaagaaatcagactttcaggtgaatctaaacaatgcttcccgaagccagagcagtcattcatatgatgatagtactctccctctcattgaccggaaccaaaaatcagataagaaacctgatcgggaagaaattcagatgagcaatatgggatcaaacacaaaatcactagataacaactattccacaccaaatgagagaggagaccacaatagaacactggatcgatcgggggatctaggcgacatggagccattgaagggaacaacacccttgatgcagaagatttagcaccactatctccgttccatctgggcttatatgtacttttattttttggtggtgaaattgactgatgattttcctttttcttcgctggactattgtgccaactgccaggctgcctcctgcccttacagccctaagtggctgccttctttccatcaactcccaacttcttcctgtgaagtttaattgtctcaacgcctccccctcccccattccctccatttttctcccaagaaacctgactcaattatttgcatattttgagaaactgctgcagattagttctttttgccagttttccctggaactcctggccttttgtggaggggagggatggagagaataggaatcttcactagaagccgtgggaagaattggaagttacatgctgtatatgcaatgtccagcagtctgataaactgacgattcttaatcaagatttttttcctgatggggaagggacttttattttcttttagagaggggaaagtgtgagctcttcccttattcctaatggctatttttgaagcaaagaaggccagcaacattggcacatgccacctggcaaaggacccttgagtaagtgaaggtctcctaaaactgggattaagaaaccttgctctcctcatctccaaggcagggaccatcaagaacctacagactccatctcttctgcaagcctcatgccaaccctgggctattgctgctgccccttaaacacaggctgtccttaacccacctctcctgccctgtgatatgtctgctgagttggcctggccatttccaagaggctgtagaaaggggagaatgtcaaggaagacttttggtagagaaggagcagaaagatgtgtttttgggaagaagaagacctctaggaggagctagtaggaatgtacatgaagcaattagtctgaaactggcttccccactcccccgtttctccttttcctatccttataggcctgtcccttgcctctgccctggattggttggcaaactaaaggacttgatgtacataactcctgtcccttttcccttacaaggtggggattgcccctggctttgcctcttctttgtgcctttggcctggggtgcatctcctcccgcccttccatgtgcctttctttgcctctgcagtctcatttctcataattttgcaaattatattttgttgctttcttacctactattggccctaaatagcagaaagaagagaagtgaccgagagaacctcagattcttcattgaggattggtatagccatgatttcagtcatagcaagcttttgctcaacagcatatgggtgggattttgcaaaaatcctattctgatgaatctcaaagtaaggctggtaagagaagtgagtggtgtgactcttactccttaggtgcccagaatttaccatcatctctgaaggagttacagggaagtggtctccccaattctcccctccctccagtattgccccctctcactttagcatatattaattagcaggttgggctagagaaatcagctgctatgcgggttgattattattattatttctaatccttttccttatttgccttctactccccttaatctaatctaaaagctctgttccatgcaactggagttccttatccctctcttccccttcccttatatattgaggctatggggtaggagaaaagtgcacaacccaccaccccctttactcgtgcattaaaatttcttatttacccttttcccccttcccatttcttcccactttcatctaccttttctggcaaaaaggagccttttgctctctgtgaccctaagagcacactgcacagggaaaattgccccatccagacctggctccactcttgatctctcttgtcctcttctgctcttttcctggtgctcttttttctcggtggggtgtgggtaatagaacagccgtgggcttttggggacctttaacttttttttctctcttttgtttataaaaaacactaaacattcaattccagagaaccaaaaatcccaccttcccaccgaacactactaaggggcttgtgttctgctccataccttttctcttttctttctgtcttgttaatgcttttaaaaacaaatgagttttttatataaataaagtttttaaagtgtgtatgtggggggtctgtgtcatttcttcacttcaagctgttatttcttccctgctttgcatctttgttacttccttatgtatcagtgtcctttccagagcaaccagaaggaggttataccaggatttattttgagctcagccccaactctttatcaagcaacattcttgttaactatatgtgaaacattttttcttctgaagattcttaaaaattgaatgtggctgaagttgaacatgggagcttattgctaatttagagataggaaactgaagcataaagaattaatgacttactttaattactggaattcttctgcaacatttgacaaaactaaccttgaataaggcccactgtaatacgtagctctcttaaatataacacttaggactagaagattagaaactaccaatcccaactacgtaataggaaaatgtaggatcaaaaggcccatgtatataagtactgaccactgggccataatgttgcttctcaggctatatgcagtcctttagtcagaagtcaataggcctatttattaatattttacagaccatattacctggattaccagggactatctttgctgcagagatcaagggttaagatctatgggaagatacttatttttctgaggtccttatgtcctgtcatataattaaagactcaagagaatttatgtgaaatgctttctgtatgccccaatctttagattaaaattatatagctgctcctga

SEQ ID NO: 285229 - DNA, 6177 bp, Homo sapiens
tcctgtacctggtaaagtaagagggatccacccaggaacagcagggctgaaaccgatacgggccgttcaaacgctctgggggaaaaacaataccatgtacactgcaaagctcccttgcctttggctgggtgcaacttccattttaggtgttggatctgagggggaaaaaaaagagagagggagagagagagaaagaagagcaggaaagatcccgaaaggaggaagaggtggcgaaaaatcaactgccctgctggatttgtctttctcagcaccttggcgaagccttgggtttctttcttaaaggactgatttttagaactccacatttgagctctctccttcctgcttcctccttgctgtggtggctgggatgcttcttccatgattttttgaatctagactgggctgttctctgtgttaaaccaatcagttgcgaccttctcttaacagtgtgaagtgagggggtctctctccctccttctccttcctctgtgattcaccttcctttttaccctgccctgcggcggctccgccccttaccttcatggacgactcagaggtggagtcgaccgccagcatcttggcctctgtgaaggaacaagaggcccagtttgagaagctgacccgggcgctggaggaggaacggcgccacgtctcggcgcagctggaacgcgtccgggtctcaccacaagatgccaacccactcatggccaacggcacactcacccgccggcatcagaacggccggtttgtgggcgatgctgaccttgaaagacagaaattttcagatttgaaactcaacggaccccaggatcacagtcaccttctatatagcaccatccccaggatgcaggagccggggcagattgtggagacctacacggaggaggatcctgagggagccatgtctgtagtctctgtggagacctcagatgatgggaccactcggcgcacagagaccacggtcaagaaagtagtgaagactgtgacaacacggacagtacagccagtcgctatgggaccagacgggttgcctgtggatgcttcatcagtttctaacaactatatccagactttgggtcgtgatttccgcaagaatggcaatgggggacctggtccctatgtggggcaagctggcactgctacccttcctaggaacttccactaccctcctgatggttatagtcgccactatgaagatggttatccaggtggcagtgataactatggcagtctgtcccgggtgacccgcattgaggagcggtataggcccagcatggaaggctaccgggcacctagtagacaggatgtgtatgggccccaaccccaggttcgggtaggtgggagcagcgtggatctgcatcgctttcatccagagccttatgggctagaggatgaccagcgtagtatgggctatgatgacctggattatggtatgatgtctgattatggcactgcccgtcggactgggacaccctctgaccctcgtcggcgcctcaggagctatgaagacatgattggtgaggaggtgccatcggatcaatactactgggctcctttggcccagcatgagcgaggaagtttagcaagcttggatagcctgcgcaaaggagggcctccacctcctaattggagacagccagagctgccagaggtgatcgccatgcttggattccgcttggatgctgtcaagtccaatgcagctgcatacctgcaacacttatgctaccgcaatgacaaggtgaagactgacgtgcggaagctcaagggcatcccagtactggtgggattgttagaccatcccaaaaaggaagtgcaccttggagcctgtggagctctcaagaatatctcttttggacgtgaccaggataacaagattgccataaaaaactgtgatggtgtgcctgcccttgtgcgattgcttcgaaaggctcgtgatatggaccttactgaagttattaccggaaccctgtggaatctttcatcccatgactcaatcaaaatggagattgtggaccatgcactgcatgccttgacagatgaagtgatcattcctcattctggttgggagcgggaacctaatgaagactgtaagccacgccatattgagtgggaatcggtgctcaccaacacagctggctgccttaggaatgtaagctcagagaggagtgaagctcgccggaaacttcgggaatgtgatggtttagttgatgccctcattttcattgttcaggctgagattgggcagaaggattcagacagcaagcttgtagagaactgtgtttgccttcttcggaacttatcatatcaagttcaccgggagatcccacaggcagagcgttaccaagaggcagctcccaatgttgccaacaatactgggccacatgctgccagttgctttggggccaagaagggcaaagggaaaaaacctatagaggatccagcaaacgatacagtggatttccctaaaagaacgagtccagctcgaggctatgagctcttatttcagccagaggtggttcggatatacatctcacttcttaaggagagcaagactcctgccatcctagaagcctcagctggagctatccagaacttgtgtgctgggcgctggacgtatggtcgatacatccgctctgctctgcgtcaagagaaggctctttctgccatagctgacctcctgactaatgaacatgaacgggtggtgaaagctgcatctggagcactgagaaacctggctgtggatgctcgcaacaaagaattaattggtaaacatgctattcctaacttggtaaagaatctgccaggaggacagcagaactcctcttggaatttctctgaggacactgtcatctctattttgaacactatcaacgaggttatcgctgagaacttggaggctgccaaaaagcttcgagagacacagggtattgagaagctggtgttgatcaacaaatcagggaaccgctcagaaaaagaagttcgagcagcagcacttgtattacagacaatctggggatataaggaactgcggaagccactggaaaaagaaggatggaagaaatcagactttcaggtgaatctaaacaatgcttcccgaagccagagcagtcattcatatgatgatagtactctccctctcattgaccggaaccaaaaatcagataagaaacctgatcgggaagaaattcagatgagcaatatgggatcaaacacaaaatcactagataacaactattccacaccaaatgagagaggagaccacaatagaacactggatcgatcgggggatctaggcgacatggagccattgaagggaacaacacccttgatgcagaagatttagcaccactatctccgttccatctgggcttatatgtacttttattttttggtggtgaaattgactgatgattttcctttttcttcgctggactattgtgccaactgccaggctgcctcctgcccttacagccctaagtggctgccttctttccatcaactcccaacttcttcctgtgaagtttaattgtctcaacgcctccccctcccccattccctccatttttctcccaagaaacctgactcaattatttgcatattttgagaaactgctgcagattagttctttttgccagttttccctggaactcctggccttttgtggaggggagggatggagagaataggaatcttcactagaagccgtgggaagaattggaagttacatgctgtatatgcaatgtccagcagtctgataaactgacgattcttaatcaagatttttttcctgatggggaagggacttttattttcttttagagaggggaaagtgtgagctcttcccttattcctaatggctatttttgaagcaaagaaggccagcaacattggcacatgccacctggcaaaggacccttgagtaagtgaaggtctcctaaaactgggattaagaaaccttgctctcctcatctccaaggcagggaccatcaagaacctacagactccatctcttctgcaagcctcatgccaaccctgggctattgctgctgccccttaaacacaggctgtccttaacccacctctcctgccctgtgatatgtctgctgagttggcctggccatttccaagaggctgtagaaaggggagaatgtcaaggaagacttttggtagagaaggagcagaaagatgtgtttttgggaagaagaagacctctaggaggagctagtaggaatgtacatgaagcaattagtctgaaactggcttccccactcccccgtttctccttttcctatccttataggcctgtcccttgcctctgccctggattggttggcaaactaaaggacttgatgtacataactcctgtcccttttcccttacaaggtggggattgcccctggctttgcctcttctttgtgcctttggcctggggtgcatctcctcccgcccttccatgtgcctttctttgcctctgcagtctcatttctcataattttgcaaattatattttgttgctttcttacctactattggccctaaatagcagaaagaagagaagtgaccgagagaacctcagattcttcattgaggattggtatagccatgatttcagtcatagcaagcttttgctcaacagcatatgggtgggattttgcaaaaatccttggtgtgactcttactccttaggtgcccagaatttaccatcatctctgaaggagttacagggaagtggtctccccaattctcccctccctccagtattgccccctctcactttagcatatattaattagcaggttgggctagagaaatcagctgctatgcgggttgattattattattatttctaatccttttccttatttgccttctactccccttaatctaatctaaaagctctgttccatgcaactggagttccttatccctctcttccccttcccttatatattgaggctatggggtaggagaaaagtgcacaacccaccaccccctttactcgtgcattaaaatttcttatttacccttttcccccttcccatttcttcccactttcatctaccttttctggcaaaaaggagccttttgctctctgtgaccctaagagcacactgcacagggaaaattgccccatccagacctggctccactcttgatctctcttgtcctcttctgctcttttcctggtgctcttttttctcggtggggtgtgggtaatagaacagccgtgggcttttggggacctttaacttttttttctctcttttgtttataaaaaacactaaacattcaattccagagaaccaaaaatcccaccttcccaccgaacactactaaggggcttgtgttctgctccataccttttctcttttctttctgtcttgttaatgcttttaaaaacaaatgagttttttatataaataaagtttttaaagtgtgtatgtggggggtctgtgtcatttcttcacttcaagctgttatttcttccctgctttgcatctttgttacttccttatgtatcagtgtcctttccagagcaaccagaaggaggttataccaggatttattttgagctcagccccaactctttatcaagcaacattcttgttaactatatgtgaaacattttttcttctgaagattcttaaaaattgaatgtggctgaagttgaacatgggagcttattgctaatttagagataggaaactgaagcataaagaattaatgacttactttaattactggaattcttctgcaacatttgacaaaactaaccttgaataaggcccactgtaatacgtagctctcttaaatataacacttaggactagaagattagaaactaccaatcccaactacgtaataggaaaatgtaggatcaaaaggcccatgtatataagtactgaccactgggccataatgttgcttctcaggctatatgcagtcctttagtcagaagtcaataggcctatttattaatattttacagaccatattacctggattaccagggactatctttgctgcagagatcaagggttaagatctatgggaagatacttatttttctgaggtccttatgtcctgtcatataattaaagactcaagagaatttatgtgaaatgctttctgtatgccccaatctttagattaaaattatatagctgctcctga

SEQ ID NO: 285230 - DNA, 5631 bp, Homo sapiens
tcctgtacctggtaaagtaagagggatccacccaggaacagcagggctgaaaccgatacgggccgttcaaacgctctgggggaaaaacaataccatgtacactgcaaagctcccttgcctttggctgggtgcaacttccattttaggtgttggatctgagggggaaaaaaaagagagagggagagagagagaaagaagagcaggaaagatcccgaaaggaggaagaggtggcgaaaaatcaactgccctgctggatttgtctttctcagcaccttggcgaagccttgggtttctttcttaaaggactgatttttagaactccacatttgagctctctccttcctgcttcctccttgctgtggtggctgggatgcttcttccatgattttttgaatctagactgggctgttctctgtgttaaaccaatcagttgcgaccttctcttaacagtgtgaagtgagggggtctctctccctccttctccttcctctgtgattcaccttcctttttaccctgccctgcggcggctccgccccttaccttcatggacgactcagaggtggagtcgaccgccagcatcttggcctctgtgaaggaacaagaggcccagtttgagaagctgacccgggcgctggaggaggaacggcgccacgtctcggcgcagctggaacgcgtccgggtctcaccacaagatgccaacccactcatggccaacggcacactcacccgccggcatcagaacggccggtttgtgggcgatgctgaccttgaaagacagaaattttcagatttgaaactcaacggaccccaggatcacagtcaccttctatatagcaccatccccaggatgcaggagccggggcagattgtggagacctacacggaggaggatcctgagggagccatgtctgtagtctctgtggagacctcagatgatgggaccactcggcgcacagagaccacggtcaagaaagtagtgaagactgtgacaacacggacagtacagccagtcgctatgggaccagacgggttgcctgtggatgcttcatcagtttctaacaactatatccagactttgggtcgtgatttccgcaagaatggcaatgggggacctggtccctatgtggggcaagctggcactgctacccttcctaggaacttccactaccctcctgatggttatagtcgccactatgaagatggttatccaggtggcagtgataactatggcagtctgtcccgggtgacccgcattgaggagcggtataggcccagcatggaaggctaccgggcacctagtagacaggatgtgtatgggccccaaccccaggttcgggtaggtgggagcagcgtggatctgcatcgctttcatccagagccttatgggctagaggatgaccagcgtagtatgggctatgatgacctggattatggtatgatgtctgattatggcactgcccgtcggactgggacaccctctgaccctcgtcggcgcctcaggagctatgaagacatgattggtgaggaggtgccatcggatcaatactactgggctcctttggcccagcatgagcgaggaagtttagcaagcttggatagcctgcgcaaaggagggcctccacctcctaattggagacagccagagctgccagaggtgatcgccatgcttggattccgcttggatgctgtcaagtccaatgcagctgcatacctgcaacacttatgctaccgcaatgacaaggtgaagactgacgtgcggaagctcaagggcatcccagtactggtgggattgttagaccatcccaaaaaggaagtgcaccttggagcctgtggagctctcaagaatatctcttttggacgtgaccaggataacaagattgccataaaaaactgtgatggtgtgcctgcccttgtgcgattgcttcgaaaggctcgtgatatggaccttactgaagttattaccggaaccctgtggaatctttcatcccatgactcaatcaaaatggagattgtggaccatgcactgcatgccttgacagatgaagtgatcattcctcattctggttgggagcgggaacctaatgaagactgtaagccacgccatattgagtgggaatcggtgctcaccaacacagctggctgccttaggaatgtaagctcagagaggagtgaagctcgccggaaacttcgggaatgtgatggtttagttgatgccctcattttcattgttcaggctgagattgggcagaaggattcagacagcaagcttgtagagaactgtgtttgccttcttcggaacttatcatatcaagttcaccgggagatcccacaggcagagcgttaccaagaggcagctcccaatgttgccaacaatactgggccacatgctgccagttgctttggggccaagaagggcaaagggaaaaaacctatagaggatccagcaaacgatacagtggatttccctaaaagaacgagtccagctcgaggctatgagctcttatttcagccagaggtggttcggatatacatctcacttcttaaggagagcaagactcctgccatcctagaagcctcagctggagctatccagaacttgtgtgctgggcgctggacgtatggtcgatacatccgctctgctctgcgtcaagagaaggctctttctgccatagctgacctcctgactaatgaacatgaacgggtggtgaaagctgcatctggagcactgagaaacctggctgtggatgctcgcaacaaagaattaattggtaaacatgctattcctaacttggtaaagaatctgccaggaggacagcagaactcctcttggaatttctctgaggacactgtcatctctattttgaacactatcaacgaggttatcgctgagaacttggaggctgccaaaaagcttcgagagacacagggtattgagaagctggtgttgatcaacaaatcagggaaccgctcagaaaaagaagttcgagcagcagcacttgtattacagacaatctggggatataaggaactgcggaagccactggaaaaagaaggatggaagaaatcagactttcaggtgaatctaaacaatgcttcccgaagccagagcagtcattcatatgatgatagtactctccctctcattgaccggaaccaaaaatcagataagaaacctgatcgggaagaaattcagatgagcaatatgggatcaaacacaaaatcactagataacaactattccacaccaaatgagagaggagaccacaatagaacactggatcgatcgggggatctaggcgacatggagccattgaagggaacaacacccttgatgcagaagatttagcaccactatctccgttccatctgggcttatatgtacttttattttttggtggtgaaattgactgatgattttcctttttcttcgctggactattgtgccaactgccaggctgcctcctgcccttacagccctaagtggctgccttctttccatcaactcccaacttcttcctgtgaagtttaattgtctcaacgcctccccctcccccattccctccatttttctcccaagaaacctgactcaattatttgcatattttgagaaactgctgcagattagttctttttgccagttttccctggaactcctggccttttgtggaggggagggatggagagaataggaatcttcactagaagccgtgggaagaattggaagttacatgctgtatatgcaatgtccagcagtctgataaactgacgattcttaatcaagatttttttcccttacaaggtggggattgcccctggctttgcctcttctttgtgcctttggcctggggtgcatctcctcccgcccttccatgtgcctttctttgcctctgcagtctcatttctcataattttgcaaattatattttgttgctttcttacctactattggccctaaatagcagaaagaagagaagtgaccgagagaacctcagattcttcattgaggattggtatagccatgatttcagtcatagcaagcttttgctcaacagcatatgggtgggattttgcaaaaatcctattctgatgaatctcaaagtaaggctggtaagagaagtgagtggtgtgactcttactccttaggtgcccagaatttaccatcatctctgaaggagttacagggaagtggtctccccaattctcccctccctccagtattgccccctctcactttagcatatattaattagcaggttgggctagagaaatcagctgctatgcgggttgattattattattatttctaatccttttccttatttgccttctactccccttaatctaatctaaaagctctgttccatgcaactggagttccttatccctctcttccccttcccttatatattgaggctatggggtaggagaaaagtgcacaacccaccaccccctttactcgtgcattaaaatttcttatttacccttttcccccttcccatttcttcccactttcatctaccttttctggcaaaaaggagccttttgctctctgtgaccctaagagcacactgcacagggaaaattgccccatccagacctggctccactcttgatctctcttgtcctcttctgctcttttcctggtgctcttttttctcggtggggtgtgggtaatagaacagccgtgggcttttggggacctttaacttttttttctctcttttgtttataaaaaacactaaacattcaattccagagaaccaaaaatcccaccttcccaccgaacactactaaggggcttgtgttctgctccataccttttctcttttctttctgtcttgttaatgcttttaaaaacaaatgagttttttatataaataaagtttttaaagtgtgtatgtggggggtctgtgtcatttcttcacttcaagctgttatttcttccctgctttgcatctttgttacttccttatgtatcagtgtcctttccagagcaaccagaaggaggttataccaggatttattttgagctcagccccaactctttatcaagcaacattcttgttaactatatgtgaaacattttttcttctgaagattcttaaaaattgaatgtggctgaagttgaacatgggagcttattgctaatttagagataggaaactgaagcataaagaattaatgacttactttaattactggaattcttctgcaacatttgacaaaactaaccttgaataaggcccactgtaatacgtagctctcttaaatataacacttaggactagaagattagaaactaccaatcccaactacgtaataggaaaatgtaggatcaaaaggcccatgtatataagtactgaccactgggccataatgttgcttctcaggctatatgcagtcctttagtcagaagtcaataggcctatttattaatattttacagaccatattacctggattaccagggactatctttgctgcagagatcaagggttaagatctatgggaagatacttatttttctgaggtccttatgtcctgtcatataattaaagactcaagagaatttatgtgaaatgctttctgtatgccccaatctttagattaaaattatatagctgctcctga

SEQ ID NO: 285231 - DNA, 6175 bp, Homo sapiens
tcctgtacctggtaaagtaagagggatccacccaggaacagcagggctgaaaccgatacgggccgttcaaacgctctgggggaaaaacaataccatgtacactgcaaagctcccttgcctttggctgggtgcaacttccattttaggtgttggatctgagggggaaaaaaaagagagagggagagagagagaaagaagagcaggaaagatcccgaaaggaggaagaggtggcgaaaaatcaactgccctgctggatttgtctttctcagcaccttggcgaagccttgggtttctttcttaaaggactgatttttagaactccacatttgagctctctccttcctgcttcctccttgctgtggtggctgggatgcttcttccatgattttttgaatctagactgggctgttctctgtgttaaaccaatcagttgcgaccttctcttaacagtgtgaagtgagggggtctctctccctccttctccttcctctgtgattcaccttcctttttaccctgccctgcggcggctccgccccttaccttcatggacgactcagaggtggagtcgaccgccagcatcttggcctctgtgaaggaacaagaggcccagtttgagaagctgacccgggcgctggaggaggaacggcgccacgtctcggcgcagctggaacgcgtccgggtctcaccacaagatgccaacccactcatggccaacggcacactcacccgccggcatcagaacggccggtttgtgggcgatgctgaccttgaaagacagaaattttcagatttgaaactcaacggaccccaggatcacagtcaccttctatatagcaccatccccaggatgcaggagccggggcagattgtggagacctacacggaggaggatcctgagggagccatgtctgtagtctctgtggagacctcagatgatgggaccactcggcgcacagagaccacggtcaagaaagtagtgaagactgtgacaacacggacagtacagccagtcgctatgggaccagacgggttgcctgtggatgcttcatcagtttctaacaactatatccagactttgggtcgtgatttccgcaagaatggcaatgggggacctggtccctatgtggggcaagctggcactgctacccttcctaggaacttccactaccctcctgatggttatagtcgccactatgaagatggttatccaggtggcagtgataactatggcagtctgtcccgggtgacccgcattgaggagcggtataggcccagcatggaaggctaccgggcacctagtagacaggatgtgtatgggccccaaccccaggttcgggtaggtgggagcagcgtggatctgcatcgctttcatccagagccttatgggctagaggatgaccagcgtagtatgggctatgatgacctggattatggtatgatgtctgattatggcactgcccgtcggactgggacaccctctgaccctcgtcggcgcctcaggagctatgaagacatgattggtgaggaggtgccatcggatcaatactactgggctcctttggcccagcatgagcgaggaagtttagcaagcttggatagcctgcgcaaaggagggcctccacctcctaattggagacagccagagctgccagaggtgatcgccatgcttggattccgcttggatgctgtcaagtccaatgcagctgcatacctgcaacacttatgctaccgcaatgacaaggtgaagactgacgtgcggaagctcaagggcatcccagtactggtgggattgttagaccatcccaaaaaggaagtgcaccttggagcctgtggagctctcaagaatatctcttttggacgtgaccaggataacaagattgccataaaaaactgtgatggtgtgcctgcccttgtgcgattgcttcgaaaggctcgtgatatggaccttactgaagttattaccggaaccctgtggaatctttcatcccatgactcaatcaaaatggagattgtggaccatgcactgcatgccttgacagatgaagtgatcattcctcattctggttgggagcgggaacctaatgaagactgtaagccacgccatattgagtgggaatcggtgctcaccaacacagctggctgccttaggaatgtaagctcagagaggagtgaagctcgccggaaacttcgggaatgtgatggtttagttgatgccctcattttcattgttcaggctgagattgggcagaaggattcagacagcaagcttgtagagaactgtgtttgccttcttcggaacttatcatatcaagttcaccgggagatcccacaggcagagcgttaccaagaggcagctcccaatgttgccaacaatactgggccacatgctgccagttgctttggggccaagaagggcaaagggaaaaaacctatagaggatccagcaaacgatacagtggatttccctaaaagaacgagtccagctcgaggctatgagctcttatttcagccagaggtggttcggatatacatctcacttcttaaggagagcaagactcctgccatcctagaagcctcagctggagctatccagaacttgtgtgctgggcgctggacgtatggtcgatacatccgctctgctctgcgtcaagagaaggctctttctgccatagctgacctcctgactaatgaacatgaacgggtggtgaaagctgcatctggagcactgagaaacctggctgtggatgctcgcaacaaagaattaattggtaaacatgctattcctaacttggtaaagaatctgccaggaggacagcagaactcctcttggaatttctctgaggacactgtcatctctattttgaacactatcaacgaggttatcgctgagaacttggaggctgccaaaaagcttcgagagacacagggtattgagaagctggtgttgatcaacaaatcagggaaccgctcagaaaaagaagttcgagcagcagcacttgtattacagacaatctggggatataaggaactgcggaagccactggaaaaagaaggatggaagaaatcagactttcaggtgaatctaaacaatgcttcccgaagccagagcagtcattcatatgatgatagtactctccctctcattgaccggaaccaaaaatcagataagaaacctgatcgggaagaaattcagatgagcaatatgggatcaaacacaaaatcactagataacaactattccacaccaaatgagagaggagaccacaatagaacactggatcgatcgggggatctaggcgacatggagccattgaagggaacaacacccttgatgcagaagatttagcaccactatctccgttccatctgggcttatatgtacttttattttttggtggtgaaattgactgatgattttcctttttcttcgctggactattgtgccaactgccaggctgcctcctgcccttacagccctaagtggctgccttctttccatcaactcccaacttcttcctgtgaagtttaattgtctcaacgcctccccctcccccattccctccatttttctcccaagaaacctgactcaattatttgcatattttgagaaactgctgcagattagttctttttgccagttttccctggaactcctggccttttgtggaggggagggatggagagaataggaatcttcactagaagccgtgggaagaattggaagttacatgctgtatatgcaatgtccagcagtctgataaactgacgattcttaatcaagatttttttcctgatggggaagggacttttattttcttttagagaggggaaagtgtgagctcttcccttattcctaatggctatttttgaagcaaagaaggccagcaacattggcacatgccacctggcaaaggacccttgagtaagtgaaggtctcctaaaactgggattaagaaaccttgctctcctcatctccaaggcagggaccatcaagaacctacagactccatctcttctgcaagcctcatgccaaccctgggctattgctgctgccccttaaacacaggctgtccttaacccacctctcctgccctgtgatatgtctgctgagttggcctggccatttccaagaggctgtagaaaggggagaatgtcaaggaagacttttggtagagaaggagcagaaagatgtgtttttgggaagaagaagacctctaggaggagctagtaggaatgtacatgaagcaattagtctgaaactggcttccccactcccccgtttctccttttcctatccttataggcctgtcccttgcctctgccctggattggttggcaaactaaaggacttgatgtacataactcctgtcccttttcccttacaaggtggggattgcccctggctttgcctcttctttgtgcctttggcctggggtgcatctcctcccgcccttccatgtgcctttctttgcctctgcagtctcatttctcataattttgcaaattatattttgttgctttcttacctactattggccctaaatagcagaaagaagagaagtgaccgagagaacctcagattcttcattgaggattggtatagccatgatttcagtcatagcaagcttttgctcaacagcatatgggtgggattttgcaaaaatcctattctgatgaatctcaaagtaaggctggtaagagaagtgagtggtgtgactcttactccttaggtgcccagaatttaccatcatctctgaaggagttacagggaagtggtctccccaattctcccctccctccagtattgccccctctcactttagcatatattaattagcaggttgggctagagaaatcagctgctatgcgggttgattattattattatttctaatccttttccttatttgccttctactccccttaatctaatctaaaagctctgttccatgcaactggagttccttatccctctcttccccttcccttatatattgaggctatggggtaggagaaaagtgcacaacccaccaccccctttactcgtgcattaaaatttcttatttacccttttcccccttcccatttcttcccactttcatctaccttttctggcaaaaaggagccttttgctctctgtgaccctaagagcacactgcacagggaaaattgccccatccagacctggctccactcttgatctctcttgtcctcttctgctcttttcctggtgctcttttttctcggtggggtgtgggtaatagaacagccgtgggcttttggggacctttaacttttttttctctcttttgtttataaaaaacactaaacattcaattccagagaaccaaaaatcccaccttcccaccgaacactactaaggggcttgtgttctgctccataccttttctcttttctttctgtcttgttaatgcttttatatgtggggggtctgtgtcatttcttcacttcaagctgttatttcttccctgctttgcatctttgttacttccttatgtatcagtgtcctttccagagcaaccagaaggaggttataccaggatttattttgagctcagccccaactctttatcaagcaacattcttgttaactatatgtgaaacattttttcttctgaagattcttaaaaattgaatgtggctgaagttgaacatgggagcttattgctaatttagagataggaaactgaagcataaagaattaatgacttactttaattactggaattcttctgcaacatttgacaaaactaaccttgaataaggcccactgtaatacgtagctctcttaaatataacacttaggactagaagattagaaactaccaatcccaactacgtaataggaaaatgtaggatcaaaaggcccatgtatataagtactgaccactgggccataatgttgcttctcaggctatatgcagtcctttagtcagaagtcaataggcctatttattaatattttacagaccatattacctggattaccagggactatctttgctgcagagatcaagggttaagatctatgggaagatacttatttttctgaggtccttatgtcctgtcatataattaaagactcaagagaatttatgtgaaatgctttctgtatgccccaatctttagattaaaattatatagctgctcctga

SEQ ID NO: 285232 - DNA, 6189 bp, Homo sapiens
tcctgtacctggtaaagtaagagggatccacccaggaacagcagggctgaaaccgatacgggccgttcaaacgctctgggggaaaaacaataccatgtacactgcaaagctcccttgcctttggctgggtgcaacttccattttaggtgttggatctgagggggaaaaaaaagagagagggagagagagagaaagaagagcaggaaagatcccgaaaggaggaagaggtggcgaaaaatcaactgccctgctggatttgtctttctcagcaccttggcgaagccttgggtttctttcttaaaggactgatttttagaactccacatttgagctctctccttcctgcttcctccttgctgtggtggctgggatgcttcttccatgattttttgaatctagactgggctgttctctgtgttaaaccaatcagttgcgaccttctcttaacagtgtgaagtgagggggtctctctccctccttctccttcctctgtgattcaccttcctttttaccctgccctgcggcggctccgccccttaccttcatggacgactcagaggtggagtcgaccgccagcatcttggcctctgtgaaggaacaagaggcccagtttgagaagctgacccgggcgctggaggaggaacggcgccacgtctcggcgcagctggaacgcgtccgggtctcaccacaagatgccaacccactcatggccaacggcacactcacccgccggcatcagaacggccggtttgtgggcgatgctgaccttgaaagacagaaattttcagatttgaaactcaacggaccccaggatcacagtcaccttctatatagcaccatccccaggatgcaggagccggggcagattgtggagacctacacggaggaggatcctgagggagccatgtctgtagtctctgtggagacctcagatgatgggaccactcggcgcacagagaccacggtcaagaaagtagtgaagactgtgacaacacggacagtacagccagtcgctatgggaccagacgggttgcctgtggatgcttcatcagtttctaacaactatatccagactttgggtcgtgatttccgcaagaatggcaatgggggacctggtccctatgtggggcaagctggcactgctacccttcctaggaacttccactaccctcctgatggttatagtcgccactatgaagatggttatccaggtggcagtgataactatggcagtctgtcccgggtgacccgcattgaggagcggtataggcccagcatggaaggctaccgggcacctagtagacaggatgtgtatgggccccaaccccaggttcgggtaggtgggagcagcgtggatctgcatcgctttcatccagagccttatgggctagaggatgaccagcgtagtatgggctatgatgacctggattatggtatgatgtctgattatggcactgcccgtcggactgggacaccctctgaccctcgtcggcgcctcaggagctatgaagacatgattggtgaggaggtgccatcggatcaatactactgggctcctttggcccagcatgagcgaggaagtttagcaagcttggatagcctgcgcaaaggagggcctccacctcctaattggagacagccagagctgccagaggtgatcgccatgcttggattccgcttggatgctgtcaagtccaatgcagctgcatacctgcaacacttatgctaccgcaatgacaaggtgaagactgacgtgcggaagctcaagggcatcccagtactggtgggattgttagaccatcccaaaaaggaagtgcaccttggagcctgtggagctctcaagaatatctcttttggacgtgaccaggataacaagattgccataaaaaactgtgatggtgtgcctgcccttgtgcgattgcttcgaaaggctcgtgatatggaccttactgaagttattaccggaaccctgtggaatctttcatcccatgactcaatcaaaatggagattgtggaccatgcactgcatgccttgacagatgaagtgatcattcctcattctggttgggagcgggaacctaatgaagactgtaagccacgccatattgagtgggaatcggtgctcaccaacacagctggctgccttaggaatgtaagctcagagaggagtgaagctcgccggaaacttcgggaatgtgatggtttagttgatgccctcattttcattgttcaggctgagattgggcagaaggattcagacagcaagcttgtagagaactgtgtttgccttcttcggaacttatcatatcaagttcaccgggagatcccacaggcagagcgttaccaagaggcagctcccaatgttgccaacaatactgggccacatgctgccagttgctttggggccaagaagggcaaagggaaaaaacctatagaggatccagcaaacgatacagtggatttccctaaaagaacgagtccagctcgaggctatgagctcttatttcagccagaggtggttcggatatacatctcacttcttaaggagagcaagactcctgccatcctagaagcctcagctggagctatccagaacttgtgtgctgggcgctggacgtatggtcgatacatccgctctgctctgcgtcaagagaaggctctttctgccatagctgacctcctgactaatgaacatgaacgggtggtgaaagctgcatctggagcactgagaaacctggctgtggatgctcgcaacaaagaattaattggtaaacatgctattcctaacttggtaaagaatctgccaggaggacagcagaactcctcttggaatttctctgaggacactgtcatctctattttgaacactatcaacgaggttatcgctgagaacttggaggctgccaaaaagcttcgagagacacagggtattgagaagctggtgttgatcaacaaatcagggaaccgctcagaaaaagaagttcgagcagcagcacttgtattacagacaatctggggatataaggaactgcggaagccactggaaaaagaaggatggaagaaatcagactttcaggtgaatctaaacaatgcttcccgaagccagagcagtcattcatatgatgatagtactctccctctcattgaccggaaccaaaaatcagataagaaacctgatcgggaagaaattcagatgagcaatatgggatcaaacacaaaatcactagataacaactattccacaccaaatgagagaggagaccacaatagaacactggatcgatcgggggatctaggcgacatggagccattgaagggaacaacacccttgatgcagaagatttagcaccactatctccgttccatctgggcttatatgtacttttattttttggtggtgaaattgactgatgattttcctttttcttcgctggactattgtgccaactgccaggctgcctcctgcccttacagccctaagtggctgccttctttccatcaactcccaacttcttcctgtgaagtttaattgtctcaacgcctccccctcccccattccctccatttttctcccaagaaacctgactcaattatttgcatattttgagaaactgctgcagattagttctttttgccagttttccctggaactcctggccttttgtggaggggagggatggagagaataggaatcttcactagaagccgtgggaagaattggaagttacatgctgtatatgcaatgtccagcagtctgataaactgacgattcttaatcaagatttttttcctgatggggaagggacttttattttcttttagagaggggaaagtgtgagctcttcccttattcctaatggctatttttgaagcaaagaaggccagcaacattggcacatgccacctggcaaaggacccttgagtaagtgaaggtctcctaaaactgggattaagaaaccttgctctcctcatctccaaggcagggaccatcaagaacctacagactccatctcttctgcaagcctcatgccaaccctgggctattgctgctgccccttaaacacaggctgtccttaacccacctctcctgccctgtgatatgtctgctgagttggcctggccatttccaagaggctgtagaaaggggagaatgtcaaggaagacttttggtagagaaggagcagaaagatgtgtttttgggaagaagaagacctctaggaggagctagtaggaatgtacatgaagcaattagtctgaaactggcttccccactcccccgtttctccttttcctatccttataggcctgtcccttgcctctgccctggattggttggcaaactaaaggacttgatgtacataactcctgtcccttttcccttacaaggtggggattgcccctggctttgcctcttctttgtgcctttggcctggggtgcatctcctcccgcccttccatgtgcctttctttgcctctgcagtctcatttctcataattttgcaaattatattttgttgctttcttacctactattggccctaaatagcagaaagaagagaagtgaccgagagaacctcagattcttcattgaggattggtatagccatgatttcagtcatagcaagcttttgctcaacagcatatgggtgggattttgcaaaaatcctattctgatgaatctcaaagtaaggctggtaagagaagtgagtggtgtgactcttactccttaggtgcccagaatttaccatcatctctgaaggagttacagggaagtggtctccccaattctcccctccctccagtattgccccctctcactttagcatatattaattagcaggttgggctagagaaatcagctgctatgcgggttgattattattattatttctaatccttttccttatttgccttctactccccttaatctaatctaaaagctctgttccatgcaactggagttccttatccctctcttccccttcccttatatattgaggctatggggtaggagtcgtgcattaaaatttcttatttacccttttcccccttcccatttcttcccactttcatctaccttttctggcaaaaaggagccttttgctctctgtgaccctaagagcacactgcacagggaaaattgccccatccagacctggctccactcttgatctctcttgtcctcttctgctcttttcctggtgctcttttttctcggtggggtgtgggtaatagaacagccgtgggcttttggggacctttaacttttttttctctcttttgtttataaaaaacactaaacattcaattccagagaaccaaaaatcccaccttcccaccgaacactactaaggggcttgtgttctgctccataccttttctcttttctttctgtcttgttaatgcttttaaaaacaaatgagttttttatataaataaagtttttaaagtgtgtatgtggggggtctgtgtcatttcttcacttcaagctgttatttcttccctgctttgcatctttgttacttccttatgtatcagtgtcctttccagagcaaccagaaggaggttataccaggatttattttgagctcagccccaactctttatcaagcaacattcttgttaactatatgtgaaacattttttcttctgaagattcttaaaaattgaatgtggctgaagttgaacatgggagcttattgctaatttagagataggaaactgaagcataaagaattaatgacttactttaattactggaattcttctgcaacatttgacaaaactaaccttgaataaggcccactgtaatacgtagctctcttaaatataacacttaggactagaagattagaaactaccaatcccaactacgtaataggaaaatgtaggatcaaaaggcccatgtatataagtactgaccactgggccataatgttgcttctcaggctatatgcagtcctttagtcagaagtcaataggcctatttattaatattttacagaccatattacctggattaccagggactatctttgctgcagagatcaagggttaagatctatgggaagatacttatttttctgaggtccttatgtcctgtcatataattaaagactcaagagaatttatgtgaaatgctttctgtatgccccaatctttagattaaaattatatagctgctcctga

SEQ ID NO: 285233 - DNA, 1566 bp, Homo sapiens
tgctcccttaggcagcgcctcctcaactgccctcagtttcccaatcaggtagtgagagtggcacgaaccagccgttctcctgagccaccccccgcgcccccggactcctcaatatcccaggtgggaacgctcaccagggacatccagcgcccgtcgccctgtacgtcctgcaccggcgtgggcttgctggctgggttctcctctccactcatcttggcgccgcagctcctgcaggatgagcgagtcgggtcggcccgggagtgttccgaacggagctggctccgccacgcccactcctacccctcgcggcaacaaaggaccgtcccaacgctagcacacccgcggaggacgaaggccgatacagggcgccgcctcctctccagggacggaagccttcacttaggaggacaccatggatacccagggaccagtctcccagccttttcagcagcctgagaaacctggtcgtgtccgtcgtcggaagactaggcgggaacgtaacaaggccctggtgggcagccgccggccattagcccaccacgatcctcctgtggccattcgggatccacctgtggtccctactgcctccaagctcgtggtcataacccagggccggctgagccgggagcaccggggtctcttcaaccacgaggtgaaatccctagatgttgcaaggctgcttagcagtgggaccctggtgccaggcagccccacactccccgccaagccctccccaagcccaggcagggcccaggaaccagccccacggtccagggacaaagagaaccaggtgcctggaggttcgggcccaggcccacccagttccccagagttgtctggcgtggggcagctgctggcagagctgcagtgtcagctgagtttgccacaggccttcccccggaggaacctgattcaggatgccagggatgccatcgtgcacaccttgcaggcctgtcatggttgtgtgcctgaccttgccctggtgcttcggggctgccagccacccttgccaggggccaagcctggggtctctgagagaaagatgacacccttctggattaatagccctgatcaagtcccagagcaggagaggcaaaggaagcaacaagggacaaaggagttcaccttccccatgccctacacctccagcatgcccactgcgcacagggggagtctggcaccgccaagaggtccctggccaccatactttccctcactgtcttcgccatctggaacagcctggggtcccccaacagcgtttgacttgttaaaaagcatctggctggtagccacgccaccccctcctcggccctggggggttggcctccctcagcccctgcctcagccttcatcacccctgttgccccgaacctctgtcctggactggagccccagccccccttccccactgcccagcctctcctgggtagtagcccagagcagtccggaagcctggtcttttccacccatgagactgtactgaggagaggctgaggctagggctggggacagatatcttgtactcccagtgacctcaataaagtacttttcatggtcctcttgatt

SEQ ID NO: 285234 - DNA, 1250 bp, Homo sapiens
ttcgagagctggggtcaccgcggaaaagaagccattgcgccccacagctacgtgaagtgggaagggccggggttcgttggggcgagagaggacaccatggatacccagggaccagtctcccagccttttcagcagcctgagaaacctggtcgtgtccgtcgtcggaagactaggcgggaacgtaacaaggccctggtgggcagccgccggccattagcccaccacgatcctcctgtggccattcgggatccacctgtggtccctactgcctccaagctcgtggtcataacccagggccggctgagccgggagcaccggggtctcttcaaccacgaggtgaaatccctagatgttgcaaggctgcttagcagtgggaccctggtgccaggcagccccacactccccgccaagccctccccaagcccaggcagggcccaggaaccagccccacggtccagggacaaagagaaccaggtgcctggaggttcgggcccaggcccacccagttccccagagttgtctggcgtggggcagctgctggcagagctgcagtgtcagctgagtttgccacaggccttcccccggaggaacctgattcaggatgccagggatgccatcgtgcacaccttgcaggcctgtcatggttgtgtgcctgaccttgccctggtgcttcggggctgccagccacccttgccaggggccaagcctggggtctctgagagaaagatgacacccttctggattaatagccctgatcaagtcccagagcaggagaggcaaaggaagcaacaagggacaaaggagttcaccttccccatgccctacacctccagcatgcccactgcgcacagggggagtctggcaccgccaagaggtccctggccaccatactttccctcactgtcttcgccatctggaacagcctggggtcccccaacagcgtttgacttgttaaaaagcatctggctggtagccacgccaccccctcctcggccctggggggttggcctccctcagcccctgcctcagccttcatcacccctgttgccccgaacctctgtcctggactggagccccagccccccttccccactgcccagcctctcctgggtagtagcccagagcagtccggaagcctggtcttttccacccatgagactgtactgaggagaggctgaggctagggctggggacagatatcttgtactcccagtgacctcaataaagtacttttcatggtcctcttgatt

SEQ ID NO: 285235 - DNA, 713 bp, Homo sapiens
agtgtcagctgagtttgccacaggccttcccccggaggaacctgattcaggatgccagggatgccatcgtgcacaccttgcaggcctgtcatggttgtgtgcctgaccttgccctggtgcttcggggctgccagccacccttgccaggtgagcgtccctcctgcccctgtactcccctttcctttgtcggctctagctcagctagcctctatgcttctttcctctgtgccaggggccaagcctggggtctctgagagaaagatgacacccttctggattaatagccctgatcaagtcccagagcaggagaggcaaaggaagcaacaagggacaaaggagttcaccttccccatgccctacacctccagcatgcccactgcgcacagggggagtctggcaccgccaagaggtccctggccaccatactttccctcactgtcttcgccatctggaacagcctggggtcccccaacagcgtttgacttgttaaaaagcatctggctggtagccacgccaccccctcctcggccctggggggttggcctccctcagcccctgcctcagccttcatcacccctgttgccccgaacctctgtcctggactggagccccagccccccttccccactgcccagcctctcctgggtagtagcccagagcagtccggaagcctggtcttttccacccatgagactgtactgaggagaggctga

SEQ ID NO: 285236 - DNA, 1537 bp, Homo sapiens
ggcggagtttctgcatatggcaaggccaaggcatcttgtattggggctgacagggggcgggttattagggctgaggatgggaggatgctcagggtattggggtcagggtggcattagcccagctcaagccgggccgggctgactcagcatcctgccccagccagcttccatccctgacacctctgcactcccttgggcagagatgggagatggcgccggtgttgcccctggtgctgcccctgcagccccgcatccgcctggcacaagggctctggctcctctcctggctgctggcgctggctggtggcgtcatcctcctctgtagtgggcacctcctggtccagctaaggcaccttggcaccttcctggctccctcctgtcagttccctgtcctgccccaggctgccctggcagcgggcgcggtggctctgggcacaggactagtgggtgtaggagccagccgggcaagtctgaatgcagctctataccctccctggcgaggggtcctgggcccgctgctggtggctggcacggctggtgggggggggctcctggtcgtcgccctcgggctagccctggctttgcctgggagtctggatgaggcgctggaggagggcctggtgactgccttggctcactacaaggacacagaggtgcctgggcactgtcaggccaaaaggctggtggatgagctgcaactgaggtaccactgctgcgggcgccacgggtacaaggattggtttggggtccagtgggtcagcagccgttacctggatcccggtgaccgggatgtggctgaccggatccagagcaatgtagaaggcctatacctgactgatggggtccctttctcctgttgcaacccccactcaccccggccttgcctgcaaaaccgtctttcagactcctacgcccaccccctgttcgatccccgacaacccaaccaaaacctctgggcccaagggtgccatgaggtgctgctggagcacttgcaggacttggcaggcacactgggtagcatgctggctgtcaccttcctactgcaggctctggtgctccttggcctgcggtacctgcaaacagcactggaggggcttggaggggtcattgatgcgggaggagagacccagggctatctctttcccagtgggctgaaagatatgctgaaaacagcatggctacagggaggggttgcctgcaggccagcacctgaggaggccccaccaggagaagcacctcccaaggaggatctatctgaggcctagaggcctggagcttggggtgaggaagagggagggatggacaagtctgaaaacctcacaactccttaccaaggctccaggttggggggatcgtaggattagaggggctaaggatagtcagcgagctggactggggtaagaaagaaaaccagatgtcctagggcctagcccttgtagtcagaaccaccagggaacagcaaagaacagagtgatgggaaagtgacatgagaaggcctggaggctgattctgatatagactcaataaagtttttgga

SEQ ID NO: 285237 - DNA, 773 bp, Homo sapiens
gatagctgcagcgactctcttatttccaccgctcaccggatccagagcaatgtagaaggcctatacctgactgatggggtccctttctcctgttgcaacccccactcaccccggccttgcctgcaaaaccgtctttcagactcctacgcccaccccctgttcgatccccgacaacccaaccaaaacctctgggcccaagggtgccatgaggtgctgctggagcacttgcaggacttggcaggcacactgggtagcatgctggctgtcaccttcctactgcaggctctggtgctccttggcctgcggtacctgcaaacagcactggaggggcttggaggggtcattgatgcgggaggagagacccagggctatctctttcccagtgggctgaaagatatgctgaaaacagcatggctacagggaggggttgcctgcaggccagcacctgaggaggccccaccaggagaagcacctcccaaggaggatctatctgaggcctagaggcctggagcttggggtgaggaagagggagggatggacaagtctgaaaacctcacaactccttaccaaggctccaggttggggggatcgtaggattagaggggctaaggatagtcagcgagctggactggggtaagaaagaaaaccagatgtcctagggcctagcccttgtagtcagaaccaccagggaacagcaaagaacagagtgatgggaaagtgacatgagaaggcctggaggctgattctgatatagactcaataaagtttttgga

SEQ ID NO: 285238 - DNA, 439 bp, Homo sapiens
ggcggagtttctgcatatggcaaggccaaggcatcttgtattggggctgacagggggcgggttattagggctgaggatgggaggatgctcagggtattggggtcagggtggcattagcccagctcaagccgggccgggctgactcagcatcctgccccagccagcttccatccctgacacctctgcactcccttgggcagagatgggagatggcgccggtgttgcccctggtgctgcccctgcagccccgcatccgcctggcacaagggggctaaggatagtcagcgagctggactggggtaagaaagaaaaccagatgtcctagggcctagcccttgtagtcagaaccaccagggaacagcaaagaacagagtgatgggaaagtgacatgagaaggcctggaggctgattctgatatagactcaataaagtttttgga

SEQ ID NO: 285239 - DNA, 1441 bp, Homo sapiens
ggcggagtttctgcatatggcaaggccaaggcatcttgtattggggctgacagggggcgggttattagggctgaggatgggaggatgctcagggtattggggtcagggtggcattagcccagctcaagccgggccgggctgactcagcatcctgccccagccagcttccatccctgacacctctgcactcccttgggcagagatgggagatggcgccggtgttgcccctggtgctgcccctgcagccccgcatccgcctggcacaagggctctggctcctctcctggctgctggcgctggctggtggcgtcatcctcctctgtagtgggcacctcctggtccagctaaggcaccttggcaccttcctggctccctcctgtcagttccctgtcctgccccaggctgccctggcagcgggcgcggtggctctgggcacaggactagtgggtgtaggagccagccgggcaagtctgaatgcagctctataccctccctggcgaggggtcctgggcccgctgctggtggctggcacggctggtgggggggggctcctggtcgtcgccctcgggctagccctggctttgcctgggagtctggatgaggcgctggaggagggcctggtgactgccttggctcactacaaggacacagaggtgcctgggcactgtcaggccaaaaggctggtggatgagctgcaactgagccggatccagagcaatgtagaaggcctatacctgactgatggggtccctttctcctgttgcaacccccactcaccccggccttgcctgcaaaaccgtctttcagactcctacgcccaccccctgttcgatccccgacaacccaaccaaaacctctgggcccaagggtgccatgaggtgctgctggagcacttgcaggacttggcaggcacactgggtagcatgctggctgtcaccttcctactgcaggctctggtgctccttggcctgcggtacctgcaaacagcactggaggggcttggaggggtcattgatgcgggaggagagacccagggctatctctttcccagtgggctgaaagatatgctgaaaacagcatggctacagggaggggttgcctgcaggccagcacctgaggaggccccaccaggagaagcacctcccaaggaggatctatctgaggcctagaggcctggagcttggggtgaggaagagggagggatggacaagtctgaaaacctcacaactccttaccaaggctccaggttggggggatcgtaggattagaggggctaaggatagtcagcgagctggactggggtaagaaagaaaaccagatgtcctagggcctagcccttgtagtcagaaccaccagggaacagcaaagaacagagtgatgggaaagtgacatgagaaggcctggaggctgattctgatatagactcaataaagtttttgga

SEQ ID NO: 285240 - DNA, 1217 bp, Homo sapiens
tggtgtgccagagccctgcagggaggaagggggcacctgcagccgcagcaggcgaagggcttctgccagggctgcctttaccagttccatctcctgctcctgcacccgaagccgctggctcagagactggagggcctcccgagcagggccgtcacctgggaaaagggcaagaggtactcagaatgtacccatcacctgaagaaagcgtagaggggattctgtctccccacaactttacatgtgtccggtaggactgcccctttcaggcagccccaggcttgaatgctcgtccagaggggaggagacggtggtaaaggatcaagggcctccttctggcagggcaggcgagaaacctggcaaagctcccttcctgctgccgtctcagcctccgcaaagactgggagtaccatggagtaccgggggggaaatatggagtactgccgaggaacgtgggagccacagagagaggcgccgcactgccggatccagagcaatgtagaaggcctatacctgactgatggggtccctttctcctgttgcaacccccactcaccccggccttgcctgcaaaaccgtctttcagactcctacgcccaccccctgttcgatccccgacaacccaaccaaaacctctgggcccaagggtgccatgaggtgctgctggagcacttgcaggacttggcaggcacactgggtagcatgctggctgtcaccttcctactgcaggctctggtgctccttggcctgcggtacctgcaaacagcactggaggggcttggaggggtcattgatgcgggaggagagacccagggctatctctttcccagtgggctgaaagatatgctgaaaacagcatggctacagggaggggttgcctgcaggccagcacctgaggaggccccaccaggagaagcacctcccaaggaggatctatctgaggcctagaggcctggagcttggggtgaggaagagggagggatggacaagtctgaaaacctcacaactccttaccaaggctccaggttggggggatcgtaggattagaggggctaaggatagtcagcgagctggactggggtaagaaagaaaaccagatgtcctagggcctagcccttgtagtcagaaccaccagggaacagcaaagaacagagtgatgggaaagtgacatgagaaggcctggaggctgattctgatatagactcaataaagtttttgga

SEQ ID NO: 285241 - DNA, 1544 bp, Homo sapiens
  misc_feature (909)..(909): n is a, c, g, or t
  misc_feature (1034)..(1034): n is a, c, g, or t
  misc_feature (1191)..(1191): n is a, c, g, or t
  misc_feature (1249)..(1249): n is a, c, g, or t
  misc_feature (1253)..(1253): n is a, c, g, or t
  misc_feature (1304)..(1304): n is a, c, g, or t
  misc_feature (1353)..(1353): n is a, c, g, or t
  misc_feature (1385)..(1385): n is a, c, g, or t
  misc_feature (1392)..(1392): n is a, c, g, or t
  misc_feature (1452)..(1452): n is a, c, g, or t
  misc_feature (1454)..(1454): n is a, c, g, or t
  misc_feature (1480)..(1480): n is a, c, g, or t
  misc_feature (1484)..(1484): n is a, c, g, or t
  misc_feature (1492)..(1492): n is a, c, g, or t
  misc_feature (1498)..(1498): n is a, c, g, or t
  misc_feature (1514)..(1514): n is a, c, g, or t
  misc_feature (1543)..(1543): n is a, c, g, or t
tttttttttagtataaatataggttttaatattttctctctacattctatggacaacctccatgcctttgcacatgctgatccctcctcctggaattcctttcctacttgtcctcatgtacaattttctgctcgtccttcaaggggcagcttgcaagcctccctttagacacctctacaggtacagccgaccatgccctacctccatggcactgccaggggacccttataggcctctgtctttaaacctgtaatggtatattaatccttggtgtttgaatgtctctctctcccctgccagctcaagaacctgttgagaggagcacctagcataagacctggcttgtgacaggtttgtaataagtacattgatgatgcagtgagttgaatagtggagtgagtgaagaggaggtggtcaaaatatctaacaacccatatagtggctaggtgggggatggtggtgggaagttcaagggcatggcaccagcatctgcttgaccatctggtgaaggctttcatgacagaaggggagagggcaaagaagtacatgcagaagagaccgcaagggcaagctaagctcacctttatgatgagctgctcttgtgagaactaatgcacttcctagaactaactcaatcctgtgttaatggcattaatccattcgtgagggctctaccctcatgacccaatcaccttttaaggccccacctcccagttccatcagtggcaactaaatttcagcataagtttttatggagacactcaaaacatactatatacatatagtacgcctctgcagtcaaacctcaagccagtcttcttttcccatctcatttacctttccaaataaggcctttaacccaatcccagtctgaccatggtgcatgaactagacatgtgagatttcatnttgcataaatatatatatgtatatatatatatatatatagtatatatactgtgtttcaggtgtccccataaaaattaacatttttatatatcatattatatataacatatataacatttatatancatattatatataacatttatatatcatattatatataacataacatttatatatatcatattatatataacatataacatttatatatcatattatatataacatataacatttatatatcatattatatataacataacatttatatatcatatnatatataacataacatttatatatcatatcatatataacatataacatttatatatcntatnatatataacatataacatttatatatcatattatatataacatataacatntatatatcatattatatataacatataacatttatatatcatattatanataacatataacatttatatatcatattatanataacanataacatttatatatcatattatatataacataacatttatatatcatattatatataananataacatttatatatcatattatatntaanataacatntatatntcatattatatataanataacatttatatatcatattatatatant

SEQ ID NO: 285242 - DNA, 1546 bp, Homo sapiens
  misc_feature (911)..(911): n is a, c, g, or t
  misc_feature (1036)..(1036): n is a, c, g, or t
  misc_feature (1193)..(1193): n is a, c, g, or t
  misc_feature (1251)..(1251): n is a, c, g, or t
  misc_feature (1255)..(1255): n is a, c, g, or t
  misc_feature (1306)..(1306): n is a, c, g, or t
  misc_feature (1355)..(1355): n is a, c, g, or t
  misc_feature (1387)..(1387): n is a, c, g, or t
  misc_feature (1394)..(1394): n is a, c, g, or t
  misc_feature (1454)..(1454): n is a, c, g, or t
  misc_feature (1456)..(1456): n is a, c, g, or t
  misc_feature (1482)..(1482): n is a, c, g, or t
  misc_feature (1486)..(1486): n is a, c, g, or t
  misc_feature (1494)..(1494): n is a, c, g, or t
  misc_feature (1500)..(1500): n is a, c, g, or t
  misc_feature (1516)..(1516): n is a, c, g, or t
  misc_feature (1545)..(1545): n is a, c, g, or t
gtgctgggtgatctagaggatcccagttcgacggagactctctacattctatggacaacctccatgcctttgcacatgctgatccctcctcctggaattcctttcctacttgtcctcatgtacaattttctgctcgtccttcaaggggcagcttgcaagcctccctttagacacctctacaggtacagccgaccatgccctacctccatggcactgccaggggacccttataggcctctgtctttaaacctgtaatggtatattaatccttggtgtttgaatgtctctctctcccctgccagctcaagaacctgttgagaggagcacctagcataagacctggcttgtgacaggtttgtaataagtacattgatgatgcagtgagttgaatagtggagtgagtgaagaggaggtggtcaaaatatctaacaacccatatagtggctaggtgggggatggtggtgggaagttcaagggcatggcaccagcatctgcttgaccatctggtgaaggctttcatgacagaaggggagagggcaaagaagtacatgcagaagagaccgcaagggcaagctaagctcacctttatgatgagctgctcttgtgagaactaatgcacttcctagaactaactcaatcctgtgttaatggcattaatccattcgtgagggctctaccctcatgacccaatcaccttttaaggccccacctcccagttccatcagtggcaactaaatttcagcataagtttttatggagacactcaaaacatactatatacatatagtacgcctctgcagtcaaacctcaagccagtcttcttttcccatctcatttacctttccaaataaggcctttaacccaatcccagtctgaccatggtgcatgaactagacatgtgagatttcatnttgcataaatatatatatgtatatatatatatatatatagtatatatactgtgtttcaggtgtccccataaaaattaacatttttatatatcatattatatataacatatataacatttatatancatattatatataacatttatatatcatattatatataacataacatttatatatatcatattatatataacatataacatttatatatcatattatatataacatataacatttatatatcatattatatataacataacatttatatatcatatnatatataacataacatttatatatcatatcatatataacatataacatttatatatcntatnatatataacatataacatttatatatcatattatatataacatataacatntatatatcatattatatataacatataacatttatatatcatattatanataacatataacatttatatatcatattatanataacanataacatttatatatcatattatatataacataacatttatatatcatattatatataananataacatttatatatcatattatatntaanataacatntatatntcatattatatataanataacatttatatatcatattatatatant

SEQ ID NO: 285243 - DNA, 660 bp, Homo sapiens
aggtgggtgattcttttggactaattcatgtggctgcaattggagctggatgatctaaatggtctcactcctaggtctggctgttgatgttggctgttggctgagccaggggccgccagcaggctagcatgggctcttcactcagcagcagggttccccaagaggacaagcccaacacacatgtgcttttcaagcctgtgattatcaggcttgaaatactgcaacatctgctgcaatcagtaacaaccacataagaaagcaatgacaagttatgattactgctctggagggagtgagcaggatgctgtgagagagggttactattccaagtggcacctgggccagcagcattggcatcacctgggacttgtgagaaatccagcatctcaggctccactgcaggtctcctaaatcagaatctacagtttaacaagatccccagcagatgtgtgtgtaagctcaagaacctgttgagaggagcacctagcataagacctggcttgtgacagagagagagagagaagcagagagagagtttttataaggaattggctcacatgattatggaggctgccaagtcccaagatctgcagtcagcaagctggagacccaggagagctgatggtggagttctagtctgaatgtcagcaggctagagac

SEQ ID NO: 285244 - DNA, 583 bp, Homo sapiens
aggtgggtgattcttttggactaattcatgtggctgcaattggagctggatgatctaaatggtctcactcctaggtctggctgttgatgttggctgttggctgagccaggggccgccagcaggctagcatgggctcttcactcagcagcagggttccccaagaggacaagcccaacacacatgtgcttttcaagcctgtgattatcaggcttgaaatactgcaacatctgctgcaatcagtaacaaccacataagaaagcaatgacaagttatgattactgctctggagggagtgagcaggatgctgtgagagagggttactattccaagtggcacctgggccagcagcattggcatcacctgggacttgtgagaaatccagcatctcaggctccactgcaggtctcctaaatcagaatctacagtttaacaagatccccagcagatgtgtgtgtaagctcaagaacctgttgagaggagcacctagcataagacctggcttgtgacagatctgccaccctctagctgggtgacttttagacaagtgatcgacctctctgagccagagtttctaccttgtaaa

SEQ ID NO: 285245 - DNA, 259 bp, Homo sapiens
gcggccgcagccaatctctccccgcgagggcggaggcgccgaaatcaaagcgagagcgcctcggcctctccagctgtccgcgtcttgctggaggtttgttaaatttatttatcttttcaaaaaccagatccttggctgggtgtggttgcccacacctgtcatcccagcactttgggagactgaggcaggaggatcgcttgaacccacgagttggagaccagcctgggcaacatagagagattctgtccctaaaaaaata

SEQ ID NO: 285246 - DNA, 337 bp, Homo sapiens
gcggccgcagccaatctctccccgcgagggcggaggcgccgaaatcaaagcgagagcgcctcggcctctccagctgtccgcgggtcttgctctgttgcctaggctggagtgcagtggtacaagcacggctcactgcagccttgacctcctgggatcaaggtcttgctggaggtttgttaaatttatttatcttttcaaaaaccagatccttggctgggtgtggttgcccacacctgtcatcccagcactttgggagactgaggcaggaggatcgcttgaacccacgagttggagaccagcctgggcaacatagagagattctgtccctaaaaaaata

SEQ ID NO: 285247 - DNA, 1012 bp, Homo sapiens
cgatctcggctcactgcaagctccgcctcccggattcacgccattctcctgcctcagcctcccgaggagctgggactacagggacccgccaccacgcccggctaatttttttgtatttttagtagagacggggtttcaccgtgttagccaggatggtctcgatctcctgacctcctgatccgcccgcctcggcctcccaaagtgctgggattacaggcgtgagccaccgcgcccggccggtactccgaagccctcagatcggcgacctgggcgctgtaggcaccgagaaaatacaggcaccgagccagaagcagtgccgcaaccaagagacctcggcttggcgaaatggcggcgtctggagcctgcgagtgacgccagctggtggggctgtcaaggagaacattcgttacggcgcaaccaacggtactgtcaccaagaaaccgtcgtctctgagaaaaaaagagacgttcggccgccgagaaactccgtacaagtgctgtgacagaaaaaccgccggctccgcgcagcggcaaaagagccaacgggaacgccgggtgctgcgaccatgaccccggcactggaggacgtgggatggagaatgggacacacggagcgagaagggaaacgtttcgtgcagaccaactagcgccgccgccaccggaaaactgactcgccagtgctgccaatgaagtgcgtgtgagaaaccgatgactggtgggaggagcagcgctgggcgctggacccgcgagtgtgagaatctggcggcgctaggacccttcaggcgcgggcacgaggcgaaacccagcgctgttgccaaagacaaatgcgcgttcttttgggcgccatcagcggtgcagccagtgatcactcccaggctctgagaaactagagatgtcagccacaaaccctccgttcagggaaagtttgcggcgccgtgacggatcgactggcactgggtgcactgctgatagcgcccaaaagaacgcgcatttgtcttgcaacagggccgaca

SEQ ID NO: 285248 - DNA, 1247 bp, Homo sapiens
cgatctcggctcactgcaagctccgcctcccggattcacgccattctcctgcctcagcctcccgaggagctgggactacagggacccgccaccacgcccggctaatttttttgtatttttagtagagacggggtttcaccgtgttagccaggatggtctcgatctcctgacctcctgatccgcccgcctcggcctcccaaagtgctgggattacaggcgtgagccaccgcgcccggccggtactccgaagccctcagatcggcgacctgggcgctgtaggcaccgagaaaatacaggcaccgagccagaagcagtgccgcaaccaagagacctcggcttggcgaaatggcggcgtctggagcctgcgagtgacgccagctggtggggctgtcaaggagaacattcgttacggcgcaaccaacggtactgtcaccaagaaaccgtcgtctctgagaaaaaaagagacgttcggccgccgagaaactccgtacaagtgctgtgacagaaaaaccgccggctccgcgcagcggcaaaagagccaacgggaacgccgggtgctgcgaccatgaccccggcactggaggacgtgggatggagaatgggacacacggagcgagaagggaaacgtttcgtgcagaccaactagcgccgccgccaccggaaaactgactcgccagtgctgccaatgaagtgcgtgtgagaaaccgatgactggtgggaggagcagcgctgggcgctggacccgcgagtgtgagaatctggcggcgctaggacccttcaggcgcgggcacgaggcgaaacccagcgctgttgccaaagacaaatgcgcgttcttttgggcgccatcagcggtgcagccagtgatcactcccaggctctgagaaactagagatgtcagccacaaaccctccgttcagggaaagtttgcggcgccgtgacggatcgactggcactgggtgcaacattgtcttgtggcctagagactagaatataaaaacaaaaaccaaatacaaaactgctgctggcattactcctactctcccccctcaagtcagtggcttcaggcttaagaaaacctgtatttttcttggctgtgccataatccgtaattaccgaggcccccagcgacccacccagtgtgattcgcagagggaaaggagctggaataaggacccagccacggccattggaagagcagtttcctagcaatgtaatgctgtgtgcgacccagcataagctttagctct

SEQ ID NO: 285249 - DNA, 635 bp, Homo sapiens
gttggcgacccggatggcttttgttaccagggccagcccaatccgcccgattctcggtccctatactgcctccttttcccatgcgcatcgcaagggatcggttgatggggccctcagtatgacttcgctaggaaaaataaagtgcagctcgtttctcagagccggcggatgttcatgggcagcaccatcgagccagaagcagtatttgtcctggaggaaatcagtggtgcttcaggatattgtgaatttgggcttctgaaagcagaattctgatttaacagtataatggaattcgtgaacgtcatgatgctaatttgaaccaacaagcacccttgtgagaggaatctgcttttcctcaagtctgaagaacaccaggagaatctttctgtatggagttaccaggaatcctctgctaaggaaagtgaaagggaagatgcaatttctcctgggaaggggggatgctgatgtagagggtgacaagtaatatgccatgaaggattcagtcacctggttagatttagagttagagttatggttaaggaagaaggaaggaaaaaaggcagaagaggaagaaaggaagcaagaaaagataaaatttattctaagataaaatttgtgaattttgctaaactaaa

SEQ ID NO: 285250 - DNA, 321 bp, Homo sapiens
ccagcccaatccgcccgattctcggtccctatactgcctccttttcccatgcgcatcgcaagggatcggttgatggggccctcagtatgacttcgctaggaaaaataaaggtcttcttaggcgggaggggactgatttgaggacggagggtgggagtagtgccagcagcactttgtcgtagtggcactgggtgggcagttatcagttgcagtccgctcgtttctcagtgcccacggtttctcactgacagtgcagctcgtttctcagagccggcggatgttcatgggcagcaccatcgagccagaagcagtatttgtcctg

SEQ ID NO: 285251 - DNA, 2763 bp, Homo sapiens
cgatctcggctcactgcaagctccgcctcccggattcacgccattctcctgcctcagcctcccgaggagctgggactacagggacccgccaccacgcccggctaatttttttgtatttttagtagagacggggtttcaccgtgttagccaggatggtctcgatctcctgacctcctgatccgcccgcctcggcctcccaaagtgctgggattacaggcgtgagccaccgcgcccggccggtactccgaagccctcagatcggcgacctgggcgctgtaggcaccgagaaaatacaggcaccgagccagaagcagtgccgcaaccaagagacctcggcttggcgaaatggcggcgtctggagcctgcgagtgacgccagctggtggggctgtcaaggagaacattcgttacggcgcaaccaacggtactgtcaccaagaaaccgtcgtctctgagaaaaaaagagacgttcggccgccgagaaactccgtacaagtgctgtgacagaaaaaccgccggctccgcgcagcggcaaaagagccaacgggaacgccgggtgctgcgaccatgaccccggcactggaggacgtgggatggagaatgggacacacggagcgagaagggaaacgtttcgtgcagaccaactagcgccgccgccaccggaaaactgactcgccagtgctgccaatgaagtgcgtgtgagaaaccgatgactggtgggaggagcagcgctgggcgctggacccgcgagtgtgagaatctggcggcgctaggacccttcaggcgcgggcacgaggcgaaacccagcgctgttgccaaagacaaatgcgcgttcttttgggcgccatcagcggtgcagccagtgatcactcccaggctctgagaaactagagatgtcagccacaaaccctccgttcagggaaagtttgcggcgccgtgacggatcgactggcactgggtgcaacattgtcttgtggcctagagactagaatataaaaacaaaaaccaaatacaaaactgctgctggcattactcctactctcccccctcaagtcagtggcttcaggcttaagaaaacctgtatttttcttggctgtgccataatccgtaattaccgaggcccccagcgacccacccagtgtgattcgcagagggaaaggagctggaataaggaccgtgaatggggcggatgtggctcgtcctgggagagagctaaagcttatgctggtcgcaaacagcattacattgcaggaaactgctcttccaatggccgtggctgggtccttccacaccatccctctgccctagacctttgtccccgttcagagccatcagagattctaggagagctgtcgacaaccgcatctcttcggaacttggaaactctaggttcaagatctccgtggagaatgaaaggcacagtcgcctgacccgggcatcaggcttgccccgcacatcaagtccctcccctactggatggaactctgtggcaatcgctccttattctgatggttcactctgtcagatatcctcgatatttggggatagtagttcaaaaacagccggggaggaaaatgggctgaaagattccagcgttggatgtagaattgacagcgagacatacacctcctctctaagcccagagaaaagctcaagttgtggttctctgtctctagcagcatgatcttcaaaatgcatcattgatttctatcttctgggaaatgcaatgcaggtgaacttgtaagtgctcaaatcctccatctcctcacttttcagactgaggccttttttttttaaatctgagaagaaatatgggactgccactgctcagtaggaaaatgtcctttcccacaagcatttatattttaataaaaatctgcactttgtgagttgagccccctcaaagagacctacaaaccctgccacaaatatctccaaccacactcatcatttccgattttcatcactgctgctcctgtgcaaaccaaactatcctttccctggggcatcctaggtagaggccatgccaggacaaaggcagagatatgcctgcctggtaaggaaatccattttggccttgtaattctcaccctctcccaagatgtttgcctcaatatctccttcccaccttaccccgtcttcagctagccaaaacattccctggtatttgaggcccttccaatttcctcctggttttgtgggtgggagaataaagaaaaaactgcactgttcccacccacatagttacagccactttatcaaacagaagagcagtctggagccattgcaaaacaaaatacctgccacaactcctctcttctcatttcgactccagcttttcatcttagcaaaaaagttgcaatcagcaccccctagacggaaggaatatcctgtcttaatgggagtccataggaggctgcaggctgctcccctacagagactaacatcaaggtagttgcagaattcagattctaattacagtgtggttggaggcggggtggattccagggaggtcaggaagaggtaaagtacagaattgagctccttgggaggaggtcataggaactttgcagtatgaaaatggctagagattgggtagaattgagcaggctggcaatggcagttttgtgtgggtggtaggacctaggattcaaacttgagggcaaattgtggagcacatacgacaaatgatgtagagcctttcctatttcccttcctggtgtgtcatccgaaacaataaataataaagaattaacaaagactga

SEQ ID NO: 285252 - DNA, 2160 bp, Homo sapiens
cgatctcggctcactgcaagctccgcctcccggattcacgccattctcctgcctcagcctcccgaggagctgggactacagggacccgccaccacgcccggctaatttttttgtatttttagtagagacggggtttcaccgtgttagccaggatggtctcgatctcctgacctcctgatccgcccgcctcggcctcccaaagtgctgggattacaggcgtgagccaccgcgcccggccggtactccgaagccctcagatcggcgacctgggcgctgtaggcaccgagaaaatacaggcaccgagccagaagcagtgccgcaaccaagagacctcggcttggcgaaatggcggcgtctggagcctgcgagtgacgccagctggtggggctgtcaaggagaacattcgttacggcgcaaccaacggtactgtcaccaagaaaccgtcgtctctgagaaaaaaagagacgttcggccgccgagaaactccgtacaagtgctgtgacagaaaaaccgccggctccgcgcagcggcaaaagagccaacgggaacgccgggtgctgcgaccatgaccccggcactggaggacgtgggatggagaatgggacacacggagcgagaagggaaacgtttcgtgcagaccaactagcgccgccgccaccggaaaactgactcgccagtgctgccaatgaagtgcgtgtgagaaaccgatgactggtgggaggagcagcgctgggcgctggacccgcgagtgtgagaatctggcggcgctaggacccttcaggcgcgggcacgaggcgaaacccagcgctgttgccaaagacaaatgcgcgttcttttgggcgccatcagcggtgcagccagtgatcactcccaggctctgagaaactagagatgtcagccacaaaccctccgttcagggaaagtttgcggcgccgtgacggatcgactggcactgggtgcaacattgtcttgtggcctagagactagaatataaaaacaaaaaccaaatacaaaactgctgctggcattactcctactctcccccctcaagtcagtggcttcaggcttaagaaaacctgtatttttcttggctgtgccataatccgtaattaccgaggcccccagcgacccacccagtgtgattcgcagagggaaaggagctggaataaggaccgtgaatggggcggatgtggctcgtcctgggagagagctaaagcttatgctggtcgcaaacagcattacattgcaggaaactgctcttccaatggccgtggctgggtccttccacaccatccctctgccctagacctttgtccccgttcagagccatcagagattctaggagagctgtcgacaaccgcatctcttcggaacttggaaactctaggttcaagatctccgtggagaatgaaaggcacagtcgcctgacccgggcatcaggcttgccccgcacatcaagtccctcccctactggatggaactctgtggcaatcgctccttattctgatggttcactctgtcagatatcctcgatatttggggatagtagttcaaaaacagccggggaggaaaatgggctgaaagattccagcgttggatgtagaattgacagcgagacatacacctcctctctaagcccagagaaaagctcaagttgtggttctctgtctctagcagcatgatcttcaaaatgcatcattgatttctatcttctgggaaatgcaatgcaggtgaacttgaggaaatcagtggtgcttcaggatattgtgaatttgggcttctgaaagcagaattctgatttaacagtataatggaattcgtgaacgtcatgatgctaatttgaaccaacaagcacccttgtgagaggaatctgcttttcctcaagtctgaagaacaccaggagaatctttctgtatggagttaccaggaatcctctgctaaggaaagtgaaagggaagatgcaatttctcctgggaaggggggatgctgatgtagagggtgacaagtaatatgccatgaaggattcagtcacctggttagatttagagttagagttatggttaaggaagaaggaaggaaaaaaggcagaagaggaagaaaggaagcaagaaaagataaaatttattctaagataaaatttgtgaattttgctaaactaaa

SEQ ID NO: 285253 - DNA, 543 bp, Homo sapiens
tgggtgagctctagtcattctgtgagaggaactccaggagaccagatccaactcgcaatcagctatagtgaagttatgatatgagaagcaccaacttggcacaagacttgggaaaggcaatgaggcagcaggcaagctttaagggatgacacttaccttgagggagcaaggacaagttgtgaccttcccagtcctctctccatttgcagatcagcaagcttctgtcagcaaggaggggtggacaatgaaactgggttcagcttgatttgttttttgagacaggtatggcaaggggctgccaacaagatcaagctgcagaggaaacagccacctggggcgtgttcttacgttgcctggaagctgcacaagaggccaagtcaaaacatgcagaattccagttgcccatgatgtcacaggctgaggcccacactccagagacactgtggactgactggcacctatgagctgacctaataacagttacaccattacagctccgattctacagaacaatacatatccagttcttatctaaaaaaaaaa

SEQ ID NO: 285254 - DNA, 856 bp, Homo sapiens
tgggtgagctctagtcattctgtgagaggaactccaggagaccagatccaactcgcaatcagctatagtgaagttatgatatgagaagcaccaacttggcacaagacttgggaaaggcaatgaggcagcaggcaagctttaagggatgacacttaccttgagggagcaaggacaagttgtgaccttcccagtcctctctccatttgcagatcagcaagcttctgtcagcaaggaggggtggacaatgaaactgggttcagcttgatttgttttttgagacaggtatggcaaggggctgccaacaaggtaagtcatctttggacaagccaagtgctttgggaaacaattgtttctgaaaataagtgtttgtgtcaaacattctctttgttagtaggagacatttttgttggatcatgttgtcctcagcaaaagaggttgcagagaagttaaggaagttgggataacttagagtctcagtgctttggggcaatttacagacagcactgtgtgatcctcccatctcaggacttacatcatgttgctaactccctcactgggggccatggttctgaaaggaagaaagcatgtcttattcactcacctttgagtctccagcactgagcacagcacctgtcactcagtaggcactcaataaatgtacattgatatgaaacatgacacgtggtgccttttacagaacaaaaattactttgtcctaaaggcctccagggatgcaattcctgaattttagtatgtgtctaccttagggttgaggtaatggttaagtgtgacacgaaagggttagtttggctgaaatagttcttcctgtggtattaactggtaaaatgaaatataa

SEQ ID NO: 285255 - DNA, 575 bp, Homo sapiens
ttatcccagccccttcctactcccattgaatgcagctctgtgaggacacgatatttgaagctgcagtagctgaggtggcaaaagatggcagaacagaagagcagacagaatctgggtcctagatgacttcattgcactgctgcaactgccttctccagacctcttgccaggtgaagaaattgagacccagagtgattatatgacctgcccaaggtggtcacgtcgttaggccatggcagagatctgaaataaaaggtcaggtcttctgacttcagtccatgcttttttttttttttttttctataacatcatgctacctagaagaaaaagaaatgaagatcaagctgcagaggaaacagccacctggggcgtgttcttacgttgcctggaagctgcacaagaggccaagtcaaaacatgcagaattccagttgcccatgatgtcacaggctgaggcccacactccagagacactgtggactgactggcacctatgagctgacctaataacagttacaccattacagctccgattctacagaacaatacatatccagttcttatctaaaaaaaaaa

SEQ ID NO: 285256 - DNA, 459 bp, Homo sapiens
tgggtgagctctagtcattctgtgagaggaactccaggagaccagatccaactcgcaatcagctatagtgaagttatgatatgagaagcaccaacttggcacaagacttgggaaaggcaatgaggcagcaggcaagctttaagggatgacacttaccttgagggagcaaggacaagttgtgaccttcccagtcctctctccatttgcagatcagcaagcttctgtcagcaaggaggggtggacaatgaaactgggttcagcttgatttgttttttgagacaggtatggcaaggggctgccaacaagaattccagttgcccatgatgtcacaggctgaggcccacactccagagacactgtggactgactggcacctatgagctgacctaataacagttacaccattacagctccgattctacagaacaatacatatccagttcttatctaaaaaaaaaa

SEQ ID NO: 285257 - DNA, 407 bp, Homo sapiens
ttatcccagccccttcctactcccattgaatgcagctctgtgaggacacgatatttgaagctgcagtagctgaggtggcaaaagatggcagaacagaagagcagacagaatctgggtcctagatgacttcattgcactgctgcaactgccttctccagacctcttgccagatcaagctgcagaggaaacagccacctggggcgtgttcttacgttgcctggaagctgcacaagaggccaagtcaaaacatgcagaattccagttgcccatgatgtcacaggctgaggcccacactccagagacactgtggactgactggcacctatgagctgacctaataacagttacaccattacagctccgattctacagaacaatacatatccagttcttatctaaaaaaaaaa

SEQ ID NO: 285258 - DNA, 2132 bp, Homo sapiens
tgataaatttcttctcagaaagccttagcaaaatgggtgcttttattttcacagacatgtctatgcaatacactcagtcacaagagagagcttcttaagcctgaccataatttaaactctgaaaggtgagtgagcctgttaagagacctccacccttctagtaacctatatcccttgatatgggaaggatatcttagttctccctagccccttgcttaggattaagtgagagacttcagctttggtgtaaagctgtcagctgccctaatcaaggacaatacacaaaaattagactccttataagaataagggattaaatggaggaagatctagaagtgggtgggaacaaaagagcagaactgagcctgcatctgcagaaaatgtccaaagacaactggcagagttcactccatggggaaaaggcatgttagtgtgtaggtagagaaactggacaaggaaggatggccttagccttccataatggagaagtcgggcaggggatgtctgcatgcaatagacaactgaattagaaagagcagaaatgtaaaccagcagtgcttccctatcttgggcctggctagcttaaaggggctctactgtcattggtcaaaaaactttcatgaggagatccaatcactaatgcaacaaactctaatgagttctaagttggagagagctcagttctaaagcttgggggtagacaggtcactgagagaggaggaatgaaggagtgggatctgaacattgtaataagtcatctagtagctctgatcactttggacattgctgggggatacataacagctcactataacattacaacacatacttatatctgtttgctcctccaaactaacatgacaatgtgtttctgccatcttagcttacagagacatgatctagttcagcttatactcagattttacaaaagagactttgaccacatagatattcataaaattaatgtggttaagaaaaaagtgcaggggcttgaagtcagaagagctccgttcccattttggctatgctgctgttcaggtttgtgacctgcagagcagtttagcatctctgggtctcaatttgttcatctgtagagcgtgggtgatcaacctttatgtaatccttctgtgttgagtgggtctcaagatggaagctcactatgggaatttaaaagcaaactgtggcatcgaaacaaactggacaattgcttgaactctaatatcatcatccatcctcataaagtaacttgttggtcactagtctgacagtactgttaaaagacatttatttgtaacttttgagaaaataattttcagactctgatcttagaataagctcatgagaagtctcatttccaagctggagatcatttccagtttgaatgaacaattcttctttttggcttgggtgaacgtggggataggtgaaagctgagctgcacatccttcagaggtcacaatgaaaagtcagtctttattctagcagggcttggtcatctggaatagctggtacataggtggcagctccatgccctatctcatactttaaacaacatcaccaatatctttttccgaaataagcttgagttgtatatgtttattataggagagaaaagtttgccaagtgtcttctatggactaagcacttgctaggtgttttacatatattctgccatttaatcctcaaggcaactttaacatgtaagtattactgtcctcattttacaggtgaagaaattgagacccagagtgattatatgacctgcccaaggtggtcacgtcgttaggccatggcagagatctgaaataaaaggtcaggtcttctgacttcagtccatgcttttttttttttttttttctataacatcatgctacctagaagaaaaagaaatgaagatcaagctgcagaggaaacagccacctggggcgtgttcttacgttgcctggaagctgcacaagaggccaagtcaaaacatgcagaattccagttgcccatgatgtcacaggctgaggcccacactccagagacactgtggactgactggcacctatgagctgacctaataacagttacaccattacagctccgattctacagaacaatacatatccagttcttatctaaaaaaaaaa

SEQ ID NO: 285259 - DNA, 2040 bp, Homo sapiens
  misc_feature (3)..(3): n is a, c, g, or t
  misc_feature (5)..(5): n is a, c, g, or t
  misc_feature (7)..(8): n is a, c, g, or t
ggnangnngatttcctcatcgtcaagctttgttcctcgtgggggctagaaatctctttccagttccagattgtgaagggttcctgagtaagcagcgtgtctccatccccctctctaggggctcttggatggaccttgcactctagaagggacaatggacttctggctttggccactttacttcctgccagtatcgggggccctgaggatcctcccagaagtaaaggtagagggggagctgggcggatcagttaccatcaagtgcccacttcctgaaatgcatgtgaggatatatctgtgccgggagatggctggatctggaacatgtggtaccgtggtatccaccaccaacttcatcaaggcagaatacaagggccgagttactctgaagcaatacccacgcaagaatctgttcctagtggaggtaacacagctgacagaaagtgacagcggagtctatgcctgcggagcgggcatgaacacagaccggggaaagacccagaaagtcaccctgaatgtccacagtgaatacgagccatcatgggaagagcagccaatgcctgagactccaaaatggtttcatctgccctatttgttccagatgcctgcatatgccagttcttccaaattcgtaaccagagttaccacaccagctcaaaggggcaaggtccctccagttcaccactcctcccccaccacccaaatcacccaccgccctcgagtgtccagagcatcttcagtagcaggtgacaagccccgaaccttcctgccatccactacagcctcaaaaatctcagctctggaggggctgctcaagccccagacgcccagctacaaccaccacaccaggctgcacaggcagagagcactggactatggctcacagtctgggagggaaggccaaggatttcacatcctgatcccgaccatcctgggccttttcctgctggcacttctggggctggtggtgaaaagggccgttgaaaggaggaaagccctctccaggcgggcccgccgactggccgtgaggatgcgcgccctggagagctcccagaggccccgcgggtcgccgcgaccgcgctcccaaaacaacatctacagcgcctgcccgcggcgcgctcgtggagcggacgctgcaggcacaggggaggcccccgttcccggccccggagcgccgttgccccccgccccgctgcaggtgtctgaatctccctggctccatgccccatctctgaagaccagctgtgaatacgtgagcctctaccaccagcctgccgccatgatggaggacagtgattcagatgactacatcaatgttcctgcctgacaactccccagctatcccccaaccccaggctcggactgtggtgccaaggagtctcatctatctgctgatgtccaatacctgcttcatgtgttctcagagccctcatcacttcccatgccccatctcgactcccatccccatctatctgtgccctgagcatggctctgcccccaggtcgtcttgcacaccttggcagccccctgtagttgacaggtaagctgtaggcatgtagagcaattgtcccaatgccacttgcttcctttccaagccgtcgaacagactgtgggatttgcagagtgtttcttccatgtctttgaccacagggttgttgctgcccaggctctagatcacatggcatcaggctggggcagaggcatagctattgtctcgggcatccttcccagggttgggtcttacacaaatagaaggctcttgctctgagttatgtgacatgcctcagccccatggactaagcaggggtctggtataaaaacactcctggaaacgcctttgccctgatccaaatgttagcacttgctagtgaacgtctacttatctcaagttctatgctaaaggcaatttatcttgatgtgatgataaaccaaacttattagcaagatatgcatatatatccataaattctctttactctgtctccatcacttgatgcacataagtgccctgacctcagcatctcccctctaaaaaaaaaaa

SEQ ID NO: 285260 - DNA, 555 bp, Homo sapiens
tagttgaaatggggtttgggaagtgatgagggctttgaaaacacatgaagcaggtattggacatcagcagatagatgagactccttggcaccacagtccgagcctggggttgggggatagctggggagttgtcaggcaggaacattgatgtagtcatctgaatcactgtcctccatcatggcggcaggctggtggtagaggctcacgtattcacagctggtcttcagagatggggcatggagccaggttgggtcttacacaaatagaaggctcttgctctgagttatgtgacatgcctcagccccatggactaagcaggggtctggtataaaaacactcctggaaacgcctttgccctgatccaaatgttagcacttgctagtgaacgtctacttatctcaagttctatgctaaaggcaatttatcttgatgtgatgataaaccaaacttattagcaagatatgcatatatatccataaattctctttactctgtctccatcacttgatgcacataagtgccctgacctcagcatctcccctctaaaaaaaaaaa

SEQ ID NO: 285261 - DNA, 1945 bp, Homo sapiens
  misc_feature (3)..(3): n is a, c, g, or t
  misc_feature (5)..(5): n is a, c, g, or t
  misc_feature (7)..(8): n is a, c, g, or t
ggnangnngatttcctcatcgtcaagctttgttcctcgtgggggctagaaatctctttccagttccagattgtgaagggttcctgagtaagcagcgtgtctccatccccctctctaggggctcttggatggaccttgcactctagaagggacaatggacttctggctttggccactttacttcctgccagtatcgggggccctgaggatcctcccagaagtaaaggtagagggggagctgggcggatcagttaccatcaagtgcccacttcctgaaatgcatgtgaggatatatctgtgccgggagatggctggatctggaacatgtggtaccgtggtatccaccaccaacttcatcaaggcagaatacaagggccgagttactctgaagcaatacccacgcaagaatctgttcctagtggaggtaacacagctgacagaaagtgacagcggagtctatgcctgcggagcgggcatgaacacagaccggggaaagacccagaaagtcaccctgaatgtccacagtgaatacgagccatcatgggaagagcagccaatgcctgagactccaaaatggtttcatctgccctatttgttccagatgcctgcatatgccagttcttccaaattcgtaaccagagttaccacaccagctcaaaggggcaaggtccctccagttcaccactcctcccccaccacccaaatcacccaccgccctcgagtgtccagagcatcttcagtagcaggtgacaagccccgaaccttcctgccatccactacagcctcaaaaatctcagctctggaggggctgctcaagccccagacgcccagctacaaccaccacaccaggctgcacaggcagagagcactggactatggctcacagtctgggagggaaggccaaggatttcacatcctgatcccgaccatcctgggccttttcctgctggcacttctggggctggtggtgaaaagggccgttgaaaggaggaaagccctctccaggcgggcccgccgactggccgtgaggatgcgcgccctggagagctcccagaggccccgcgggtcgccgcgaccgcgctcccaaaacaacatctacagcgcctgcccgcggcgcgctcgtggagcggacgctgcaggcacaggggaggcccccgttcccggccccggagcgccgttgccccccgccccgctgcaggtgtctgaatctccctggctccatgccccatctctgaagaccagctgtgaatacgtgagcctctaccaccagcctgccgccatgatggaggacagtgattcagatgactacatcaatgttcctgcctgacaactccccagctatcccccaaccccaggctcggactgtggtgccaaggagtctcatctatctgctgatgtccaatacctgcttcatgtgttctcagagccctcatcacttcccatgccccatctcgactcccatccccatctatctgtgccctgagcatggctctgcccccaggtcgtcttgcacaccttggcagccccctgtagttgacaggtaagctgtaggcatgtagagcaattgtcccaatgccacttgcttcctttccaagccgtcgaacagactgtgggatttgcagagtgtttcttccatgtctttgaccacagggttgttgctgcccaggctctagatcacatggcatcaggctggggcagaggcatagctattgtctcgggcatccttcccagggttgggtcttacacaaatagaaggctcttgctctgagttatgtgacatgcctcagccccatggactaagcaggggtctggtataaaaacactcctggaaacgcctttgccctgatccaaatgttagcacttgctagtgaacgtctacttatctcaagttctatgctaaaggcaatttatcttgatgtgatgataaaccaaacttattagcaaga

SEQ ID NO: 285262 - DNA, 1937 bp, Homo sapiens
  misc_feature (3)..(3): n is a, c, g, or t
  misc_feature (5)..(5): n is a, c, g, or t
  misc_feature (7)..(8): n is a, c, g, or t
ggnangnngatttcctcatcgtcaagctttgttcctcgtgggggctagaaatctctttccagttccagattgtgaagggttcctgagtaagcagcgtgtctccatccccctctctaggggctcttggatggaccttgcactctagaagggacaatggacttctggctttggccactttacttcctgccagtatcgggggccctgaggatcctcccagaagtaaaggtagagggggagctgggcggatcagttaccatcaagtgcccacttcctgaaatgcatgtgaggatatatctgtgccgggagatggctggatctggaacatgtggtaccgtggtatccaccaccaacttcatcaaggcagaatacaagggccgagttactctgaagcaatacccacgcaagaatctgttcctagtggagaatacgagccatcatgggaagagcagccaatgcctgagactccaaaatggtttcatctgccctatttgttccagatgcctgcatatgccagttcttccaaattcgtaaccagagttaccacaccagctcaaaggggcaaggtccctccagttcaccactcctcccccaccacccaaatcacccaccgccctcgagtgtccagagcatcttcagtagcaggtgacaagccccgaaccttcctgccatccactacagcctcaaaaatctcagctctggaggggctgctcaagccccagacgcccagctacaaccaccacaccaggctgcacaggcagagagcactggactatggctcacagtctgggagggaaggccaaggatttcacatcctgatcccgaccatcctgggccttttcctgctggcacttctggggctggtggtgaaaagggccgttgaaaggaggaaagccctctccaggcgggcccgccgactggccgtgaggatgcgcgccctggagagctcccagaggccccgcgggtcgccgcgaccgcgctcccaaaacaacatctacagcgcctgcccgcggcgcgctcgtggagcggacgctgcaggcacaggggaggcccccgttcccggccccggagcgccgttgccccccgccccgctgcaggtgtctgaatctccctggctccatgccccatctctgaagaccagctgtgaatacgtgagcctctaccaccagcctgccgccatgatggaggacagtgattcagatgactacatcaatgttcctgcctgacaactccccagctatcccccaaccccaggctcggactgtggtgccaaggagtctcatctatctgctgatgtccaatacctgcttcatgtgttctcagagccctcatcacttcccatgccccatctcgactcccatccccatctatctgtgccctgagcatggctctgcccccaggtcgtcttgcacaccttggcagccccctgtagttgacaggtaagctgtaggcatgtagagcaattgtcccaatgccacttgcttcctttccaagccgtcgaacagactgtgggatttgcagagtgtttcttccatgtctttgaccacagggttgttgctgcccaggctctagatcacatggcatcaggctggggcagaggcatagctattgtctcgggcatccttcccagggttgggtcttacacaaatagaaggctcttgctctgagttatgtgacatgcctcagccccatggactaagcaggggtctggtataaaaacactcctggaaacgcctttgccctgatccaaatgttagcacttgctagtgaacgtctacttatctcaagttctatgctaaaggcaatttatcttgatgtgatgataaaccaaacttattagcaagatatgcatatatatccataaattctctttactctgtctccatcacttgatgcacataagtgccctgacctcagcatctcccctctaaaaaaaaaaa

SEQ ID NO: 285263 - DNA, 1123 bp, Homo sapiens
gcagcctttcgtttggggagggtggcacgggcctctgatgccattttcctccctcttcccgtggctttgtggggaagccctctccaggcgggcccgccgactggccgtgaggatgcgcgccctggagagctcccagaggccccgcgggtcgccgcgaccgcgctcccaaaacaacatctacagcgcctgcccgcggcgcgctcgtggagcggacgctgcaggcacaggggaggcccccgttcccggccccggagcgccgttgccccccgccccgctgcaggtgtctgaatctccctggctccatgccccatctctgaagaccagctgtgaatacgtgagcctctaccaccagcctgccgccatgatggaggacagtgattcagatgactacatcaatgttcctgcctgacaactccccagctatcccccaaccccaggctcggactgtggtgccaaggagtctcatctatctgctgatgtccaatacctgcttcatgtgttctcagagccctcatcacttcccatgccccatctcgactcccatccccatctatctgtgccctgagcatggctctgcccccaggtcgtcttgcacaccttggcagccccctgtagttgacaggtaagctgtaggcatgtagagcaattgtcccaatgccacttgcttcctttccaagccgtcgaacagactgtgggatttgcagagtgtttcttccatgtctttgaccacagggttgttgctgcccaggctctagatcacatggcatcaggctggggcagaggcatagctattgtctcgggcatccttcccagggttgggtcttacacaaatagaaggctcttgctctgagttatgtgacatgcctcagccccatggactaagcaggggtctggtataaaaacactcctggaaacgcctttgccctgatccaaatgttagcacttgctagtgaacgtctacttatctcaagttctatgctaaaggcaatttatcttgatgtgatgataaaccaaacttattagcaagatatgcatatatatccataaattctctttactctgtctccatcacttgatgcacataagtgccctgacctcagcatctcccctctaaaaaaaaaaa

SEQ ID NO: 285264 - DNA, 590 bp, Homo sapiens
tagttgaaatggggtttgggaagtgatgagggctttgaaaacacatgaagcaggtattggacaccttggcagccccctgtagttgacaggtaagctgtaggcatgtagagcaattgtcccaatgccacttgcttcctttccaagccgtcgaacagactgtgggatttgcagagtgtttcttccatgtctttgaccacagggttgttgctgcccaggctctagatcacatggcatcaggctggggcagaggcatagctattgtctcgggcatccttcccagggttgggtcttacacaaatagaaggctcttgctctgagttatgtgacatgcctcagccccatggactaagcaggggtctggtataaaaacactcctggaaacgcctttgccctgatccaaatgttagcacttgctagtgaacgtctacttatctcaagttctatgctaaaggcaatttatcttgatgtgatgataaaccaaacttattagcaagatatgcatatatatccataaattctctttactctgtctccatcacttgatgcacataagtgccctgacctcagcatctcccctctaaaaaaaaaaa

SEQ ID NO: 285265 - DNA, 897 bp, Homo sapiens
  misc_feature (3)..(3): n is a, c, g, or t
  misc_feature (5)..(5): n is a, c, g, or t
  misc_feature (7)..(8): n is a, c, g, or t
ggnangnngatttcctcatcgtcaagctttgttcctcgtgggggctagaaatctctttccagttccagattgtgaagggttcctgagtaagcagcgtgtctccatccccctctctaggggctcttggatggaccttgcactctagaagggacaatggacttctggctttggccactttacttcctgccagtatcgggggccctgaggatcctcccagaagtaaaggtagagggggagctgggcggatcagttaccatcaagtgcccacttcctgaaatgcatgtgaggatatatctgtgccgggagatggctggatctggaacatgtggtaccgtggtatccaccaccaacttcatcaaggcagaatacaagggccgagttactctgaagcaatacccacgcaagaatctgttcctagtggaggtaacacagctgacagaaagtgacagcggagtctatgcctgcggagcgggcatgaacacagaccggggaaagacccagaaagtcaccctgaatgtccacagtggtaggttcctccgctgattggaggctcagactacccagaaaatgtttcacttgggaagattggaacagccatctaactgtaacagtctcctagactcttacactgttgccatataagccacataatgattgagatccatatgaaacctcatagtcaattacctccatggtccacacaattttctacccaacatgtatgaaaagaacaagataggtgctctctttgtattgttcatcctacccagggcatgaggggagtagaggcttgagattgaggagaggctctgagatggaggaaattggaagcaaaaggaaataactatccaacgtaattgtcccatgagaaataaaggaaagacactaatttatcca

SEQ ID NO: 285266 - DNA, 484 bp, Homo sapiens
tcccccaccacccaaatcacccaccgccctcgagtgtccagagcatcttcagtagcaggtgacaagccccgaaccttcctgccatccactacagcctcaaaaatctcagctctggaggggctgctcaagccccagacgcccagctacaaccaccacaccaggctgcacaggcagaggtaagagaccactgtccaggatctagagttaggctagaattaagagatccactgaaacccactgcaatgtccattattagacaccctccttggctttgtctctaggccactgtgaaatataccacctatgagtatagctcattaactcattagttcctttaacaaaaacacacttgtcaatgccccagcattgatcctgtagaaagaagtgagacccagctcttccagtcacttagattcattcagatctatttttatggggaagaactaaatgagaataaaaataaaattaactattaaactagtaa

SEQ ID NO: 285267 - DNA, 405 bp, Homo sapiens
ttcaacataacatcagtgacaggaacttgctgaggtgaaaggtgactccatgttcttttctcatttgtccacagtgtaccacatgaaggaagatggttgggtgaaagtagaaagtacagatgtcagtgacctgctgcaccagtaccgggaagccaatcaataatggtggtggtggcagctgggcaggtctcctctgggaggtcttggccgactcagggacctaagccacgttaagtccaaggagaagaagaggcctagcctgagccaaagagagagtacgggctcagcagccagaggaggccggtgaagtgcatcttctgcgtgttctctatttgaacaagcatttcccccagggaagtttctgggtgccccactaagtagaataaagaaaaacggttataaata

SEQ ID NO: 285268 - DNA, 3600 bp, Homo sapiens
cccagactccagccctggaccgcgcatcccgagcccagcgcccagacagagtgtccccacaccctcctctgagacgccatgttcaactcgatgaccccaccaccaatcagtagctatggcgagccctgctgtctccggcccctccccagtcagggggcccccagtgtggggacagaaggactgtctggcccgcccttctgccaccaagctaacctcatgtccggcccccacagttatgggccagccagagagaccaacagctgcaccgagggcccactcttttcttctccccggagtgcagtcaagttgaccaagaagcgggcactgtccatctcacctctgtcggatgccagcctggacctgcagacggttatccgcacctcacccagctccctcgtagctttcatcaactcgcgatgcacatctccaggaggctcctacggtcatctctccattggcaccatgagcccatctctgggattcccagcccagatgaatcaccaaaaagggccctcgccttcctttggggtccagccttgtggtccccatgactctgcccggggtgggatgatcccacatcctcagtcccggggacccttcccaacttgccagctgaagtctgagctggacatgctggttggcaagtgccgggaggaacccttggaaggtgatatgtccagccccaactccacaggcatacaggatcccctgttggggatgctggatgggcgggaggacctcgagagagaggagaagcgtgagcctgaatctgtgtatgaaactgactgccgttgggatggctgcagccaggaatttgactcccaagagcagctggtgcaccacatcaacagcgagcacatccacggggagcggaaggagttcgtgtgccactgggggggctgctccagggagctgaggcccttcaaagcccagtacatgctggtggttcacatgcgcagacacactggcgagaagccacacaagtgcacgtttgaagggtgccggaagtcatactcacgcctcgaaaacctgaagacgcacctgcggtcacacacgggtgagaagccatacatgtgtgagcacgagggctgcagtaaagccttcagcaatgccagtgaccgagccaagcaccagaatcggacccattccaatgagaagccgtatgtatgtaagctccctggctgcaccaaacgctatacagatcctagctcgctgcgaaaacatgtcaagacagtgcatggtcctgacgcccatgtgaccaaacggcaccgtggggatggccccctgcctcgggcaccatccatttctacagtggagcccaagagggagcgggaaggaggtcccatcagggaggaaagcagactgactgtgccagagggtgccatgaagccacagccaagccctggggcccagtcatcctgcagcagtgaccactccccggcagggagtgcagccaatacagacagtggtgtggaaatgactggcaatgcagggggcagcactgaagacctctccagcttggacgagggaccttgcattgctggcactggtctgtccactcttcgccgccttgagaacctcaggctggaccagctacatcaactccggccaatagggacccggggtctcaaactgcccagcttgtcccacaccggtaccactgtgtcccgccgcgtgggccccccagtctctcttgaacgccgcagcagcagctccagcagcatcagctctgcctatactgtcagccgccgctcctccctggcctctcctttcccccctggctccccaccagagaatggagcatcctccctgcctggccttatgcctgcccagcactacctgcttcgggcaagatatgcttcagccagagggggtggtacttcgcccactgcagcatccagcctggatcggataggtggtcttcccatgcctccttggagaagccgagccgagtatccaggatacaaccccaatgcaggggtcacccggagggccagtgacccagcccaggctgctgaccgtcctgctccagctagagtccagaggttcaagagcctgggctgtgtccataccccacccactgtggcagggggaggacagaactttgatccttacctcccaacctctgtctactcaccacagccccccagcatcactgagaatgctgccatggatgctagagggctacaggaagagccagaagttgggacctccatggtgggcagtggtctgaacccctatatggacttcccacctactgatactctgggatatgggggacctgaaggggcagcagctgagccttatggagcgaggggtccaggctctctgcctcttgggcctggtccacccaccaactatggccccaacccctgtccccagcaggcctcatatcctgaccccacccaagaaacatggggtgagttcccttcccactctgggctgtacccaggccccaaggctctaggtggaacctacagccagtgtcctcgacttgaacattatggacaagtgcaagtcaagccagaacaggggtgcccagtggggtctgactccacaggactggcaccctgcctcaatgcccaccccagtgaggggcccccacatccacagcctctcttttcccattacccccagccctctcctccccaatatctccagtcaggcccctatacccagccaccccctgattatcttccttcagaacccaggccttgcctggactttgattcccccacccattccacagggcagctcaaggctcagcttgtgtgtaattatgttcaatctcaacaggagctactgtgggagggtgggggcagggaagatgcccccgcccaggaaccttcctaccagagtcccaagtttctggggggttcccaggttagcccaagccgtgctaaagctccagtgaacacatatggacctggctttggacccaacttgcccaatcacaagtcaggttcctatcccaccccttcaccatgccatgaaaattttgtagtgggggcaaatagggcttcacatagggcagcagcaccacctcgacttctgcccccattgcccacttgctatgggcctctcaaagtgggaggcacaaaccccagctgtggtcatcctgaggtgggcaggctaggagggggtcctgccttgtaccctcctcccgaaggacaggtatgtaaccccctggactctcttgatcttgacaacactcagctggactttgtggctattctggatgagccccaggggctgagtcctcctccttcccatgatcagcggggcagctctggacataccccacctccctctgggccccccaacatggctgtgggcaacatgagtgtcttactgagatccctacctggggaaacagaattcctcaactctagtgcctaaagagtagggaatctcatccatcacagatcgcatttcctaaggggtttctatccttccagaaaaattgggggagctgcagtcccctgcacaagatgccccagggatgggaggtatgggctgggggctatgtatagtctgtatacgttttgaggagaaatttgataatgacactgtttcctgataataaaggaactgcatcag

SEQ ID NO: 285269 - DNA, 3194 bp, Homo sapiens
cccagactccagccctggaccgcgcatcccgagcccagcgcccagacagagtgtccccacaccctcctctgagacgccatgttcaactcgatgaccccaccaccaatcagtagctatggcgagccctgctgtctccggcccctccccagtcagggggcccccagtgtggggacagaaggactgtctggcccgcccttctgccaccaagctaacctcatgtccggcccccacagttatgggccagccagagagaccaacagctgcaccgagggcccactcttttcttctccccggagtgcagtcaagttgaccaagaagcgggcactgtccatctcacctctgtcggatgccagcctggacctgcagacggttatccgcacctcacccagctccctcgtagctttcatcaactcgcgatgcacatctccaggaggctcctacggtcatctctccattggcaccatgagcccatctctgggattcccagcccagatgaatcaccaaaaagggccctcgccttcctttggggtccagccttgtggtccccatgactctgcccggggtgggatgatcccacatcctcagtcccggggacccttcccaacttgccagctgaagtctgagctggacatgctggttggcaagtgccgggaggaacccttggaaggtgatatgtccagccccaactccacaggcatacaggatcccctgttggggatgctggatgggcgggaggacctcgagagagaggagaagcgtgagcctgaatctgtgtatgaaactgactgccgttgggatggctgcagccaggaatttgactcccaagagcagctggtgcaccacatcaacagcgagcacatccacggggagcggaaggagttcgtgtgccactgggggggctgctccagggagctgaggcccttcaaagcccagtacatgctggtggttcacatgcgcagacacactggcgagaagccacacaagtgcacgtttgaagggtgccggaagtcatactcacgcctcgaaaacctgaagacgcacctgcggtcacacacgggtgagaagccatacatgtgtgagcacgagggctgcagtaaagccttcagcaatgccagtgaccgagccaagcaccagaatcggacccattccaatgagaagccgtatgtatgtaagctccctggctgcaccaaacgctatacagatcctagctcgctgcgaaaacatgtcaagacagtgcatggtcctgacgcccatgtgaccaaacggcaccgtggggatggccccctgcctcgggcaccatccatttctacagtggagcccaagagggagcgggaaggaggtcccatcagggaggaaagcagactgactgtgccagagggtgccatgaagccacagccaagccctggggcccagtcatcctgcagcagtgaccactccccggcagggagtgcagccaatacagacagtggtgtggaaatgactggcaatgcagggggcagcactgaagacctctccagcttggacgagggaccttgcattgctggcactggtctgtccactcttcgccgccttgagaacctcaggctggaccagctacatcaactccggccaatagggacccggggtctcaaactgcccagcttgtcccacaccggtaccactgtgtcccgccgcgtgggccccccagtctctcttgaacgccgcagcagcagctccagcagcatcagctctgcctatactgtcagccgccgctcctccctggcctctcctttcccccctggctccccaccagagaatggagcatcctccctgcctggccttatgcctgcccagcactacctgcttcgggcaagatatgcttcagccagagggggtggtacttcgcccactgcagcatccagcctggatcggataggtggtcttcccatgcctccttggagaagccgagccgagtatccaggatacaaccccaatgcaggggtcacccggagggccagtgacccagcccaggctgctgaccgtcctgctccagctagagtccagaggttcaagagcctgggctgtgtccataccccacccactgtggcagggggaggacagaactttgatccttacctcccaacctctgtctactcaccacagccccccagcatcactgagaatgctgccatggatgctagagggctacaggaagagccagaagttgggacctccatggtgggcagtggtctgaacccctatatggacttcccacctactgatactctgggatatgggggacctgaaggggcagcagctgagccttatggagcgaggggtccaggctctctgcctcttgggcctggtccacccaccaactatggccccaacccctgtccccagcaggcctcatatcctgaccccacccaagaaacatggggtgagttcccttcccactctgggctgtacccaggccccaaggctctaggtggaacctacagccagtgtcctcgacttgaacattatggacaagtgcaagtcaagccagaacaggggtgcccagtggggtctgactccacaggactggcaccctgcctcaatgcccaccatggctgtgggcaacatgagtgtcttactgagatccctacctggggaaacagaattcctcaactctagtgcctaaagagtagggaatctcatccatcacagatcgcatttcctaaggggtttctatccttccagaaaaattgggggagctgcagtcccctgcacaagatgccccagggatgggaggtatgggctgggggctatgtatagtctgtatacgttttgaggagaaatttgataatgacactgtttcctgataataaaggaactgcatcagaaaaaataccatgccactttatgtattattatgttggggaggaatgataacagggaacaagaagagaagcaggggttaatccactcactttcctctttagagaagctccctcacccatcccaacacctcaagtcacactcatgaagatagagacagtcatttgggagatttaaagggatatcctcaaaacagaacaccagcctctcaccaccagagatgaccggaaatatgttttctcttcttccttccctgcatcaggggaagaggctggtgaagttggtgagcatcagctggaccagctgccctgggtagagagcatgggctgctgggt

SEQ ID NO: 285270 - DNA, 3931 bp, Homo sapiens
cccagactccagccctggaccgcgcatcccgagcccagcgcccagacagagtgtccccacaccctcctctgagacgccatgttcaactcgatgaccccaccaccaatcagtagctatggcgagccctgctgtctccggcccctccccagtcagggggcccccagtgtggggacagaaggactgtctggcccgcccttctgccaccaagctaacctcatgtccggcccccacagttatgggccagccagagagaccaacagctgcaccgagggcccactcttttcttctccccggagtgcagtcaagttgaccaagaagcgggcactgtccatctcacctctgtcggatgccagcctggacctgcagacggttatccgcacctcacccagctccctcgtagctttcatcaactcgcgatgcacatctccaggaggctcctacggtcatctctccattggcaccatgagcccatctctgggattcccagcccagatgaatcaccaaaaagggccctcgccttcctttggggtccagccttgtggtccccatgactctgcccggggtgggatgatcccacatcctcagtcccggggacccttcccaacttgccagctgaagtctgagctggacatgctggttggcaagtgccgggaggaacccttggaaggtgatatgtccagccccaactccacaggcatacaggatcccctgttggggatgctggatgggcgggaggacctcgagagagaggagaagcgtgagcctgaatctgtgtatgaaactgactgccgttgggatggctgcagccaggaatttgactcccaagagcagctggtgcaccacatcaacagcgagcacatccacggggagcggaaggagttcgtgtgccactgggggggctgctccagggagctgaggcccttcaaagcccagtacatgctggtggttcacatgcgcagacacactggcgagaagccacacaagtgcacgtttgaagggtgccggaagtcatactcacgcctcgaaaacctgaagacgcacctgcggtcacacacgggtgagaagccatacatgtgtgagcacgagggctgcagtaaagccttcagcaatgccagtgaccgagccaagcaccagaatcggacccattccaatgagaagccgtatgtatgtaagctccctggctgcaccaaacgctatacagatcctagctcgctgcgaaaacatgtcaagacagtgcatggtcctgacgcccatgtgaccaaacggcaccgtggggatggccccctgcctcgggcaccatccatttctacagtggagcccaagagggagcgggaaggaggtcccatcagggaggaaagcagactgactgtgccagagggtgccatgaagccacagccaagccctggggcccagtcatcctgcagcagtgaccactccccggcagggagtgcagccaatacagacagtggtgtggaaatgactggcaatgcagggggcagcactgaagacctctccagcttggacgagggaccttgcattgctggcactggtctgtccactcttcgccgccttgagaacctcaggctggaccagctacatcaactccggccaatagggacccggggtctcaaactgcccagcttgtcccacaccggtaccactgtgtcccgccgcgtgggccccccagtctctcttgaacgccgcagcagcagctccagcagcatcagctctgcctatactgtcagccgccgctcctccctggcctctcctttcccccctggctccccaccagagaatggagcatcctccctgcctggccttatgcctgcccagcactacctgcttcgggcaagatatgcttcagccagagggggtggtacttcgcccactgcagcatccagcctggatcggataggtggtcttcccatgcctccttggagaagccgagccgagtatccaggatacaaccccaatgcaggggtcacccggagggccagtgacccagcccaggctgctgaccgtcctgctccagctagagtccagaggttcaagagcctgggctgtgtccataccccacccactgtggcagggggaggacagaactttgatccttacctcccaacctctgtctactcaccacagccccccagcatcactgagaatgctgccatggatgctagagggctacaggaagagccagaagttgggacctccatggtgggcagtggtctgaacccctatatggacttcccacctactgatactctgggatatgggggacctgaaggggcagcagctgagccttatggagcgaggggtccaggctctctgcctcttgggcctggtccacccaccaactatggccccaacccctgtccccagcaggcctcatatcctgaccccacccaagaaacatggggtgagttcccttcccactctgggctgtacccaggccccaaggctctaggtggaacctacagccagtgtcctcgacttgaacattatggacaagtgcaagtcaagccagaacaggggtgcccagtggggtctgactccacaggactggcaccctgcctcaatgcccaccccagtgaggggcccccacatccacagcctctcttttcccattacccccagccctctcctccccaatatctccagtcaggcccctatacccagccaccccctgattatcttccttcagaacccaggccttgcctggactttgattcccccacccattccacagggcagctcaaggctcagcttgtgtgtaattatgttcaatctcaacaggagctactgtgggagggtgggggcagggaagatgcccccgcccaggaaccttcctaccagagtcccaagtttctggggggttcccaggttagcccaagccgtgctaaagctccagtgaacacatatggacctggctttggacccaacttgcccaatcacaagtcaggttcctatcccaccccttcaccatgccatgaaaattttgtagtgggggcaaatagggcttcacatagggcagcagcaccacctcgacttctgcccccattgcccacttgctatgggcctctcaaagtgggaggcacaaaccccagctgtggtcatcctgaggtgggcaggctaggagggggtcctgccttgtaccctcctcccgaaggacaggtatgtaaccccctggactctcttgatcttgacaacactcagctggactttgtggctattctggatgagccccaggggctgagtcctcctccttcccatgatcagcggggcagctctggacataccccacctccctctgggccccccaacatggctgtgggcaacatgagtgtcttactgagatccctacctggggaaacagaattcctcaactctagtgcctaaagagtagggaatctcatccatcacagatcgcatttcctaaggggtttctatccttccagaaaaattgggggagctgcagtcccctgcacaagatgccccagggatgggaggtatgggctgggggctatgtatagtctgtatacgttttgaggagaaatttgataatgacactgtttcctgataataaaggaactgcatcagaaaaaataccatgccactttatgtattattatgttggggaggaatgataacagggaacaagaagagaagcaggggttaatccactcactttcctctttagagaagctccctcacccatcccaacacctcaagtcacactcatgaagatagagacagtcatttgggagatttaaagggatatcctcaaaacagaacaccagcctctcaccaccagagatgaccggaaatatgttttctcttcttccttccctgcatcaggggaagaggctggtgaagttggtgagcatcagctggaccagctgccctgggtagagagcatgggctgctgggt

SEQ ID NO: 285271 - DNA, 542 bp, Homo sapiens
cccagactccagccctggaccgcgcatcccgagcccagcgcccagacagagtgtccccacaccctcctctgagacgccatgttcaactcgatgaccccaccaccaatcagtagctatggcgagccctgctgtctccggcccctccccagtcagggggcccccagtgtggggacagaaggactgtctggcccgcccttctgccaccaagctaacctcatgtccggcccccacagttatgggccagccagagagaccaacagctgcaccgagggcccactcttttcttctccccggagtgcagtcaagttgaccaagaagcgggcactgtccatctcacctctgtcggatgccagcctggacctgcagacggttatccgcacctcacccagctccctcgtagctttcatcaactcgcgatgcacatctccaggaggctcctacggtcatctctccattggcaccatgaggtgcagtcagccccgggccaagaggcccctaaagcccctacccaagtccattaaaagtctcaagccctcaaacta

SEQ ID NO: 285272 - DNA, 591 bp, Homo sapiens
gctctcttcctgcttttgctatcttgctggcgcatctgctcacgcacgctgctgatgcaagcggccttgcgccctggggctgggcctgagaagggaggagttgctcaaccccttaagctttcaggccctggagagaatcttacaatatcagaagtgggattcacatagcgcttcccgtgaccctccaggaatatcaagtgacccagcaagacctgacacctaatgaatgtgtgaatagaaaacacctagatgctcagaagaatgggtagtgaaatattcgtattcatataccaatcagagagttttggctgatcacaggctgccaactgttcaaaccacattcaaataagggctgtgaccgtctacgacaagctggcatctttctttaaagaggcacctctggacctgcagcaccggctcctcatgaagctcagaacctgaggacccagccatggagcggtcagccttcatggagcaggatgctgggagcgggctggtgatgcgtctccatgagcggccagccctgctggtcagcagcacacctggacagtcctggatgcccccaccccgccacggtctcaatgagaaggg

SEQ ID NO: 285273 - DNA, 703 bp, Homo sapiens
agaattctctcccctaccaggtgtccctgaattctggctcccacttctgcggtgggctccctcatcagcgaacagtgggtggtatcagcagctcactgctacaagacccgcatccaggtgagactgggagagcacaacatcaaagtcctggaggggaatgagcagttcatcaatgcggccaagatcatccgccaccctaaatacaacagggacactctggacaatgacatcatgctgatcaaactctcctcacctgccgtcatcaatgcccgcgtgtccaccatctctctgcccaccgcccctccagctgctggcactgagtgcctcatctccggctggggcaacactctgagctttggtgctgactacccagacgagctgaagtgcctggatgctccggtgctgacccaggctgagtgtaaagcctcctaccctggaaagattaccaacagcatgttctgtgtgggcttccttgagggaggcaaggattcctgccagcgtgactctggtggccctgtggtctgcaacggacagctccaaggagttgtctcctggggccatggctgtgcctggaagaacaggcctggagtctacaccaaggtctacaactatgtggactggattaaggacaccatcgctgccaacagctaaagcccccggtccctctgcagtctctataccaataaagtggccctgctctcac

SEQ ID NO: 285274 - DNA, 660 bp, Homo sapiens
aggcacaatggttcacgtctgtgattccagcactttgggaggctgaggtggaaggatgacttgtctactaaaaataaaataattagccaagcgtggtggtgcacacctgtagtcccagctactcaggaagctgaggcaggaggatcacttgaaccctggggacggaggttgcagtgagttgagatcgtgccactgtactccagcctgggtgacagagtgagaccttgtctcaaaaaaaagaagaaaaaaagaccgcccctccagctgctggcactgagtgcctcatctccggctggggcaacactctgagctttggtgctgactacccagacgagctgaagtgcctggatgctccggtgctgacccaggctgagtgtaaagcctcctaccctggaaagattaccaacagcatgttctgtgtgggcttccttgagggaggcaaggattcctgccagcgtgactctggtggccctgtggtctgcaacggacagctccaaggagttgtctcctggggccatggctgtgcctggaagaacaggcctggagtctacaccaaggtctacaactatgtggactggattaaggacaccatcgctgccaacagctaaagcccccggtccctctgcagtctctataccaataaagtggccctgctctcac

SEQ ID NO: 285275 - DNA, 541 bp, Homo sapiens
gcctggcactgctgaccaccggagccttcgcgctcttcggggtcttcgccttggcctccatctctagcgtgccgctctgcccgctccgcctaggctcctccgcgctcaccactcagtacggcgccgccttctgggtcacgctggcaaccggcgtcctgtgcctcttcctcggaggggccgtggtgagtctccagtatgttcggcccagcgctcttcgcacccttctggaccaaagcgccaaggactgcagccaggagagagggggctcacctcttatcctcggcgacccactgcacaagcaggccgctctcccagacttaaaatgtatcaccactaacctgtgagggggacccaatctggactccttccccgccttgggacatcgcaggccgggaagcagtgcccgccaggcctgggccaggagagctccaggaagggcactgagcgctgctggcgcgaggcctcggacatccgcaggcaccagggaaagtctcctggggcgatctgtaaataaacctttttttcttttgttttttaaaaa

SEQ ID NO: 285276 - DNA, 734 bp, Homo sapiens
tccagtttacagaatgaattcacatctattaccctatttgcccctctcaatagttcgcagaaacaggcactgttatgaccattttacagatgaaaagtggggggctcagaagggtttggtgtcttgccgtgtttcatgtaattcagattagaggtgtgtggcgggaggtaacacaaggggtaggctccaaaagatggaagaaggcccgggcatcacgcctgtaatcccagcactttgggaggtcgaggcaggaaggtcgtttgaggccagagttcgagaccagcctgggcaacatagccctgactccacatgccctcctttctttcgatccccaccgccacaggcgtcctgtgcctcttcctcggaggggccgtggtgagtctccagtatgttcggcccagcgctcttcgcacccttctggaccaaagcgccaaggactgcagccaggagagagggggctcacctcttatcctcggcgacccactgcacaagcaggccgctctcccagacttaaaatgtatcaccactaacctgtgagggggacccaatctggactccttccccgccttgggacatcgcaggccgggaagcagtgcccgccaggcctgggccaggagagctccaggaagggcactgagcgctgctggcgcgaggcctcggacatccgcaggcaccagggaaagtctcctggggcgatctgtaaataaacctttttttcttttgttttttaaaaa

SEQ ID NO: 285277 - DNA, 1406 bp, Homo sapiens
agaggctgtgttgaggctaatggcggtgcccacggaactggatggagggagtgttaaggagaccgcagcggaagaggaatcgcgagttctggcacctggcgccgccccgttcggaaattttcctcattattctcgcttccaccctccggagcaacggctccgcctcctgcccccggagctgcttcgacagctctttcctgagagtcccgagaacgggccgattctggggctcgacgtggggtgtaactccggggatctgagtgtggctctatacaaacacttcctctccctacctgacggggaaacctgctcagatgcctcaagagaattccgtctcctctgctgcgacatagatccagtcctggtgaagcgagccgaaaaagaatgtccttttcctgatgccttgacttttatcaccctggacttcatgaatcaaaggacccggaaggttctcttgagctctttcttaagccaatttggacgttcagtttttgacattggcttctgcatgtcaataaccatgtggattcatctgaatcatggagaccatggcctatgggagttcctggcccatctttcctccctctgccactacctccttgtggagccccaaccctggaagtgttaccgggcagctgcaaggcgtctccgaaagctgggactccatgattttgaccacttccactcccttgccatccgaggtgacatgcccaatcagattgtgcagatcttgacccaggatcatggcatggaattaatatgttgctttggcaacaccagttgggacagaagccttctgctcttcagggcaaaacaaaccatagagactcatccaatccctgaatcactgatagaaaaagggaaagaaaagaacagattaagtttccagaagcagtgagatgggagggcaagaagaccaagaaagatattgaaagggttttatattgagaattatgttcattctccttaattccttaacaatcaggcagccgcaaaacctggcaggagcttttggtaaaatgtccaaggcacataattgaaagaatcagtatctgttccccattgtttggaacaaatcttgaggagaatgaatctgtggagtgatgagctaggatatctggattgagatggcctaggaaaagtggtcctggttatgggttatggagagggctgcttttggggattatttataaagatcagactaggctagtcttaaaatatgtcagttcctgggctctctgaatcctacctggtttcttcaggcttctggacttgctaggcctgcctttgggcaaaaccttagtaattcaggtctggaatggggcttaggaatctattttctgtttttttgtttgtttgtttttgcattcttctattgtaatatatacataaaatttaccatttta

SEQ ID NO: 285278 - DNA, 1498 bp, Homo sapiens
agaggctgtgttgaggctaatggcggtgcccacggaactggatggagggagtgttaaggagaccgcagcggaagaggaatcgcgagttctggcacctggcgccgccccgttcggaaattttcctcattattctcgcttccaccctccggagcaacggctccgcctcctgcccccggagctgcttcgacagctctttcctgagagtcccgagaacgggccgattctggggctcgacgtggggtgtaactccggggatctgagtgtggctctatacaaacacttcctctccctacctgacggggaaacctgctcagatgcctcaagagaattccgtctcctctgctgcgacatagatccagtcctggtgaagcgagccgaaaaagaatgtccttttcctgatgccttgacttttatcaccctggacttcatgaatcaaaggacccggaaggttctcttgagctctttcttaagccaatttggacgttcagtttttgacattggcttctgcatgtcaataaccatgtggattcatctgaatcatggagaccatggcctatgggagttcctggcccatctttcctccctctgccactacctccttgtggagccccaaccctggaagtgttaccgggcagctgcaaggcgtctccgaaagctgggactccatgattttgaccacttccactcccttgccatccgaggtgacatgcccaatcagattgtgcagatcttgacccaggatcatggcatggaattaatatgttgctttggcaacaccagttgggacagaagccttctgctcttcagggcaaaacaaaccatagagactcatccaatccctgaatcactgatagaaaaagggaaagaaaagaacagattaagtttccagaagcagtgagatgggagggcaagaagaccaagaaagatattgaaagggttttatattgagaattatgttcattctccttaattccttaacaatcaggcagccgcaaaacctggcaggagcttttggtaaaatgtccaaggcacataattgaaagaatcagtatctgttccccattgtttggaacaaatcttgaggagaatgaatctgtggagtgatgagctaggatatctggattgagatggcctaggaaaagtggtcctggttatgggttatggagagggctgcttttggggattatttataaagatcagactaggctagtcttaaaatatgtcagttcctgggctctctgaatcctacctggtttcttcaggcttctggacttgctaggcctgcctttgggcaaaaccttagtaattcaggtctggaatggggcttaggaatctattttctgtttttttgtttgtttgtttttgcattcttctattgtaatatatacataaaatttaccattttaaccgtttttaagtacagtttttcagaacgtggaaatcccatcaaaaattggattaaaaaattaaaagataaattgataatttttttaaaagt

SEQ ID NO: 285279 - DNA, 1287 bp, Homo sapiens
  misc_feature (3)..(3): n is a, c, g, or t
  misc_feature (85)..(85): n is a, c, g, or t
  misc_feature (89)..(89): n is a, c, g, or t
  misc_feature (98)..(98): n is a, c, g, or t
  misc_feature (101)..(102): n is a, c, g, or t
  misc_feature (117)..(117): n is a, c, g, or t
  misc_feature (120)..(120): n is a, c, g, or t
  misc_feature (132)..(132): n is a, c, g, or t
ccnccccccccccggctctcacgtttcctaagcccagacgccattgggcccacgggggaacccgggtctatgggccaaaaaaaantctnccctcctanggnntcttttttttttttnganattcttctcttngcgcaacatgatccagtcctggtgaagcgagccgaaaaagaatgtccttttcctgatgccttgacttttatcaccctggacttcatgaatcaaaggacccggaaggttctcttgagctctttcttaagccaatttggacgttcagtttttgacattggcttctgcatgtcaataaccatgtggattcatctgaatcatggagaccatggcctatgggagttcctggcccatctttcctccctctgccactacctccttgtggagccccaaccctggaagtgttaccgggcagctgcaaggcgtctccgaaagctgggactccatgattttgaccacttccactcccttgccatccgaggtgacatgcccaatcagattgtgcagatcttgacccaggatcatggcatggaattaatatgttgctttggcaacaccagttgggacagaagccttctgctcttcagggcaaaacaaaccatagagactcatccaatccctgaatcactgatagaaaaagggaaagaaaagaacagattaagtttccagaagcagtgagatgggagggcaagaagaccaagaaagatattgaaagggttttatattgagaattatgttcattctccttaattccttaacaatcaggcagccgcaaaacctggcaggagcttttggtaaaatgtccaaggcacataattgaaagaatcagtatctgttccccattgtttggaacaaatcttgaggagaatgaatctgtggagtgatgagctaggatatctggattgagatggcctaggaaaagtggtcctggttatgggttatggagagggctgcttttggggattatttataaagatcagactaggctagtcttaaaatatgtcagttcctgggctctctgaatcctacctggtttcttcaggcttctggacttgctaggcctgcctttgggcaaaaccttagtaattcaggtctggaatggggcttaggaatctattttctgtttttttgtttgtttgtttttgcattcttctattgtaatatatacataaaatttaccattttaaccgtttttaagtacagtttttcagaacgtggaaatcccatcaaaaattggattaaaaaattaaaagataaattgataatttttttaaaagt

SEQ ID NO: 285280 - DNA, 733 bp, Homo sapiens
ggcctgtcctggggacctggcgaggcccggcctctgccagccaagcctgctggggacgaccgaggtagcccgggctcggcttaggaaggcagcgggactcgaggccttggggtccgagtccgaactcgctcctctagcgccgggcggggagcgagtgggagagcggccgcgaagctccagtgttgaaaacgcacccctcccagctttttgcaaggcctacttgggggcggagagacaagcaagctgtcatgttataagcagccctttgaggggtccatgtgatgtcaaggaatgaagtctctagccaacatttaatgaggaactgaggcccaccaacaaccttgagtgagcttggaagtagctccttcagcatcagttgggtgtcgagatgactactgacagcttgactgcaacttcatgagagtcttctggaccagaaccactcagttaagtggctcccagattcctgatcctcagaaactctgagaaataatgaatgttggttgttttaaaatggtaaattttgaggtattatgttatgtggcaatagatagctaatatataaattatttgaatcaaacaatatgttaaattaaagctcagaagaataaacatctgtaattccttaatttgttttcccttctattctacagaatagaattttacagatgaaccttgtagttacttgtgcaataagagacagtatgttgtattgattaagtgcagagcctct

SEQ ID NO: 285281 - DNA, 1276 bp, Homo sapiens
tgcgcgtgcgcgcggggcacccgccgccgaccaggcaagccaggcagcaggcgacccaagaccgtccgcggaggagacaagcaagctgtcatgttataagcagccctttgaggggtccatgtgatgtcaaggaatgaagtctctagccaacatttaatgaggaactgaggcccaccaacaaccttgagtgagcttggaagtagctccttcagcatcagttgggtgtcgagatgactactgacagcttgactgcaacttcatgagagtcttctggaccagaaccactcaagtcagggtttccccatgttggtcagcctggtctcaaactcctgacttcaggtgatccacctgcctcagcctcccaaagcgctgggattacagtttcagttatctacggccaactgggtaaaccaaatagtgcagagatgatatttaaatcatgagactggattttttaaaaaggaagaggactgaagactaagttctgggcactccaattttgggcagtagcggagatgaagaaaaaccagcacactagatggtaaaggagcagccaacaagatgctctttacaaatattttttaacttcttaaaatatctcattgaggattccgttccaagatggccaaataggaacagctctggtctgcagctcccagtgtgatcgacgcagaagacggatgatttctgcatttccaactgaggtaccagttgaatgaagagaagcacacctcctccccagaacagtactgcagctatgatataacgcctgggcagcgttcgcaatagcagccaggctgtaatgtaagctggaatttcaatcaaggcagagaggaaacagttcagatggagtcttgctctgctgcccaggctggagtacagtagtgcgatcaaggctcactggaacctccacctcctgggttcaagtgattctcctgcctcagcctcccaagtagctgggattacagatggagtctagctctgtggcccaggctggagtgcagtggtgtgatctcagctcactgcaacctccacctcccaggttcaagcgattctcctgcctctcagcctcctgagtagctgggattacaggcgagcaccaccgcatctggctaatttttgcattttttgtagagactgggtttcaccatgttggccaggttggtctcaaactcctggcctcaagcagtctgcccactttggcctcccaaagtgctgggattacccagccttgctttttacacttctcttgttgtagtcatttagcatcagaaca

SEQ ID NO: 285282 - DNA, 1133 bp, Homo sapiens
tgcgcgtgcgcgcggggcacccgccgccgaccaggcaagccaggcagcaggcgacccaagaccgtccgcggaggagacaagcaagctgtcatgttataagcagccctttgaggggtccatgtgatgtcaaggaatgaagtctctagccaacatttaatgaggaactgaggcccaccaacaaccttgagtgagcttggaagtagctccttcagcatcagttgggtgtcgagatgactactgacagcttgactgcaacttcatgagagtcttctggaccagaaccactcaagtcagggtttccccatgttggtcagcctggtctcaaactcctgacttcaggtgatccacctgcctcagcctcccaaagcgctgggattacagtttcagttatctacggccaactgggtaaaccaaatagatgctctttacaaatattttttaacttcttaaaatatctcattgaggattccgttccaagatggccaaataggaacagctctggtctgcagctcccagtgtgatcgacgcagaagacggatgatttctgcatttccaactgaggtaccagttgaatgaagagaagcacacctcctccccagaacagtactgcagctatgatataacgcctgggcagcgttcgcaatagcagccaggctgtaatgtaagctggaatttcaatcaaggcagagaggaaacagttcagatggagtcttgctctgctgcccaggctggagtacagtagtgcgatcaaggctcactggaacctccacctcctgggttcaagtgattctcctgcctcagcctcccaagtagctgggattacagatggagtctagctctgtggcccaggctggagtgcagtggtgtgatctcagctcactgcaacctccacctcccaggttcaagcgattctcctgcctctcagcctcctgagtagctgggattacaggcgagcaccaccgcatctggctaatttttgcattttttgtagagactgggtttcaccatgttggccaggttggtctcaaactcctggcctcaagcagtctgcccactttggcctcccaaagtgctgggattacccagccttgctttttacacttctcttgttgtagtcatttagcatcagaaca

SEQ ID NO: 285283 - DNA, 1101 bp, Homo sapiens
ggaagggcaaattctctcattctctctcttcttgagctgggacatccattttctcctgccttcaggaaatcagagctccatgttcttggatctcccgactctgggacttacaccttacccttttcccctcagtctttcagacttggactgaattacaccatcacctttcctggttctccagcttgcagatagcatgtcatgggacttcttagcctctgtaatcatatgagccagttcatatagtaaatctcctcctattgatctatacctatatctgtaatcctattagttgggtttctttggaaaactctaatacccccttatccacagtttttttttttttctgcagtttcagttatctacggccaactgggtaaaccaaatagatgctctttacaaatattttttaacttcttaaaatatctcattgaggattccgttccaagatggccaaataggaacagctctggtctgcagctcccagtgtgatcgacgcagaagacggatgatttctgcatttccaactgaggtaccagttgaatgaagagaagcacacctcctccccagaacagtactgcagctatgatataacgcctgggcagcgttcgcaatagcagccaggctgtaatgtaagctggaatttcaatcaaggcagagaggaaacagttcagatggagtcttgctctgctgcccaggctggagtacagtagtgcgatcaaggctcactggaacctccacctcctgggttcaagtgattctcctgcctcagcctcccaagtagctgggattacagatggagtctagctctgtggcccaggctggagtgcagtggtgtgatctcagctcactgcaacctccacctcccaggttcaagcgattctcctgcctctcagcctcctgagtagctgggattacaggcgagcaccaccgcatctggctaatttttgcattttttgtagagactgggtttcaccatgttggccaggttggtctcaaactcctggcctcaagcagtctgcccactttggcctcccaaagtgctgggattacccagccttgctttttacacttctcttgttgtagtcatttagcatcagaaca

SEQ ID NO: 285284 - DNA, 641 bp, Homo sapiens
gggggcggggcctcgggttaacactgcagccgctagaccagctccctggcgggcgcggagcaagctttgacctttggaactgggcaccgcagccccaatatctgccctgcggtcagagcaacctgaacacttcctagtgaattgcaatgtaaaggtgaccagcgccgccacttgggtgatcttaacttctctcagcctcagttgcctcatctgtaaaatgtgtttcattcaagaaatgattacccagtgtctacttcgtgctaaacagccttgagcccttggcctacagcaatgaataaaaccatttgtgatgctcaaagagaagatggtcggtgtaacgcgcttgtgatgctcaaagagaagatggtcggtgtcatgcgcttctgatgctcaaagagatcggtgtcacgcgcatccgtgtgaagacaccgccaaacaggggacagaatctctctatgttgcccaggctggtctccaactcgtgggttcaagcgatcctcctgcctcagtctcccaaagtgctgggatgacaggtgtgggcaaccacacccagccaaggatctggtttttgaaaagataaataaatttaacaaacctccagcaagactgcaaagaaaaaagaaaaagagaagacacaaatt

SEQ ID NO: 285285 - DNA, 708 bp, Homo sapiens
cgcggcccgcgaatacgcgtggaccttgtggaacgccgggcctccccgggcgcccccgctctctggtagttgccgggagacccggccggtggggaagcccgcggagccgcagccccggccccggaaggtctctctgggccccgggcccgactcccacccctgcgccggcccgcgggcttcgcaggccctgcactgccgaccgggctgcgctcaaggccgccagccgcccgccgccctctttgtccccccgctgcaggaaggccgcggcagagggggcgccctccaagccgtcagccacgcacgcggaggcgctcgggcctcggggcggcgcaccgggagagcacgccggggaggacacgtgggccttcgcgcggattttaaggaaacagagcaacagctacaacaaaatggggagaagaaatgagaactgtgctaacagcctacgtgtgtcaaacatctctcaggagaacttatctcactggaatttggattcagaagtacctgtttctgaaaataaaaacctcccagctggaagggatggagcagcaggtggcaaaattaacaagaactatttggaaattccagtggagcaactgatgctagaacctaatttgtcggtgcatagtcaaaaaagtacacagaatagtaaacaagggatctttcaattatggacattgtcctcttaatgaaggaagtaccatagagaag

SEQ ID NO: 285286 - DNA, 550 bp, Homo sapiens
ataaaatgtgcttttctttctttctaggtgctttcaactgttttaaaactctacaagtaagtattcatttttgtctgtccagtaaatgaagacactgaacaagtcttaacagttatcttggatgaaagagtctagatggtattttggagagttattactggcttaggccttctgacttacattagactttcatctcccttaaaagtcccacagaactgaccatcatctccttaaaactatcgttttgattgttttctattatacctacctccttagattttctgtctccaactctaggggcatttctagctgaagatatttgattgctcctctccttcacatttctctatcttgtaattatattcgaattcatggatttaggccaggtgtggtggctcacacctgtaatcccagcgctttggaaggttgaggatggaggatggcttgaccccaggaggctgaggctgcagtttgttatgattgtgccactgcactccagcctgagcaacagagagagaccctgtctcttaaaacacacacacacacacac

SEQ ID NO: 285287 - DNA, 440 bp, Homo sapiens
agaatggcctgctccagatgggaagtttatctgcctggatcctgaaacgaagacgacatatggatcaggaactgagtcactgacagactacagctgacttacaacttaagtgctttcaactgttttaaaactctacaaggtgtggggctgcagatcggaccggatactggggctcagcgtggatgggtctttcatccattcgtcggattcccacaggcttgatggcatcaggctccacagtgtcaggctgctgcagctggctcaagtcatagtcctgcaaaaagacaaaatcaaaaaccgatgggagatgggcacaaagatagaaaattacaacctcgctttttaagcacatactcagaacacatagaaatgaggaaaatttaacataatggaaaagttgccactatgagtttttcatgttatgattaaatatttctttc

SEQ ID NO: 285288 - DNA, 710 bp, Homo sapiens
tgaggtttggtgactgcggggcaggccgggggcagctgtctgtctggctctttttgacagcccccagtgcgaaaggctgccagcatgtcatcagtgagccccatccagatccccagtcgcctcccgctgctgctcacccacgagggcgtcctgctgcccggctccaccatgcgcaccagcgtggactcggcccgcaacctgcagctggtgcggagccgcgcttctgaagggcgacgtcgctgcaaagcaccatcctgggcgtcatccccaacacgcctgaccccgccagcgacgcgcaggacctgccgcctgcttgcacaaggattggcacagctgcactggccgttcaggttgtgggcagtaactggcccaaagccccactacactctgttgattacaggcctatgccgtttccagattgtacaggtcttaaaagagaagccatatcccattgctgaagtggagcagttggaccgacttgaggagtttcccaacacctgtaaaatgagggaggagctaggagaactatcagagcagttttacaaatatgcagtacaattggttgaaatgttggatatgtctgtccctgcagttgctaaattgagacgtcttttagatagtcttccaagggaagctttaccagacatcttgacatcaattatccgaacaagcaacaaagagaaactccaggtacagtgttcccttttgaa

SEQ ID NO: 285289 - DNA, 1316 bp, Homo sapiens
aggcccgggtataaatggtaaaatgttaatatttgagattcttggctttttcttacattattctgtctttccttcttaatttttaattgttactaagagaaagctggtcacagtacactataatctcagctactctggaggctgagccaggagaatcactggagcccaagagtttgattacagcctgggcaacattgcaagatcccatatctaaaaaaaaagcaagcaagcaagagaagcagcggggattttaggaggtgcttctgcagaaaccagtcgtttatatcatcttcaacaatcctggctcttgctgaagtagactaggggcttccccgaggggcggctccacctcatgctgagacctctgcatgccttgggggtggaaatatttgatgagactcccaggggtccttgggaccttgggctgtgaggaccagaaggattagaggactgtgccccttctccccactgtagatcgaagtaaagctctcggtcaagttcaacagcagggagttcagcttgaagaggatgccgtcccgaaaacagacaggggtcttcggagtcaagattgctgtggtcaccaagagagagaggtccaaggtgccctacatcatgcgccagtgcgtggaggagatcgagcgccgaggcatggaggagataacaaggacgtgtcggtgatgatgagcgagatggacgtgaacgccatcgcaggcacgctgaagctgtacttccgtgagctgcccgagcccctcttcactgacgagttctaccccaacttcgcagagggcatcgggtggcagagaaggaggcggtcaataagatgtccctgcacaacctcgccactgtctttggccccacgctgctccggccctccgagaaggagagcaagctccctgccaaccccagccagcctgtcaccatgactgacagcaggtccttggaggtcatgtctcagggtcccagggctggtggttgctttgggtctacagctacgtcttacccgcctcctgcctcaacagcctgtgtggtggcaaagccggtgtggggctggggaacgcagcgttctccaggaggggacccggctctccttctgcagtgcaggcgaaggcctagatgccagtgtgacctcccacaaggcgtggcttccagactccccggccggaagtgatgcttttttgccgcgggccctgggtttgaagcagcctggctttctcttggtaagtggctggtgtcttagcagctgcaatctgagctcagccacctacacaccaccgtggccgacactttcattaaaaagtttcctgagaaaaaaaaag

SEQ ID NO: 285290 - DNA, 810 bp, Homo sapiens
cctgtgtggaggtattggaattgtccattgctaagactcagaggagaaaagcacttagcatcgcaggacttggagcaccggtgctgaggcaacccttcattcattcgtcggatgtgtgttaaggcccagggcaggggtcagggattctcctctcacacagcacgtgggtggcaggaccaacaccgggtctgacctcccagccgggggcacaggctgctaaccccaggcctggaatctgtcagatgcccttcctgtgctgacttgacttagacaggcctcctgaccttcccgcaaaggtcatgtgtgattcgcaggggttctggccgcttgaaaggttcctgagaaagcacatgccatgaggacagagcttgcagagggaggacaggcatgcagaaggctctgtgtgcagccccagacctgggtaccttcgtcaccgtcctcaccccacctccgggtgtgcagatagggagcaggcctcctgtgttatggcccaagcggggctgttaggacactgagaacattccctcctcccgcaggagagagaggtccaaggtgccctacatcatgcgccagtgcgtggaggagatcgagcgccgaggcatggaggaggtgggcatctaccgcgtgtccggtgtggccacggacatccaggcactgaaggcaggcttcaacgtcagtgagtgtcggcctgcgcaggacgggatggaggtgtgggcagtggtgtccgcgatgagatctcagagtgctccatggcccaggcatgtcacatccttctctgtgtcttttcttcatttactgttttattatttt

SEQ ID NO: 285291 - DNA, 2713 bp, Homo sapiens
  misc_feature (1)..(1): n is a, c, g, or t
  misc_feature (3)..(4): n is a, c, g, or t
ncnnagggcgagagcccagagagctgaacctgcatcccggacctgcggcgaccgtcgtacaccatgggcctccacctccgcccctaccgtgtggggctgctcccggatggcctcctgttcctcttgctgctgctaatgctgctcgcggacccagcgctcccggccggacgtcaccccccagtggtgctggtccctggtgatttgggtaaccaactggaagccaagctggacaagccgacagtggtgcactacctctgctccaagaagaccgaaagctacttcacaatctggctgaacctggaactgctgctgcctgtcatcattgactgctggattgacaatatcaggctggtttacaacaaaacatccagggccacccagtttcctgatggtgtggatgtacgtgtccctggctttgggaagaccttctcactggagttcctggaccccagcaaaagcagcgtgggttcctatttccacaccatggtggagagccttgtgggctggggctacacacggggtgaggatgtccgaggggctccctatgactggcgccgagccccaaatgaaaacgggccctacttcctggccctccgcgagatgatcgaggagatgtaccagctgtatgggggccccgtggtgctggttgcccacagtatgggcaacatgtacacgctctactttctgcagcggcagccgcaggcctggaaggacaagtatatccgggccttcgtgtcactgggtgcgccctgggggggcgtggccaagaccctgcgcgtcctggcttcaggagacaacaaccggatcccagtcatcgggcccctgaagatccgggagcagcagcggtcagctgtctccaccagctggctgctgccctacaactacacatggtcacctgagaaggtgttcgtgcagacacccacaatcaactacacactgcgggactaccgcaagttcttccaggacatcggctttgaagatggctggctcatgcggcaggacacagaagggctggtggaagccacgatgccacctggcgtgcagctgcactgcctctatggtactggcgtccccacaccagactccttctactatgagagcttccctgaccgtgaccctaaaatctgctttggtgacggcgatggtactgtgaacttgaagagtgccctgcagtgccaggcctggcagagccgccaggagcaccaagtgttgctgcaggagctgccaggcagcgagcacatcgagatgctggccaacgccaccaccctggcctatctgaaacgtgtgctccttgggccctgactcctgtgccacaggactcctgtggctcggccgtggacctgctgttggcctctggggctgtcatggcccacgcgttttgcaaagtttgtgactcaccattcaaggccccgagtcttggactgtgaagcatctgccatggggaagtgctgtttgttatcctttctctgtggcagtgaagaaggaagaaatgagagtctagactcaagggacactggatggcaagaatgctgctgatggtggaactgctgtgaccttaggactggctccacagggtggactggctgggccctggtcccagtccctgcctggggccatgtgtcccccctattcctgtgggcttttcatacttgcctactgggccctggccccgcagccttcctatgagggatgttactgggctgtggtcctgtacccagaggtcccagggatcggctcctggcccctcgggtgacccttcccacacaccagccacagataggcctgccactggtcatgggtagctagagctgctggcttccctgtggcttagctggtggccagcctgactggcttcctgggcgagcctagtagctcctgcaggcaggggcagtttgttgcgttcttcgtggttcccaggccctgggacatctcactccactcctacctcccttaccaccaggagcattcaagctctggattgggcagcagatgtgcccccagtcccgcaggctgtgttccaggggccctgatttcctcggatgtgctattggccccaggactgaagctgcctcccttcaccctgggactgtggttccaaggatgagagcaggggttggagccatggccttctgggaacctatggagaaagggaatccaaggaagcagccaaggctgctcgcagcttccctgagctgcacctcttgctaaccccaccatcacactgccaccctgccctagggtctcactagtaccaagtgggtcagcacagggctgaggatggggctcctatccaccctggccagcacccagcttagtgctgggactagcccagaaacttgaatgggaccctgagagagccaggggtcccctgaggcccccctaggggctttctgtctgccccagggtgctccatggatctccctgtggcagcaggcatggagagtcagggctgccttcatggcagtaggctctaagtgggtgactggccacaggccgagaaaagggtacagcctctaggtggggttcccaaagacgccttcaggctggactgagctgctctcccacagggtttctgtgcagctggattttctctgttgcatacatgcctggcatctgtctccccttgttcctgagtggccccacatggggctctgagcaggctgtatctggattctggcaataaaagtactctggatgctgtaaaaaagtgccc

SEQ ID NO: 285292 - DNA, 2809 bp, Homo sapiens
  misc_feature (1)..(1): n is a, c, g, or t
  misc_feature (3)..(4): n is a, c, g, or t
ncnnagggcgagagcccagagagctgaacctgcatcccggacctgcggcgaccgtcgtacaccatgggcctccacctccgcccctaccgtgtggggctgctcccggatggcctcctgttcctcttgctgctgctaatgctgctcgcggacccagcgctcccggccggacgtcaccccccagtggtgctggtccctggtgatttgggtaaccaactggaagccaagctggacaagccgacagtggtgcactacctctgctccaagaagaccgaaagctacttcacaatctggctgaacctggaactgctgctgcctgtcatcattgactgctggattgacaatatcaggctggagtgcagtggcgcaatctcggctcactacacctctgcctcccaggctcaagcacttctcctgcctcagactccggataactgggattacaggctggtttacaacaaaacatccagggccacccagtttcctgatggtgtggatgtacgtgtccctggctttgggaagaccttctcactggagttcctggaccccagcaaaagcagcgtgggttcctatttccacaccatggtggagagccttgtgggctggggctacacacggggtgaggatgtccgaggggctccctatgactggcgccgagccccaaatgaaaacgggccctacttcctggccctccgcgagatgatcgaggagatgtaccagctgtatgggggccccgtggtgctggttgcccacagtatgggcaacatgtacacgctctactttctgcagcggcagccgcaggcctggaaggacaagtatatccgggccttcgtgtcactgggtgcgccctgggggggcgtggccaagaccctgcgcgtcctggcttcaggagacaacaaccggatcccagtcatcgggcccctgaagatccgggagcagcagcggtcagctgtctccaccagctggctgctgccctacaactacacatggtcacctgagaaggtgttcgtgcagacacccacaatcaactacacactgcgggactaccgcaagttcttccaggacatcggctttgaagatggctggctcatgcggcaggacacagaagggctggtggaagccacgatgccacctggcgtgcagctgcactgcctctatggtactggcgtccccacaccagactccttctactatgagagcttccctgaccgtgaccctaaaatctgctttggtgacggcgatggtactgtgaacttgaagagtgccctgcagtgccaggcctggcagagccgccaggagcaccaagtgttgctgcaggagctgccaggcagcgagcacatcgagatgctggccaacgccaccaccctggcctatctgaaacgtgtgctccttgggccctgactcctgtgccacaggactcctgtggctcggccgtggacctgctgttggcctctggggctgtcatggcccacgcgttttgcaaagtttgtgactcaccattcaaggccccgagtcttggactgtgaagcatctgccatggggaagtgctgtttgttatcctttctctgtggcagtgaagaaggaagaaatgagagtctagactcaagggacactggatggcaagaatgctgctgatggtggaactgctgtgaccttaggactggctccacagggtggactggctgggccctggtcccagtccctgcctggggccatgtgtcccccctattcctgtgggcttttcatacttgcctactgggccctggccccgcagccttcctatgagggatgttactgggctgtggtcctgtacccagaggtcccagggatcggctcctggcccctcgggtgacccttcccacacaccagccacagataggcctgccactggtcatgggtagctagagctgctggcttccctgtggcttagctggtggccagcctgactggcttcctgggcgagcctagtagctcctgcaggcaggggcagtttgttgcgttcttcgtggttcccaggccctgggacatctcactccactcctacctcccttaccaccaggagcattcaagctctggattgggcagcagatgtgcccccagtcccgcaggctgtgttccaggggccctgatttcctcggatgtgctattggccccaggactgaagctgcctcccttcaccctgggactgtggttccaaggatgagagcaggggttggagccatggccttctgggaacctatggagaaagggaatccaaggaagcagccaaggctgctcgcagcttccctgagctgcacctcttgctaaccccaccatcacactgccaccctgccctagggtctcactagtaccaagtgggtcagcacagggctgaggatggggctcctatccaccctggccagcacccagcttagtgctgggactagcccagaaacttgaatgggaccctgagagagccaggggtcccctgaggcccccctaggggctttctgtctgccccagggtgctccatggatctccctgtggcagcaggcatggagagtcagggctgccttcatggcagtaggctctaagtgggtgactggccacaggccgagaaaagggtacagcctctaggtggggttcccaaagacgccttcaggctggactgagctgctctcccacagggtttctgtgcagctggattttctctgttgcatacatgcctggcatctgtctccccttgttcctgagtggccccacatggggctctgagcaggctgtatctggattctggcaataaaagtactctggatgctgtaaaaaagtgccc

SEQ ID NO: 285293 - DNA, 1877 bp, Homo sapiens
  misc_feature (12)..(12): n is a, c, g, or t
  misc_feature (16)..(16): n is a, c, g, or t
tcaggctggtancctncgagtaacgggctggctgctgccctacaactacacatggtcacctgagaaggtgttcgtgcagacacccacaatcaactacacactgcgggactaccgcaagttcttccaggacatcggctttgaagatggctggctcatgcggcaggacacagaagggctggtggaagccacgatgccacctggcgtgcagctgcactgcctctatggtactggcgtccccacaccagactccttctactatgagagcttccctgaccgtgaccctaaaatctgctttggtgacggcgatggtactgtgaacttgaagagtgccctgcagtgccaggcctggcagagccgccaggagcaccaagtgttgctgcaggagctgccaggcagcgagcacatcgagatgctggccaacgccaccaccctggcctatctgaaacgtgtgctccttgggccctgactcctgtgccacaggactcctgtggctcggccgtggacctgctgttggcctctggggctgtcatggcccacgcgttttgcaaagtttgtgactcaccattcaaggccccgagtcttggactgtgaagcatctgccatggggaagtgctgtttgttatcctttctctgtggcagtgaagaaggaagaaatgagagtctagactcaagggacactggatggcaagaatgctgctgatggtggaactgctgtgaccttaggactggctccacagggtggactggctgggccctggtcccagtccctgcctggggccatgtgtcccccctattcctgtgggcttttcatacttgcctactgggccctggccccgcagccttcctatgagggatgttactgggctgtggtcctgtacccagaggtcccagggatcggctcctggcccctcgggtgacccttcccacacaccagccacagataggcctgccactggtcatgggtagctagagctgctggcttccctgtggcttagctggtggccagcctgactggcttcctgggcgagcctagtagctcctgcaggcaggggcagtttgttgcgttcttcgtggttcccaggccctgggacatctcactccactcctacctcccttaccaccaggagcattcaagctctggattgggcagcagatgtgcccccagtcccgcaggctgtgttccaggggccctgatttcctcggatgtgctattggccccaggactgaagctgcctcccttcaccctgggactgtggttccaaggatgagagcaggggttggagccatggccttctgggaacctatggagaaagggaatccaaggaagcagccaaggctgctcgcagcttccctgagctgcacctcttgctaaccccaccatcacactgccaccctgccctagggtctcactagtaccaagtgggtcagcacagggctgaggatggggctcctatccaccctggccagcacccagcttagtgctgggactagcccagaaacttgaatgggaccctgagagagccaggggtcccctgaggcccccctaggggctttctgtctgccccagggtgctccatggatctccctgtggcagcaggcatggagagtcagggctgccttcatggcagtaggctctaagtgggtgactggccacaggccgagaaaagggtacagcctctaggtggggttcccaaagacgccttcaggctggactgagctgctctcccacagggtttctgtgcagctggattttctctgttgcatacatgcctggcatctgtctccccttgttcctgagtggccccacatggggctctgagcaggctgtatctggattctggcaataaaagtactctggatgctgtaaaaaagtgccc

SEQ ID NO: 285294 - DNA, 1069 bp, Homo sapiens
gctggtaccggtccggagttttaggatgcagccttcctatgagggatgttactgggctgtggtcctgtacccagaggtcccagggatcggctcctggcccctcgggtgacccttcccacacaccagccacagataggcctgccactggtcatgggtagctagagctgctggcttccctgtggcttagctggtggccagcctgactggcttcctgggcgagcctagtagctcctgcaggcaggggcagtttgttgcgttcttcgtggttcccaggccctgggacatctcactccactcctacctcccttaccaccaggagcattcaagctctggattgggcagcagatgtgcccccagtcccgcaggctgtgttccaggggccctgatttcctcggatgtgctattggccccaggactgaagctgcctcccttcaccctgggactgtggttccaaggatgagagcaggggttggagccatggccttctgggaacctatggagaaagggaatccaaggaagcagccaaggctgctcgcagcttccctgagctgcacctcttgctaaccccaccatcacactgccaccctgccctagggtctcactagtaccaagtgggtcagcacagggctgaggatggggctcctatccaccctggccagcacccagcttagtgctgggactagcccagaaacttgaatgggaccctgagagagccaggggtcccctgaggcccccctaggggctttctgtctgccccagggtgctccatggatctccctgtggcagcaggcatggagagtcagggctgccttcatggcagtaggctctaagtgggtgactggccacaggccgagaaaagggtacagcctctaggtggggttcccaaagacgccttcaggctggactgagctgctctcccacagggtttctgtgcagctggattttctctgttgcatacatgcctggcatctgtctccccttgttcctgagtggccccacatggggctctgagcaggctgtatctggattctggcaataaaagtactctggatgctgtaaaaaagtgccc

SEQ ID NO: 285295 - DNA, 988 bp, Homo sapiens
ccggccccttccctctcggatgggggccctgggggtgacgtacacaccccatccttcccgcaccgcctctgcccgccgcccgtcgcccgccatagttgttgacgtagctttagtcgatcgcgaagatggctttatggaccctaggttctcctgccggtggtggcgatggcttctcgggggtgttgggcggtggccgctgtggtcagggaggcagttgcgagtcgctggggccgccgcctgcgtcgtcgctgctgtgtagcaaacctgcctctgggcccatggtgtgtcttgagggctgtgagagaggcagtgcctgagctgggtcagctgctgtggatcgctcccgcctcctggctggaggcaccaaagaggaggagaagggggaggaggacgtctctgccatcgcccttaagtaaaggaggggtgggggcgatagaaggatggcagggcaacttgcctgtcctaagtctagccgctcgtggcaagtgttgactgcgtgtaggagactcccgtcctatctcccagtaccaagtctcggggaaaaggagtgcgacgagggtggagaagaccaagtttcgcttctcggccccaggctgttgcgcagtttccctggaatctttttgatcgactgctacgttgaccatgtccttcccagtgtccttagcaggagtgatggccagagagagaacttttgcacatgccatgttttcgtggcaaaaattttagtttcaagtaccttatgagggcggttacctagttttgaattttgtcacttgttgagggtgtacaaaatcctatctagagtcatactcgttggatgtattttcttttccgaaatgtacccataggacacataaccttattcctggtctttaatatttctcggttttataccaagcagcagtgttcggaagaccatgttagtgctacattgtgcacagtgagaaatgaacaagttttttaattaaagacagcactgtaattttaa

SEQ ID NO: 285296 - DNA, 693 bp, Homo sapiens
catgtcaatatctaagactttaattttttccccaacattctctgaggcctttgtgtagatagtagattgtcctcccacccctaaacacattgcagatttttaattggaatggataggtcagatgtaggagacccaggtaaggaggcgtcgaggtcaaaagacctccgagattcctagagcggtcggcgaggggcctgcaagtcgccccggccgcacttccgggacggcccatcttccttgggtactgaagctcgcgagaggatcctgggggcaggcgcgtcgcggtggcagtgtttcttgggtgtgcggggccgggcgccccgtagcctctggtctgcatggggattacaggtgtttggcaagtggcatggcagaacagagaatctagattcaggacctggacttggatataagctgtcacttgttacttggccttgcactaaatgaccattctcaggacaagttcagcaaccctaaaggcaaactggcctagggcctgggaagtggagaatgcctattcctaggctaacccaagcattagagaagcatcaggccgccattctagactcaactgctcacctcctctgatccactgaggtgtctctggaaatcctccaccacagccacagcctcctcaccactctcagggtgatgcagctgcacccaggtccggagctccccagggaggatgct

SEQ ID NO: 285297 - DNA, 566 bp, Homo sapiens
  misc_feature (521)..(521): n is a, c, g, or t
  misc_feature (544)..(544): n is a, c, g, or t
  misc_feature (547)..(548): n is a, c, g, or t
  misc_feature (554)..(554): n is a, c, g, or t
gcggccgcctactactactaaattcgcggccgcgtcgacctccagctcactctaccccatctccttgccgggtcagccctgacaaaggtcagctagccccttgaggacatcagctttggcctcagggtcctaatggcagcagaaccactgacagagctagaggagtccattgagaccgtggtcaccaccttcttcacctttgcaaggcaggagggccggaaggatagcctcagcgtcaacgagttcaaagagctggttacccagcagttgccccatctgctcaaggatgtgggctctcttgatgagaagatgaagagcttggatgtgaatcaggactcggagctcaagttcaatgagtactggagattgattggggagctggccaaggaaatcaggaagaagaaagacctgaagatcaggaagaagtaaagccgcctggctgagatggggtgggcagggcagagctgatcagggccgagcagaaccgcactcttcccaaataaagcttcctcctgagaaanaaaaaaaacaaaaaaaaaaaaanatnngggggngcgccggggccc

SEQ ID NO: 285298 - DNA, 308 bp, Homo sapiens
ccgtctgctcacccggcctgccctttcctgcctttcgtctgcagcggccgccagctcctgctcggtgtccaaaacaaaatggccgccacgtccagtgcttgtctgaccggctaaaatggcgtctacgcaattacgtcaggcgtcagatccgcgcacgactagagggcgggaaagatttgagctacgcctgcgcagagtacccagcttagtgcttttagacttttaaccagacccttagacccccacagtaccggacctcaagcattcctaaagtaggcaggtgacatacgccttagccttttcacgaa

SEQ ID NO: 285299 - DNA, 1573 bp, Homo sapiens
gaggaaacagacgccagtgctcctcccggggctgccaccacggctccggcaggcgggccggggaccggccgaacctgagttgacggtggaggggctcggcggccgccagctcctgctcggtgtccaaaacaaaatggccgccacgtccagtgcttgtctgaccggctaaaatggcgtctacgcaattacgtcaggcgtcagatccgcgcacgactagagggcgggaaagatttgagctacgcctgcgcagagttgagaagctgatgtctcctcgacttccaactggaaccttgaacccccacatttctggaccttgagcattcctcaagtaggaagatgtaatgcaccttgacctctttctaaataagacacttccccaaataaggggagttgagagtgaacagtcttcacgtctccacccacttccagatcccagaggagacagacatcggatggctgataatcttccaatggaaatccatggttcaagtgccacctcttcaggaaagccatctgacttcaatcaggcagcagtggatggtgcaggggaaagaggtgggaaggaggtcctgggagggacactggatgtcttaccccaagctgggccttgcagtacctgtggctggctgtgctggttgagcccgaatcgaccacggaaatttgacacctccgggcttggaagcagctctctcctccttccccgctgcttataaacctcagccctgaggctccagctcactctaccccatctccttgccgggtcagccctgacaaaggtcagctagccccttgaggacatcagctttggcctcagggtcctaatggcagcagaaccactgacagagctagaggagtccattgagaccgtggtcaccaccttcttcacctttgcaaggcaggagggccggaaggatagcctcagcgtcaacgagttcaaagagctggttacccagcagttgccccatctgctcaaggatgtgggctctcttgatgagaagatgaagagcttggatgtgaatcaggactcggagctcaagttcaatgagtactggagattgattggggagctggccaaggaaatcaggaagaagaaagacctgaagatcaggaagaagtaaagccgcctggctgagatggggtgggcagggcagagctgatcagggccgagcagaaccgcactcttcccaaataaagcttcctccttgaaacacaaaaaaaaaaaaaaaaaaaaaaaaaaaaaaaaaaaaaaaaaaaaaaaaaaaaaggggggggggggaaaaaaaatccccggggggggccccaatttggtataacccatttttttggtaaagaggggggcccaataagaggggcggggtattaaaaaaccgaaggacacgaggggacgggtaaacaaagcgcggggggggaaaattggtatgtggggaacttggggaaggaagaccccatgttggggggcgaatagtggggaacaccctgaggagatttagagcccgaggagatatacactttcacgttgagtgtgaaccacgcgaatacctcgtgaaaaattgcgacggattttagagattag

SEQ ID NO: 285300 - DNA, 1606 bp, Homo sapiens
gaggaaacagacgccagtgctcctcccggggctgccaccacggctccggcaggcgggccggggaccggccgaacctgagttgacggtggaggggctcggcggccgccagctcctgctcggtgtccaaaacaaaatggccgccacgtccagtgcttgtctgaccggctaaaatggcgtctacgcaattacgtcaggcgtcagatccgcgcacgactagagggcgggaaagatttgagctacgcctgcgcagagttgagaagctgatgtctcctcgacttccaactggaaccttgaacccccacatttctggaccttgagcattcctcaagtaggaagatgtaatgcaccttgacctctttctaaataagacacttccccaaataaggggagttgagagtgaacagtcttcacgtctccacccacttccagatcccagaggagacagacatcggatggctgttacctcctcctaaaatgtctgcatttacccagataatcttccaatggaaatccatggttcaagtgccacctcttcaggaaagccatctgacttcaatcaggcagcagtggatggtgcaggggaaagaggtgggaaggaggtcctgggagggacactggatgtcttaccccaagctgggccttgcagtacctgtggctggctgtgctggttgagcccgaatcgaccacggaaatttgacacctccgggcttggaagcagctctctcctccttccccgctgcttataaacctcagccctgaggctccagctcactctaccccatctccttgccgggtcagccctgacaaaggtcagctagccccttgaggacatcagctttggcctcagggtcctaatggcagcagaaccactgacagagctagaggagtccattgagaccgtggtcaccaccttcttcacctttgcaaggcaggagggccggaaggatagcctcagcgtcaacgagttcaaagagctggttacccagcagttgccccatctgctcaaggatgtgggctctcttgatgagaagatgaagagcttggatgtgaatcaggactcggagctcaagttcaatgagtactggagattgattggggagctggccaaggaaatcaggaagaagaaagacctgaagatcaggaagaagtaaagccgcctggctgagatggggtgggcagggcagagctgatcagggccgagcagaaccgcactcttcccaaataaagcttcctccttgaaacacaaaaaaaaaaaaaaaaaaaaaaaaaaaaaaaaaaaaaaaaaaaaaaaaaaaaaggggggggggggaaaaaaaatccccggggggggccccaatttggtataacccatttttttggtaaagaggggggcccaataagaggggcggggtattaaaaaaccgaaggacacgaggggacgggtaaacaaagcgcggggggggaaaattggtatgtggggaacttggggaaggaagaccccatgttggggggcgaatagtggggaacaccctgaggagatttagagcccgaggagatatacactttcacgttgagtgtgaaccacgcgaatacctcgtgaaaaattgcgacggattttagagattag

SEQ ID NO: 285301 - DNA, 1489 bp, Homo sapiens
gaggaaacagacgccagtgctcctcccggggctgccaccacggctccggcaggcgggccggggaccggccgaacctgagttgacggtggaggggctcggcggccgccagctcctgctcggtgtccaaaacaaaatggccgccacgtccagtgcttgtctgaccggctaaaatggcgtctacgcaattacgtcaggcgtcagatccgcgcacgactagagggcgggaaagatttgagctacgcctgcgcagagttgagaagctgatgtctcctcgacttccaactggaaccttgaacccccacatttctggaccttgagcattcctcaagtaggaagatgtaatgcaccttgacctctttctaaataagacacttccccaaataaggggagttgagagtgaacagtcttcacgtctccacccacttccagatcccagaggagacagacatcggatggctgttacctcctcctaaaatgtctgcatttacccagataatcttccaatggaaatccatggttcaagtgccacctcttcaggaaagccatctgacttcaatcagaatcgaccacggaaatttgacacctccgggcttggaagcagctctctcctccttccccgctgcttataaacctcagccctgaggctccagctcactctaccccatctccttgccgggtcagccctgacaaaggtcagctagccccttgaggacatcagctttggcctcagggtcctaatggcagcagaaccactgacagagctagaggagtccattgagaccgtggtcaccaccttcttcacctttgcaaggcaggagggccggaaggatagcctcagcgtcaacgagttcaaagagctggttacccagcagttgccccatctgctcaaggatgtgggctctcttgatgagaagatgaagagcttggatgtgaatcaggactcggagctcaagttcaatgagtactggagattgattggggagctggccaaggaaatcaggaagaagaaagacctgaagatcaggaagaagtaaagccgcctggctgagatggggtgggcagggcagagctgatcagggccgagcagaaccgcactcttcccaaataaagcttcctccttgaaacacaaaaaaaaaaaaaaaaaaaaaaaaaaaaaaaaaaaaaaaaaaaaaaaaaaaaaggggggggggggaaaaaaaatccccggggggggccccaatttggtataacccatttttttggtaaagaggggggcccaataagaggggcggggtattaaaaaaccgaaggacacgaggggacgggtaaacaaagcgcggggggggaaaattggtatgtggggaacttggggaaggaagaccccatgttggggggcgaatagtggggaacaccctgaggagatttagagcccgaggagatatacactttcacgttgagtgtgaaccacgcgaatacctcgtgaaaaattgcgacggattttagagattag

SEQ ID NO: 285302 - DNA, 1365 bp, Homo sapiens
gaggaaacagacgccagtgctcctcccggggctgccaccacggctccggcaggcgggccggggaccggccgaacctgagttgacggtggaggggctcggcggccgccagctcctgctcggtgtccaaaacaaaatggccgccacgtccagtgcttgtctgaccggctaaaatggcgtctacgcaattacgtcaggcgtcagatccgcgcacgactagagggcgggaaagatttgagctacgcctgcgcagagttgagaagctgatgtctcctcgacttccaactggaaccttgaacccccacatttctggaccttgagcattcctcaagtaggaagatatcccagaggagacagacatcggatggctgataatcttccaatggaaatccatggttcaagtgccacctcttcaggaaagccatctgacttcaatcagaatcgaccacggaaatttgacacctccgggcttggaagcagctctctcctccttccccgctgcttataaacctcagccctgaggctccagctcactctaccccatctccttgccgggtcagccctgacaaaggtcagctagccccttgaggacatcagctttggcctcagggtcctaatggcagcagaaccactgacagagctagaggagtccattgagaccgtggtcaccaccttcttcacctttgcaaggcaggagggccggaaggatagcctcagcgtcaacgagttcaaagagctggttacccagcagttgccccatctgctcaaggatgtgggctctcttgatgagaagatgaagagcttggatgtgaatcaggactcggagctcaagttcaatgagtactggagattgattggggagctggccaaggaaatcaggaagaagaaagacctgaagatcaggaagaagtaaagccgcctggctgagatggggtgggcagggcagagctgatcagggccgagcagaaccgcactcttcccaaataaagcttcctccttgaaacacaaaaaaaaaaaaaaaaaaaaaaaaaaaaaaaaaaaaaaaaaaaaaaaaaaaaaggggggggggggaaaaaaaatccccggggggggccccaatttggtataacccatttttttggtaaagaggggggcccaataagaggggcggggtattaaaaaaccgaaggacacgaggggacgggtaaacaaagcgcggggggggaaaattggtatgtggggaacttggggaaggaagaccccatgttggggggcgaatagtggggaacaccctgaggagatttagagcccgaggagatatacactttcacgttgagtgtgaaccacgcgaatacctcgtgaaaaattgcgacggattttagagattag

SEQ ID NO: 285303 - DNA, 1259 bp, Homo sapiens
agggatcttggtctgtagcatcctttgtgggatctcattccaaggggcctctgtgtgtgtctcagattgggcctctcagtgttgagctcccttgattggttgcctccctcttcccccctcagcatacacactcctgattagacatgggtatggtggcagcagcccccagtattgagaggactaggaccctgggacccctgccgaacgagatctgtccaggcagctcctctccctgaccaagtgggggcgctcgtgtggctggcagggagcccgggtccagacctgagggctcagggcaagcggcctgattgggctgtctctggtcttcagaatcgaccacggaaatttgacacctccgggcttggaagcagctctctcctccttccccgctgcttataaacctcagccctgaggctccagctcactctaccccatctccttgccgggtcagccctgacaaaggtcagctagccccttgaggacatcagctttggcctcagggtcctaatggcagcagaaccactgacagagctagaggagtccattgagaccgtggtcaccaccttcttcacctttgcaaggcaggagggccggaaggatagcctcagcgtcaacgagttcaaagagctggttacccagcagttgccccatctgctcaaggatgtgggctctcttgatgagaagatgaagagcttggatgtgaatcaggactcggagctcaagttcaatgagtactggagattgattggggagctggccaaggaaatcaggaagaagaaagacctgaagatcaggaagaagtaaagccgcctggctgagatggggtgggcagggcagagctgatcagggccgagcagaaccgcactcttcccaaataaagcttcctccttgaaacacaaaaaaaaaaaaaaaaaaaaaaaaaaaaaaaaaaaaaaaaaaaaaaaaaaaaaggggggggggggaaaaaaaatccccggggggggccccaatttggtataacccatttttttggtaaagaggggggcccaataagaggggcggggtattaaaaaaccgaaggacacgaggggacgggtaaacaaagcgcggggggggaaaattggtatgtggggaacttggggaaggaagaccccatgttggggggcgaatagtggggaacaccctgaggagatttagagcccgaggagatatacactttcacgttgagtgtgaaccacgcgaatacctcgtgaaaaattgcgacggattttagagattag

SEQ ID NO: 285304 - DNA, 1207 bp, Homo sapiens
ggattcttgagacagacacgccacagaggggccaccagacttgaaggactccaagaaggaccttcaactgaagacctcctctcaagtagaggggtctccagatcgagggatcaccacagaggggtccctaagccacagacatttaaaaaggatcccggattgtgagacctacagaagagggggtttctggagctgaatctcctgcccccaccaaaactgagatgccgttgcctggtctgctgccccaagctcaacccctgtcctctccctctttccccatatgccccctccaggctgagactgatgtgataacaccaaggcagggaccttctgaaccattcctgcatcttggggctccctgactctccctctctgctccttctctcttccacaggtcagccctgacaaaggtcagctagccccttgaggacatcagctttggcctcagggtcctaatggcagcagaaccactgacagagctagaggagtccattgagaccgtggtcaccaccttcttcacctttgcaaggcaggagggccggaaggatagcctcagcgtcaacgagttcaaagagctggttacccagcagttgccccatctgctcaaggatgtgggctctcttgatgagaagatgaagagcttggatgtgaatcaggactcggagctcaagttcaatgagtactggagattgattggggagctggccaaggaaatcaggaagaagaaagacctgaagatcaggaagaagtaaagccgcctggctgagatggggtgggcagggcagagctgatcagggccgagcagaaccgcactcttcccaaataaagcttcctccttgaaacacaaaaaaaaaaaaaaaaaaaaaaaaaaaaaaaaaaaaaaaaaaaaaaaaaaaaaggggggggggggaaaaaaaatccccggggggggccccaatttggtataacccatttttttggtaaagaggggggcccaataagaggggcggggtattaaaaaaccgaaggacacgaggggacgggtaaacaaagcgcggggggggaaaattggtatgtggggaacttggggaaggaagaccccatgttggggggcgaatagtggggaacaccctgaggagatttagagcccgaggagatatacactttcacgttgagtgtgaaccacgcgaatacctcgtgaaaaattgcgacggattttagagattag

SEQ ID NO: 285305 - DNA, 894 bp, Homo sapiens
tcggttcccggatctgactccgcggctcctgcatcttggggctccctgactctccctctctgctccttctctcttccacaggtcagccctgacaaaggtcagctagccccttgaggacatcagctttggcctcagggtcctaatggcagcagaaccactgacagagctagaggagtccattgagaccgtggtcaccaccttcttcacctttgcaaggcaggagggccggaaggatagcctcagcgtcaacgagttcaaagagctggttacccagcagttgccccatctgctcaaggatgtgggctctcttgatgagaagatgaagagcttggatgtgaatcaggactcggagctcaagttcaatgagtactggagattgattggggagctggccaaggaaatcaggaagaagaaagacctgaagatcaggaagaagtaaagccgcctggctgagatggggtgggcagggcagagctgatcagggccgagcagaaccgcactcttcccaaataaagcttcctccttgaaacacaaaaaaaaaaaaaaaaaaaaaaaaaaaaaaaaaaaaaaaaaaaaaaaaaaaaaggggggggggggaaaaaaaatccccggggggggccccaatttggtataacccatttttttggtaaagaggggggcccaataagaggggcggggtattaaaaaaccgaaggacacgaggggacgggtaaacaaagcgcggggggggaaaattggtatgtggggaacttggggaaggaagaccccatgttggggggcgaatagtggggaacaccctgaggagatttagagcccgaggagatatacactttcacgttgagtgtgaaccacgcgaatacctcgtgaaaaattgcgacggattttagagattag

SEQ ID NO: 285306 - DNA, 1833 bp, Homo sapiens
gaggaaacagacgccagtgctcctcccggggctgccaccacggctccggcaggcgggccggggaccggccgaacctgagttgacggtggaggggctcggcggccgccagctcctgctcggtgtccaaaacaaaatggccgccacgtccagtgcttgtctgaccggctaaaatggcgtctacgcaattacgtcaggcgtcagatccgcgcacgactagagggcgggaaagatttgagctacgcctgcgcagagttgagaagctgatgtctcctcgacttccaactggaaccttgaacccccacatttctggaccttgagcattcctcaagtaggaagatgtaatgcaccttgacctctttctaaataagacacttccccaaataaggggagttgagagtgaacagtcttcacgtctccacccacttccagatcccagaggagacagacatcggatggctgttacctcctcctaaaatgtctgcatttacccagataatcttccaatggaaatccatggttcaagtgccacctcttcaggaaagccatctgacttcaatcagaatcgaccacggaaatttgacacctccgggcttggaagcagctctctcctccttccccgctgcttataaacctcagccctgaggctccagctcactctaccccatctccttgccgggtgagtctcatggctgaccctggagggaggctggagatcattttttcttcctgggctcccaggtccctcccccagagccagctcagacaggaattcaggaaggagctttggatgatcgagcaacagcgcgtgcaggagtgtgtgacggggtggacagaaaagagaatgcctcttccagccccacccgccgcaccccagggggttgtgagtgcctgtactaaacccgtcctggagcagggagtcagagacgccccgttccaggacccttgtcaccgggagacaggagcggggaggatctgtggggtcctgggttcagcactctgccctgctgccgctgaggagaggtcagccctgacaaaggtcagctagccccttgaggacatcagctttggcctcagggtcctaatggcagcagaaccactgacagagctagaggagtccattgagaccgtggtcaccaccttcttcacctttgcaaggcaggagggccggaaggatagcctcagcgtcaacgagttcaaagagctggttacccagcagttgccccatctgctcaaggatgtgggctctcttgatgagaagatgaagagcttggatgtgaatcaggactcggagctcaagttcaatgagtactggagattgattggggagctggccaaggaaatcaggaagaagaaagacctgaagatcaggaagaagtaaagccgcctggctgagatggggtgggcagggcagagctgatcagggccgagcagaaccgcactcttcccaaataaagcttcctccttgaaacacaaaaaaaaaaaaaaaaaaaaaaaaaaaaaaaaaaaaaaaaaaaaaaaaaaaaaggggggggggggaaaaaaaatccccggggggggccccaatttggtataacccatttttttggtaaagaggggggcccaataagaggggcggggtattaaaaaaccgaaggacacgaggggacgggtaaacaaagcgcggggggggaaaattggtatgtggggaacttggggaaggaagaccccatgttggggggcgaatagtggggaacaccctgaggagatttagagcccgaggagatatacactttcacgttgagtgtgaaccacgcgaatacctcgtgaaaaattgcgacggattttagagattag

SEQ ID NO: 285307 - DNA, 2021 bp, Homo sapiens
gaggaaacagacgccagtgctcctcccggggctgccaccacggctccggcaggcgggccggggaccggccgaacctgagttgacggtggaggggctcggcggccgccagctcctgctcggtgtccaaaacaaaatggccgccacgtccagtgcttgtctgaccggctaaaatggcgtctacgcaattacgtcaggcgtcagatccgcgcacgactagagggcgggaaagatttgagctacgcctgcgcagagttgagaagctgatgtctcctcgacttccaactggaaccttgaacccccacatttctggaccttgagcattcctcaagtaggaagatgtaatgcaccttgacctctttctaaataagacacttccccaaataaggggagttgagagtgaacagtcttcacgtctccacccacttccagatcccagaggagacagacatcggatggctgttacctcctcctaaaatgtctgcatttacccagataatcttccaatggaaatccatggttcaagtgccacctcttcaggaaagccatctgacttcaatcagaatcgaccacggaaatttgacacctccgggcttggaagcagctctctcctccttccccgctgcttataaacctcagccctgaggctccagctcactctaccccatctccttgccgggtgagtctcatggctgaccctggagggaggctggagatcattttttcttcctgggctcccaggtccctcccccagagccagctcagacaggaattcaggaaggagctttggatgatcgagcaacagcgcgtgcaggagtgtgtgacggggtggacagaaaagagaatgcctcttccagccccacccgccgcaccccagggggttgtgagtgcctgtactaaacccgtcctggagcagggagtcagagacgccccgttccaggacccttgtcaccgggagacaggagcggggaggatctgtggggtcctgggttcagcactctgccctgctgccgctgaggagaggtaagggtggagcggggcagagaaaatgggtctgttcagacggagccagctctgaccacaggggacatttgccagaccctgtgcttctctgctgggaggagcggttagagtgtgtgtgggcggatgcgagtggccggagaccagggcccaacataaacaagctttggagacaaacaaccttatgacctgtcagccctgacaaaggtcagctagccccttgaggacatcagctttggcctcagggtcctaatggcagcagaaccactgacagagctagaggagtccattgagaccgtggtcaccaccttcttcacctttgcaaggcaggagggccggaaggatagcctcagcgtcaacgagttcaaagagctggttacccagcagttgccccatctgctcaaggatgtgggctctcttgatgagaagatgaagagcttggatgtgaatcaggactcggagctcaagttcaatgagtactggagattgattggggagctggccaaggaaatcaggaagaagaaagacctgaagatcaggaagaagtaaagccgcctggctgagatggggtgggcagggcagagctgatcagggccgagcagaaccgcactcttcccaaataaagcttcctccttgaaacacaaaaaaaaaaaaaaaaaaaaaaaaaaaaaaaaaaaaaaaaaaaaaaaaaaaaaggggggggggggaaaaaaaatccccggggggggccccaatttggtataacccatttttttggtaaagaggggggcccaataagaggggcggggtattaaaaaaccgaaggacacgaggggacgggtaaacaaagcgcggggggggaaaattggtatgtggggaacttggggaaggaagaccccatgttggggggcgaatagtggggaacaccctgaggagatttagagcccgaggagatatacactttcacgttgagtgtgaaccacgcgaatacctcgtgaaaaattgcgacggattttagagattag

SEQ ID NO: 285308 - DNA, 2105 bp, Homo sapiens
gaggaaacagacgccagtgctcctcccggggctgccaccacggctccggcaggcgggccggggaccggccgaacctgagttgacggtggaggggctcggcggccgccagctcctgctcggtgtccaaaacaaaatggccgccacgtccagtgcttgtctgaccggctaaaatggcgtctacgcaattacgtcaggcgtcagatccgcgcacgactagagggcgggaaagatttgagctacgcctgcgcagagttgagaagctgatgtctcctcgacttccaactggaaccttgaacccccacatttctggaccttgagcattcctcaagtaggaagatgtaatgcaccttgacctctttctaaataagacacttccccaaataaggggagttgagagtgaacagtcttcacgtctccacccacttccagatcccagaggagacagacatcggatggctgataatcttccaatggaaatccatggttcaagtgccacctcttcaggaaagccatctgacttcaatcaggcagcagtggatggtgcaggggaaagaggtgggaaggaggtcctgggagggacactggatgtcttaccccaagctgggccttgcagtacctgtggctggctgtgctggttgagcccgaatcgaccacggaaatttgacacctccgggcttggaagcagctctctcctccttccccgctgcttataaacctcagccctgaggctccagctcactctaccccatctccttgccgggtgagtctcatggctgaccctggagggaggctggagatcattttttcttcctgggctcccaggtccctcccccagagccagctcagacaggaattcaggaaggagctttggatgatcgagcaacagcgcgtgcaggagtgtgtgacggggtggacagaaaagagaatgcctcttccagccccacccgccgcaccccagggggttgtgagtgcctgtactaaacccgtcctggagcagggagtcagagacgccccgttccaggacccttgtcaccgggagacaggagcggggaggatctgtggggtcctgggttcagcactctgccctgctgccgctgaggagaggtaagggtggagcggggcagagaaaatgggtctgttcagacggagccagctctgaccacaggggacatttgccagaccctgtgcttctctgctgggaggagcggttagagtgtgtgtgggcggatgcgagtggccggagaccagggcccaacataaacaagctttggagacaaacaaccttatgacctgtcagccctgacaaaggtcagctagccccttgaggacatcagctttggcctcagggtcctaatggcagcagaaccactgacagagctagaggagtccattgagaccgtggtcaccaccttcttcacctttgcaaggcaggagggccggaaggatagcctcagcgtcaacgagttcaaagagctggttacccagcagttgccccatctgctcaaggatgtgggctctcttgatgagaagatgaagagcttggatgtgaatcaggactcggagctcaagttcaatgagtactggagattgattggggagctggccaaggaaatcaggaagaagaaagacctgaagatcaggaagaagtaaagccgcctggctgagatggggtgggcagggcagagctgatcagggccgagcagaaccgcactcttcccaaataaagcttcctccttgaaacacaaaaaaaaaaaaaaaaaaaaaaaaaaaaaaaaaaaaaaaaaaaaaaaaaaaaaggggggggggggaaaaaaaatccccggggggggccccaatttggtataacccatttttttggtaaagaggggggcccaataagaggggcggggtattaaaaaaccgaaggacacgaggggacgggtaaacaaagcgcggggggggaaaattggtatgtggggaacttggggaaggaagaccccatgttggggggcgaatagtggggaacaccctgaggagatttagagcccgaggagatatacactttcacgttgagtgtgaaccacgcgaatacctcgtgaaaaattgcgacggattttagagattag

SEQ ID NO: 285309 - DNA, 1490 bp, Homo sapiens
gaggaaacagacgccagtgctcctcccggggctgccaccacggctccggcaggcgggccggggaccggccgaacctgagttgacggtggaggggctcggcggccgccagctcctgctcggtgtccaaaacaaaatggccgccacgtccagtgcttgtctgaccggctaaaatggcgtctacgcaattacgtcaggcgtcagatccgcgcacgactagagggcgggaaagatttgagctacgcctgcgcagagttgagaagctgatgtctcctcgacttccaactggaaccttgaacccccacatttctggaccttgagcattcctcaagtaggaagatgtaatgcaccttgacctctttctaaataagacacttccccaaataaggggagttgagagtgaacagtcttcacgtctccacccacttccagatcccagaggagacagacatcggatggctgttacctcctcctaaaatgtctgcatttacccagataatcttccaatggaaatccatggttcaagtgccacctcttcaggaaagccatctgacttcaatcaggcagcagtggatggtgcaggggaaagaggtgggaaggaggtcctgggagggacactggatgtcttaccccaagctgggccttgcagtacctgtggctggctgtgctggttgagcccggtcagccctgacaaaggtcagctagccccttgaggacatcagctttggcctcagggtcctaatggcagcagaaccactgacagagctagaggagtccattgagaccgtggtcaccaccttcttcacctttgcaaggcaggagggccggaaggatagcctcagcgtcaacgagttcaaagagctggttacccagcagttgccccatctgctcaaggatgtgggctctcttgatgagaagatgaagagcttggatgtgaatcaggactcggagctcaagttcaatgagtactggagattgattggggagctggccaaggaaatcaggaagaagaaagacctgaagatcaggaagaagtaaagccgcctggctgagatggggtgggcagggcagagctgatcagggccgagcagaaccgcactcttcccaaataaagcttcctccttgaaacacaaaaaaaaaaaaaaaaaaaaaaaaaaaaaaaaaaaaaaaaaaaaaaaaaaaaaggggggggggggaaaaaaaatccccggggggggccccaatttggtataacccatttttttggtaaagaggggggcccaataagaggggcggggtattaaaaaaccgaaggacacgaggggacgggtaaacaaagcgcggggggggaaaattggtatgtggggaacttggggaaggaagaccccatgttggggggcgaatagtggggaacaccctgaggagatttagagcccgaggagatatacactttcacgttgagtgtgaaccacgcgaatacctcgtgaaaaattgcgacggattttagagattag

SEQ ID NO: 285310 - DNA, 1272 bp, Homo sapiens
gaggaaacagacgccagtgctcctcccggggctgccaccacggctccggcaggcgggccggggaccggccgaacctgagttgacggtggaggggctcggcggccgccagctcctgctcggtgtccaaaacaaaatggccgccacgtccagtgcttgtctgaccggctaaaatggcgtctacgcaattacgtcaggcgtcagatccgcgcacgactagagggcgggaaagatttgagctacgcctgcgcagagttgagaagctgatgtctcctcgacttccaactggaaccttgaacccccacatttctggaccttgagcattcctcaagtaggaagatgtaatgcaccttgacctctttctaaataagacacttccccaaataaggggagttgagagtgaacagtcttcacgtctccacccacttccagatcccagaggagacagacatcggatggctggtcagccctgacaaaggtcagctagccccttgaggacatcagctttggcctcagggtcctaatggcagcagaaccactgacagagctagaggagtccattgagaccgtggtcaccaccttcttcacctttgcaaggcaggagggccggaaggatagcctcagcgtcaacgagttcaaagagctggttacccagcagttgccccatctgctcaaggatgtgggctctcttgatgagaagatgaagagcttggatgtgaatcaggactcggagctcaagttcaatgagtactggagattgattggggagctggccaaggaaatcaggaagaagaaagacctgaagatcaggaagaagtaaagccgcctggctgagatggggtgggcagggcagagctgatcagggccgagcagaaccgcactcttcccaaataaagcttcctccttgaaacacaaaaaaaaaaaaaaaaaaaaaaaaaaaaaaaaaaaaaaaaaaaaaaaaaaaaaggggggggggggaaaaaaaatccccggggggggccccaatttggtataacccatttttttggtaaagaggggggcccaataagaggggcggggtattaaaaaaccgaaggacacgaggggacgggtaaacaaagcgcggggggggaaaattggtatgtggggaacttggggaaggaagaccccatgttggggggcgaatagtggggaacaccctgaggagatttagagcccgaggagatatacactttcacgttgagtgtgaaccacgcgaatacctcgtgaaaaattgcgacggattttagagattag

SEQ ID NO: 285311 - DNA, 843 bp, Homo sapiens
agaggatcccagcgtcagcactcctggcgggtcagccctgacaaaggtcagctagccccttgaggacatcagctttggcctcagggtcctaatggcagcagaaccactgacagagctagaggagtccattgagaccgtggtcaccaccttcttcacctttgcaaggcaggagggccggaaggatagcctcagcgtcaacgagttcaaagagctggttacccagcagttgccccatctgctcaaggatgtgggctctcttgatgagaagatgaagagcttggatgtgaatcaggactcggagctcaagttcaatgagtactggagattgattggggagctggccaaggaaatcaggaagaagaaagacctgaagatcaggaagaagtaaagccgcctggctgagatggggtgggcagggcagagctgatcagggccgagcagaaccgcactcttcccaaataaagcttcctccttgaaacacaaaaaaaaaaaaaaaaaaaaaaaaaaaaaaaaaaaaaaaaaaaaaaaaaaaaaggggggggggggaaaaaaaatccccggggggggccccaatttggtataacccatttttttggtaaagaggggggcccaataagaggggcggggtattaaaaaaccgaaggacacgaggggacgggtaaacaaagcgcggggggggaaaattggtatgtggggaacttggggaaggaagaccccatgttggggggcgaatagtggggaacaccctgaggagatttagagcccgaggagatatacactttcacgttgagtgtgaaccacgcgaatacctcgtgaaaaattgcgacggattttagagattag

SEQ ID NO: 285312 - DNA, 884 bp, Homo sapiens
gcggccgcctactactactaaattcgcggccgcgtcgacctccagctcactctaccccatctccttgccgggtcagccctgacaaaggtcagctagccccttgaggacatcagctttggcctcagggtcctaatggcagcagaaccactgacagagctagaggagtccattgagaccgtggtcaccaccttcttcacctttgcaaggcaggagggccggaaggatagcctcagcgtcaacgagttcaaagagctggttacccagcagttgccccatctgctcaaggatgtgggctctcttgatgagaagatgaagagcttggatgtgaatcaggactcggagctcaagttcaatgagtactggagattgattggggagctggccaaggaaatcaggaagaagaaagacctgaagatcaggaagaagtaaagccgcctggctgagatggggtgggcagggcagagctgatcagggccgagcagaaccgcactcttcccaaataaagcttcctccttgaaacacaaaaaaaaaaaaaaaaaaaaaaaaaaaaaaaaaaaaaaaaaaaaaaaaaaaaaggggggggggggaaaaaaaatccccggggggggccccaatttggtataacccatttttttggtaaagaggggggcccaataagaggggcggggtattaaaaaaccgaaggacacgaggggacgggtaaacaaagcgcggggggggaaaattggtatgtggggaacttggggaaggaagaccccatgttggggggcgaatagtggggaacaccctgaggagatttagagcccgaggagatatacactttcacgttgagtgtgaaccacgcgaatacctcgtgaaaaattgcgacggattttagagattag

SEQ ID NO: 285313 - DNA, 1348 bp, Homo sapiens
gaggaaacagacgccagtgctcctcccggggctgccaccacggctccggcaggcgggccggggaccggccgaacctgagttgacggtggaggggctcggcggccgccagctcctgctcggtgtccaaaacaaaatggccgccacgtccagtgcttgtctgaccggctaaaatggcgtctacgcaattacgtcaggcgtcagatccgcgcacgactagagggcgggaaagatttgagctacgcctgcgcagagttgagaagctgatgtctcctcgacttccaactggaaccttgaacccccacatttctggaccttgagcattcctcaagtaggaagatgtaatgcaccttgacctctttctaaataagacacttccccaaataaggggagttgagagtgaacagtcttcacgtctccacccacttccagatcccagaggagacagacatcggatggctgttacctcctcctaaaatgtctgcatttacccagataatcttccaatggaaatccatggttcaagtgccacctcttcaggaaagccatctgacttcaatcagaatcgaccacggaaatttgacacctccgggcttggaagcagctctctcctccttccccgctgcttataaacctcagccctgaggctccagctcactctaccccatctccttgccgggtcagccctgacaaaggtcagctagccccttgaggacatcagctttggcctcagggtcctaatggcagcagaaccactgacagagctagaggagtccattgagaccgtggtcaccaccttcttcacctttgcaaggcaggagggccggaaggatagcctcagcgtcaacgagttcaaagagctggttacccagcagttgccccatctgctcaaggatgtgggctctcttgatgagaagatgaagagcttggatgtgaatcaggactcggagctcaagttcaatgagtactggagattgattggggagctggccaaggaaatcaggaagaagaaagacctgaagatcaggaagaagtaaagccgcctggctgagatggggtgggcagggcagagctgatcagggccgagcagaaccgcactcttcccaaataaagcttcctccccaaaaaaaaaaacacacacacaacaaaaacctgggtgggccgcagcgcccgaagaagagtccttaaacccaccggtggggccgggggcccaaaggtattgaccactggccagcgcggcccccagggaaacccggcaggaagggcgggtcccccccataaaagcccgggggacacggcgcttcggaccaccaaagggccgggccacggccacacgggccaagggcgaaaa

SEQ ID NO: 285314 - DNA, 1152 bp, Homo sapiens
gaggaaacagacgccagtgctcctcccggggctgccaccacggctccggcaggcgggccggggaccggccgaacctgagttgacggtggaggggctcggcggccgccagctcctgctcggtgtccaaaacaaaatggccgccacgtccagtgcttgtctgaccggctaaaatggcgtctacgcaattacgtcaggcgtcagatccgcgcacgactagagggcgggaaagatttgagctacgcctgcgcagagttgagaagctgatgtctcctcgacttccaactggaaccttgaacccccacatttctggaccttgagcattcctcaagtaggaagatgtaatgcaccttgacctctttctaaataagacacttccccaaataaggggagttgagagtgaacagtcttcacgtctccacccacttccagatcccagaggagacagacatcggatggctgttacctcctcctaaaatgtctgcatttacccagataatcttccaatggaaatccatggttcaagtgccacctcttcaggaaagccatctgacttcaatcagaatcgaccacggaaatttgacacctccgggcttggaagcagctctctcctccttccccgctgcttataaacctcagccctgaggctccagctcactctaccccatctccttgccgggtcagccctgacaaaggtcagctagccccttgaggacatcagctttggcctcagggtcctaatggcagcagaaccactgacagagctagaggagtccattgagaccgtggtcaccaccttcttcacctttgcaaggcaggagggccggaaggatagcctcagcgtcaacgagttcaaagagctggttacccagcagttgccccatctgctcaaggatgtgggctctcttgatgagaagatgaagagcttggatgtgaatcaggactcggagctcaagttcaatgagtactggagattgattggggagctggccaaggaaatcaggaagaagaaagacctgaagatcaggaagaagtaaagccgcctggctgagatggggtgggcagggcagagctgatcagggccgagcagaaccgcactcttcccaaataaagcttcctccttggaaaaaaaagagacacaaccgaggcaaaacc

SEQ ID NO: 285315 - DNA, 1154 bp, Homo sapiens
gaggaaacagacgccagtgctcctcccggggctgccaccacggctccggcaggcgggccggggaccggccgaacctgagttgacggtggaggggctcggcggccgccagctcctgctcggtgtccaaaacaaaatggccgccacgtccagtgcttgtctgaccggctaaaatggcgtctacgcaattacgtcaggcgtcagatccgcgcacgactagagggcgggaaagatttgagctacgcctgcgcagagttgagaagctgatgtctcctcgacttccaactggaaccttgaacccccacatttctggaccttgagcattcctcaagtaggaagatgtaatgcaccttgacctctttctaaataagacacttccccaaataaggggagttgagagtgaacagtcttcacgtctccacccacttccagatcccagaggagacagacatcggatggctgttacctcctcctaaaatgtctgcatttacccagataatcttccaatggaaatccatggttcaagtgccacctcttcaggaaagccatctgacttcaatcagaatcgaccacggaaatttgacacctccgggcttggaagcagctctctcctccttccccgctgcttataaacctcagccctgaggctccagctcactctaccccatctccttgccgggtcagccctgacaaaggtcagctagccccttgaggacatcagctttggcctcagggtcctaatggcagcagaaccactgacagagctagaggagtccattgagaccgtggtcaccaccttcttcacctttgcaaggcaggagggccggaaggatagcctcagcgtcaacgagttcaaagagctggttacccagcagttgccccatctgctcaaggatgtgggctctcttgatgagaagatgaagagcttggatgtgaatcaggactcggagctcaagttcaatgagtactggagattgattggggagctggccaaggaaatcaggaagaagaaagacctgaagatcaggaagaagtaaagccgcctggctgagatggggtgggcagggccagaaagactcctacgtgggcgacgaggcccagagcaagcgtggcatcctgaccctgaagtaccccattgagcatggcatcgtcaccaa

SEQ ID NO: 285316 - DNA, 1496 bp, Homo sapiens
gaggaaacagacgccagtgctcctcccggggctgccaccacggctccggcaggcgggccggggaccggccgaacctgagttgacggtggaggggctcggcggccgccagctcctgctcggtgtccaaaacaaaatggccgccacgtccagtgcttgtctgaccggctaaaatggcgtctacgcaattacgtcaggcgtcagatccgcgcacgactagagggcgggaaagatttgagctacgcctgcgcagagttgagaagctgatgtctcctcgacttccaactggaaccttgaacccccacatttctggaccttgagcattcctcaagtaggaagatgtaatgcaccttgacctctttctaaataagacacttccccaaataaggggagttgagagtgaacagtcttcacgtctccacccacttccagatcccagaggagacagacatcggatggctgttacctcctcctaaaatgtctgcatttacccagataatcttccaatggaaatccatggttcaagtgccacctcttcaggaaagccatctgacttcaatcagaatcgaccacggaaatttgacacctccgggcttggaagcagctctctcctccttccccgctgcttataaacctcagccctgaggctccagctcactctaccccatctccttgccgggtgagtctcatggctgaccctggagggaggctggagatcattttttcttcctgggctcccaggtccctcccccagagccagctcagacaggaattcaggaaggagctttggatgatcgagcaacagcgcgtgcaggagtgtgtgacggggtggacagaaaagagaatgcctcttccagccccacccgccgcaccccagggggttgtgagtgcctgtactaaacccgtcctggagcagggagtcagagacgccccgttccaggacccttgtcaccgggagacaggagcggggaggatctgtggggtcctgggttcagcactctgccctgctgccgctgaggagaggtcagccctgacaaaggtcagctagccccttgaggacatcagctttggcctcagggtcctaatggcagcagaaccactgacagagctagaggagtccattgagaccgtggtcaccaccttcttcacctttgcaaggcaggagggccggaaggatagcctcagcgtcaacgagttcaaagagctggttacccagcagttgccccatctgctcaaggatgtgggctctcttgatgagaagatgaagagcttggatgtgaatcaggactcggagctcaagttcaatgagtactggagattgattggggagctggccaaggaaatcaggaagaagaaagacctgaagatcaggaagaagtaaagccgcctggctgagatggggtgggcagggcagagctgatcagggccgagcagaaccgcactcttcccaaataaagcttcctccttggaaaaaaaagagacacaaccgaggcaaaacc

SEQ ID NO: 285317 - DNA, 1838 bp, Homo sapiens
gaggaaacagacgccagtgctcctcccggggctgccaccacggctccggcaggcgggccggggaccggccgaacctgagttgacggtggaggggctcggcggccgccagctcctgctcggtgtccaaaacaaaatggccgccacgtccagtgcttgtctgaccggctaaaatggcgtctacgcaattacgtcaggcgtcagatccgcgcacgactagagggcgggaaagatttgagctacgcctgcgcagagttgagaagctgatgtctcctcgacttccaactggaaccttgaacccccacatttctggaccttgagcattcctcaagtaggaagatgtaatgcaccttgacctctttctaaataagacacttccccaaataaggggagttgagagtgaacagtcttcacgtctccacccacttccagatcccagaggagacagacatcggatggctgttacctcctcctaaaatgtctgcatttacccagataatcttccaatggaaatccatggttcaagtgccacctcttcaggaaagccatctgacttcaatcagaatcgaccacggaaatttgacacctccgggcttggaagcagctctctcctccttccccgctgcttataaacctcagccctgaggctccagctcactctaccccatctccttgccgggtgagtctcatggctgaccctggagggaggctggagatcattttttcttcctgggctcccaggtccctcccccagagccagctcagacaggaattcaggaaggagctttggatgatcgagcaacagcgcgtgcaggagtgtgtgacggggtggacagaaaagagaatgcctcttccagccccacccgccgcaccccagggggttgtgagtgcctgtactaaacccgtcctggagcagggagtcagagacgccccgttccaggacccttgtcaccgggagacaggagcggggaggatctgtggggtcctgggttcagcactctgccctgctgccgctgaggagaggtaagggtggagcggggcagagaaaatgggtctgttcagacggagccagctctgaccacaggggacatttgccagaccctgtgcttctctgctgggaggagcggttagagtgtgtgtgggcggatgcgagtggccggagaccagggcccaacataaacaagctttggagacaaacaaccttatgacctgtcagccctgacaaaggtcagctagccccttgaggacatcagctttggcctcagggtcctaatggcagcagaaccactgacagagctagaggagtccattgagaccgtggtcaccaccttcttcacctttgcaaggcaggagggccggaaggatagcctcagcgtcaacgagttcaaagagctggttacccagcagttgccccatctgctcaaggatgtgggctctcttgatgagaagatgaagagcttggatgtgaatcaggactcggagctcaagttcaatgagtactggagattgattggggagctggccaaggaaatcaggaagaagaaagacctgaagatcaggaagaagtaaagccgcctggctgagatggggtgggcagggcagagctgatcagggccgagcagaaccgcactcttcccaaataaagcttcctccttgacaaacaaacacacccaacataccaacaacaacacaacacggcgacacatatgtggggcgcggaacaacatgagactcaatccgccacggcattcaggtacgctccaggcccactccccgcgacaaccgggaattctgccgcgccatcatagaaggcgcaataaccagaacccgggaccggctca

SEQ ID NO: 285318 - DNA, 1265 bp, Homo sapiens
ggattcttgagacagacacgccacagaggggccaccagacttgaaggactccaagaaggaccttcaactgaagacctcctctcaagtagaggggtctccagatcgagggatcaccacagaggggtccctaagccacagacatttaaaaaggatcccggattgtgagacctacagaagagggggtttctggagctgaatctcctgcccccaccaaaactgagatgccgttgcctggtctgctgccccaagctcaacccctgtcctctccctctttccccatatgccccctccaggctgagactgatgtgataacaccaaggcagggaccttctgaaccattcctgcatcttggggctccctgactctccctctctgctccttctctcttccacaggtcagccctgacaaaggtcagctagccccttgaggacatcagctttggcctcagggtcctaatggcagcagaaccactgacagagctagaggagtccattgagaccgtggtcaccaccttcttcacctttgcaaggcaggagggccggaaggatagcctcagcgtcaacgagttcaaagagctggttacccagcagttgccccatctgctcaaggatgtgggctctcttgatgagaagatgaagagcttggatgtgaatcaggactcggagctcaagttcaatgagtactggagattgattggggagctggccaaggaaatcaggaagaagaaagacctgaagatcaggaagaagtaaagccgcctggctgagatggggtgggcagggcagagctgatcagggccgagcagaaccgcactcttcccaaataaagcttcctccttgaaaaaaaaaaaaaaaccaacaacacaaaaaaacaaaaacaacacaacaacaaagaaacaacaaccaaaacacaccacaaaccacacaccacacccaaccccacccggctattaataaaaacacagaggaggggggggggtgatccaaataatatctaacgagggggggggaccaacccaacgaccagcacacccccagtatggttgtggcacagcaagcggcccccaacgatggacagagcattacatcgaacgacggcgaccgccgatctctaacaacagaccgcgcagcaagcacacagccagctccccacgcctctacgaacacaacaccctctgtgggtgacacacaacgcaacagccccccacacaatcaagccgcgcgcgcaacaaacaccgcgtgctgtcgacaccacaccgcgcgggg

SEQ ID NO: 285319 - DNA, 1172 bp, Homo sapiens
  misc_feature (1127)..(1127): n is a, c, g, or t
  misc_feature (1150)..(1150): n is a, c, g, or t
  misc_feature (1153)..(1154): n is a, c, g, or t
  misc_feature (1160)..(1160): n is a, c, g, or t
gaggaaacagacgccagtgctcctcccggggctgccaccacggctccggcaggcgggccggggaccggccgaacctgagttgacggtggaggggctcggcggccgccagctcctgctcggtgtccaaaacaaaatggccgccacgtccagtgcttgtctgaccggctaaaatggcgtctacgcaattacgtcaggcgtcagatccgcgcacgactagagggcgggaaagatttgagctacgcctgcgcagagttgagaagctgatgtctcctcgacttccaactggaaccttgaacccccacatttctggaccttgagcattcctcaagtaggaagatgtaatgcaccttgacctctttctaaataagacacttccccaaataaggggagttgagagtgaacagtcttcacgtctccacccacttccagatcccagaggagacagacatcggatggctgttacctcctcctaaaatgtctgcatttacccagataatcttccaatggaaatccatggttcaagtgccacctcttcaggaaagccatctgacttcaatcaggcagcagtggatggtgcaggggaaagaggtgggaaggaggtcctgggagggacactggatgtcttaccccaagctgggccttgcagtacctgtggctggctgtgctggttgagcccggtcagccctgacaaaggtcagctagccccttgaggacatcagctttggcctcagggtcctaatggcagcagaaccactgacagagctagaggagtccattgagaccgtggtcaccaccttcttcacctttgcaaggcaggagggccggaaggatagcctcagcgtcaacgagttcaaagagctggttacccagcagttgccccatctgctcaaggatgtgggctctcttgatgagaagatgaagagcttggatgtgaatcaggactcggagctcaagttcaatgagtactggagattgattggggagctggccaaggaaatcaggaagaagaaagacctgaagatcaggaagaagtaaagccgcctggctgagatggggtgggcagggcagagctgatcagggccgagcagaaccgcactcttcccaaataaagcttcctcctgagaaanaaaaaaaacaaaaaaaaaaaaanatnngggggngcgccggggccc

SEQ ID NO: 285320 - DNA, 977 bp, Homo sapiens
  misc_feature (950)..(951): n is a, c, g, or t
  misc_feature (966)..(966): n is a, c, g, or t
gaggaaacagacgccagtgctcctcccggggctgccaccacggctccggcaggcgggccggggaccggccgaacctgagttgacggtggaggggctcggcggccgccagctcctgctcggtgtccaaaacaaaatggccgccacgtccagtgcttgtctgaccggctaaaatggcgtctacgcaattacgtcaggcgtcagatccgcgcacgactagagggcgggaaagatttgagctacgcctgcgcagagttgagaagctgatgtctcctcgacttccaactggaaccttgaacccccacatttctggaccttgagcattcctcaagtaggaagatgtaatgcaccttgacctctttctaaataagacacttccccaaataaggggagttgagagtgaacagtcttcacgtctccacccacttccagatcccagaggagacagacatcggatggctgttacctcctcctaaaatgtctgcatttacccagataatcttccaatggaaatccatggttcaagtgccacctcttcaggaaagccatctgacttcaatcagaatcgaccacggaaatttgacacctccgggcttggaagcagctctctcctccttccccgctgcttataaacctcagccctgaggctccagctcactctaccccatctccttgccgggtcagccctgacaaaggtcagctagccccttgaggacatcagctttggcctcagggtcctaatggcagcagaaccactgacagagctagaggagtccattgagaccgtggtcaccaccttcttcacctttgcaaggcaggagggccggaaggatagcctcagcgtcaacgagttcaaagagctggttacccagcagttgccccatctgctcaaggatgtgggctctcttgatgagaagatgaagagcttggatgtgaatcaggtccagatgcannagttcaatgaactgnagcatctggac

SEQ ID NO: 285321 - DNA, 1135 bp, Homo sapiens
gaggaaacagacgccagtgctcctcccggggctgccaccacggctccggcaggcgggccggggaccggccgaacctgagttgacggtggaggggctcggcggccgccagctcctgctcggtgtccaaaacaaaatggccgccacgtccagtgcttgtctgaccggctaaaatggcgtctacgcaattacgtcaggcgtcagatccgcgcacgactagagggcgggaaagatttgagctacgcctgcgcagagttgagaagctgatgtctcctcgacttccaactggaaccttgaacccccacatttctggaccttgagcattcctcaagtaggaagatgtaatgcaccttgacctctttctaaataagacacttccccaaataaggggagttgagagtgaacagtcttcacgtctccacccacttccagatcccagaggagacagacatcggatggctgttacctcctcctaaaatgtctgcatttacccagataatcttccaatggaaatccatggttcaagtgccacctcttcaggaaagccatctgacttcaatcagaatcgaccacggaaatttgacacctccgggcttggaagcagctctctcctccttccccgctgcttataaacctcagccctgaggctccagctcactctaccccatctccttgccgggtcagccctgacaaaggtcagctagccccttgaggacatcagctttggcctcagggtcctaatggcagcagaaccactgacagagctagaggagtccattgagaccgtggtcaccaccttcttcacctttgcaaggcaggagggccggaaggatagcctcagcgtcaacgagttcaaagagctggttacccagcagttgccccatctgctcaaggatgtgggctctcttgatgagaagatgaagagcttggatgtgaatcaggactcgtagctcaagcataatcgcgaactgtagactcgatcgtcgagctcatgcaccacttactgatactgatacatctatcctttatttccctgccttagctctcatccaagaacaaatataactataccacaactccctatccatacaccctctctacgcctgcaacacactatctactatcactccacctcccc

SEQ ID NO: 285322 - DNA, 444 bp, Homo sapiens
gaggaaacagacgccagtgctcctcccggggctgccaccacggctccggcaggcgggccggggaccggccgaacctgagttgacggtggaggggctcggcggccgccagctcctgctcggtgtccaaaacaaaatggccgccacgtccagtgcttgtctgaccggctaaaatggcgtctacgcaattacgtcaggcgtcagatccgcgcacgactagagggcgggaaagatttgagctacgcctgcgcagagttgagaagctgatgtctcctcgacttccaactggaaccttgaacccccacatttctggaccttgagcattcctcaagtaggaagatatcccagaggagacagacatcggatggctggtgagagagaagcctttaatgaaagatgagttgcaggcttggaccgctactcttgcgcccttggtgggggtggggg

SEQ ID NO: 285323 - DNA, 466 bp, Homo sapiens
gcatcatgtgagtaggggtgcacagagcaaggacagaaacagcagtttacagaggaggaaacccaaaaggccaacatgcattatcaagaaagtaatcagagaaatgcaaatcaaaacaaagctgtcacttccacccactagagcagcagattaaacagctgggaggtgccaagtgttggcaaggctatggggaaataggagcccttgtgccctgctgatggaagtgtggactagcgcagcatcctggagagtagtcagtgccacttgcaaatcccacttctgcatgtgtaactcacagaaatcctcacgtatccaggtccataagggcacatggaccagactgttcatagcagcctcattaatgatgttaggaagctgcaggcaacgtaggtgtccatcactcggagactggacatgcacaccacggagtattatgcagtagccagaagcaacagattagatacac

SEQ ID NO: 285324 - DNA, 326 bp, Homo sapiens
agattatcaacagttctaatggtaaccatatattttggcccatggcgattctggaatgtatgtatttcgtgtgaagatcctggatccaaactatagtttctgtaacctaacagctatgtttgcaatagagacatttggactgattcccaggtgaatattaaggtatatacccacccaagtacccaccaaccgaagaaggagtcaagtgagttagccaggagaaagagcaaaggaggaggatctcactcacctgccccgctctcacctgccagcagctagagtccagcagccagggcatatgagcacagcatacaggatagtctggt

SEQ ID NO: 285325 - DNA, 718 bp, Homo sapiens
cccggctaattttttgcatttttagtagagacggggtttcaccatgttagccaggatggtctcgatctcccgacttcaggtgatctgcccgcctcggcctcccaaagtgccgggattacaggcatgagccaccacgcctggctcttgagacaaattctaatcccacaagctttagaatggtctctccttactttttaaaacatacacaccctatgattatgagtgatctagctccttcaggtcctcttctccaatttttacccccaagaaactccttaaacctctctggttaggccctagctcaataggatggaacgtttcccccactctgaatggtttctttctggaacttccatctgtaggtccagtggatttgtgcttcctcgcctccaagaatgaactcgctcactgctatccaagctccaagcccaatgggctgcggtgaattctcacactgatctctgtcaacttctcatccagtgggatctctcccccaccatctcccataatggtttcttcctaaggtgagttcgtgcttaggtgagctctcctaaggtgagtttgggcttccctctaagtgcagtggatctacatctcccagcattctatgggggggccccttgcttaataaccccaaaacaccgggtgtggtggctcacacctgtaatcccagcactttgggaggccgaggcgggcgaaccacgaggtcaggagttcc

SEQ ID NO: 285326 - DNA, 346 bp, Homo sapiens
cacggtgcaaggcatcgtccgtcactggaccactcccagccaaccttcacctcgttccatcagcgagttgagaagggatgcgttggagaagaagaacaagtagccaaaagtctgtcaacttctcatccagtgggatctctcccccaccatctcccataatggtttcttcctaaggctggtctcgaacttttggcctcaagcaattcttccaccttgacctcccaaagtgctgggattatgagagtcagccgcacgcctggcggggatcttctttctacaatggaatctccttaatgaagacagtgctttcctccaactttgaataaagtgaactattccctatttc

SEQ ID NO: 285327 - DNA, 1117 bp, Homo sapiens
ttggaagttttctcggtcgtgataatctccagcagctgcatcttgtccacgggagagaagtagtgcatgccaatcacctggcaaggggaaccaaaagccaacagatcggagaatgcggggtttttctctgttccgagtttaccttctcaggtcttttgctgacagcagcgatttcactgattgggagagcagatgtgttactggcaaagatacagtgatctggaatcacctgcaggggaaaagcatttaacaatgtgtcagatggttggatgagaaacgtggaagggacacctgtcaaatgtgtgcaaatctggaacaggcagaatcctaacagagatgagaatcaaggaggaagacacattcaacacactgaaaagctgagtacaaaataagattataatgcaataaaagtaaagtactgccttaagatttaaaaaaaaaaggaaagaaaagaactgtataggtacttgaaggacaagacctggcttggcagtatttgtgataaagatcccatgattttagttaatcaagagtggagggtgggcatggtggctaaacaactataatcccaacacttcaggaggccaaggatggaggattacttgaggccaggagttcaagaccaacctcggcatcatagtgagaccctatatctacaaaacataactttttttttttttttggagacaaagtcttgctttttcgcccaggctagagtgcagtggtgcaatctcagctcaccgcaagctttgccgcctgggttcaagcaattctcctgcctcagcctcccgagtagctgggattacaggcacctgccaccatgcctggctaatttttttgtagtttttagtaaagacagggtttcatcatcttggccaggctggtcttgaactcctgacctcgtgatccacccgcctcagcatcccaaagtgctgggattacaggtgtgagccacagtgcccggccctacaaaaaataactttaaaaaactagccaggcataccactatagttgcagctacagtacacaaatactattaactattagctttatccacctggagaatagtctctaatgcagattgtctccgcattctggccacgatcccaacttattc

SEQ ID NO: 285328 - DNA, 657 bp, Homo sapiens
gcctttacccaaaagggggaacccctttcccaaaaaaaaaaaaaaaaaaaaaaagagtgcacaggcaagggctcctcccatgaagaggaccggacagatggagaccattcttcttgtgccccaagactggggctcctatgccttacctgctttctaaggcactcctgctggattttggtggcaaatctgggtagtcatttttcattccgcaggactcctccttactcacagttgagccaaggacagccaagtgacctgtgacataacattgttcgcaaaatgagctggaacagaaaacagtgtcttgatcctaccacttgtttctcttctcctccccaggacatcatgacctccagtgtgcattcaacctaacagagctgctaaactcattgcctttctgctctgcctctcctctctcctgcaacaccctctctgtctcataaatatagtcacaattttctcatggtttaagccaagaaacagttaaaaactctaaagtcttttatccaatgcattaaaaaactgagatactaaattagataagttgttatccggtagaactcacgaaagaatcaaatgttctcgacaaaatttagaacaaaatttgaccctggaaaatggaggtgatagaaataaagtccacaaaaggaaacttgc

SEQ ID NO: 285329 - DNA, 476 bp, Homo sapiens
gagggctctgggtgtcctccgattcagttctgacactctctacctaaagaccgcgtcagatcccagaggttgagggctcagtctcacaagactgccccccgacttccgccgccaaccgcaagcccctggttgttttacctgtgcttctgaccaagcaggacatcatgacctccagtgtgcattcaacctaacagagctgctaaactcattgcctttctgctctgcctctcctctctcctgcaacaccctctctgtctcataaatatagtcacaattttctcatggtttaagccaagaaacagttaaaaactctaaagtcttttatccaatgcattaaaaaactgagatactaaattagataagttgttatccggtagaactcacgaaagaatcaaatgttctcgacaaaatttagaacaaaatttgaccctggaaaatggaggtgatagaaataaagtccacaaaaggaaacttgc

SEQ ID NO: 285330 - DNA, 2843 bp, Homo sapiens
  misc_feature (3)..(3): n is a, c, g, or t
  misc_feature (5)..(5): n is a, c, g, or t
  misc_feature (151)..(151): n is a, c, g, or t
  misc_feature (192)..(192): n is a, c, g, or t
  misc_feature (690)..(690): n is a, c, g, or t
ggnancacaggttggccaggtgcccgtcacaccagccccaagtgccccaggggtcgtgcagacctgtccaggtgtgctgctgaccagcagggctggccgctcatggagacgcatcaccagcccgctcccagcatcctgctccatgaaggcngaccgctccatggctgggtcctcaggttctgagctgaaggnggagaaaaaaaccctgtgagaggccacagagcaggcccaggacccagaacgggcatctcctgccatggcaaggcctgcaggctcccaacggttggggtgcccagccgcatcagcagcaccaggccacccctgccaatcgaggcatgggcttgctttctctaatattgtttctgggtgctaaggttacaacagcaaacaagactgactcattccttttctccacgggacttactgtcttatcatcccctggactcaagatgagggtgctaggatgccctcccacaccaccccagcttacccaggggcacacctcagggtatgtggacctgcacaaaggtcccttccttagccccatgagacaccccaggggacacacaggtccacagatcctgccacaggcctgggaacccattggcaggagagtaagacagtgcaggggtccacaaacatttcttaaggggccagagagtaaatacttcaggctttgcaggccagacnttctctgttgcaaaacgcaattctgctattgtagctcaaaggcggctatagacaactcagaagttaatgagtgtgttgtgtcccaatgaaacttgatttacaaaagcaggagactggcctgtagccttagtttgccaacccctggatgagtgggttcccaggtctgcagtgagaaggggagaggccagggcagtggcgagcaggagagaaggcagctgaggatgggaggcctaccaggccctgaacagagagtgcgtgctgcccaccttcatgaggagccggtgctgcaggtccagaggtgcctctttaaagaaagatgccagcttgtcgtagacggtcacagccctgcaatgaaatcatggcaggactattgcattagtccagcgtggaggctactttctgctcaaaccactcatttgggtcccgtgcccaacgtcacccatcctcagcaaaaccaccattatttccttctgcctggtttccagaaagttcccctaaagccctgaggaatcaccgaatgaaaggggctttttacaaacaggaaacttaagtggagtgccaatacacaacatggattgcagcaggctcggtctaagataaaaccagacggtggacaacaggccaggtaagacccacatggtctgcactccctggttctgttattgtgtggaggaatgtcttagtctgttgctcctgtgggtgtagctaaagcacaaaccaggagtcctcatccttagaaagcagttagacagacatctgagaaccaatcccaaactgcagccttccacagaaccttctggaaccttctggaatgcaacttattactgccagagggtctttgatgagagtctactctccaccatttgtcttcagagagaatacccacctattctctttccgtggaaaggtaagttattggagtttatgcagtctggtatattaattgagagctttacttcaaagaatgtcacgtttatggttcagtctcacagactgggttaaaaaggcagtgttgactattaagttgtaaattactatgatgatcattattattgaagcaagctgtgagaaatgagcattatcttacaatatctgcattttagtgaacctgaaggaagagtgtattgctggaattacagaagcctgagaaccacaggggaattctcactgcagggtattcagggtcaaaagctgattctattttgcatgctcaatccttcgtcaatttatttttatttctttctttattttttgagacagggtcttactctgtcgcccaggctggaaggccttggtgcaatctcagctcactgcaacctcgcctcccgggttcaagtgattctcctgcctcagcctcccacgtgactgggattacaggtttttgcttgtctgatgactgatggctccacccagacctgccaaccactcccgcggccccatccagaagtggctcagcgtgcatgaggaccatctccaacatccctgtgattgtacccccaaccaaccagcagcaagaacctattgcctagtcacctcccctctctttccccaactatcattgaaaaagtctggcttccaaattttccgggagactgatttgggtaataataaaactccagtcttctgttcagccagctctgcatgaattaagctctttctctattgcaattttcctgtcttgataaattgtctctacctgggcagggggcaaaatgaacccatagggtggttacagtaccttgctgggtcacttgatattcctggagggtcacgggaagcgctatgtgaatcccacttctgatattgtaagattctctccagggcctgaaagcttaaggggttgagcaactcctcccttctcaggcccagccccagggcgcaaggccgcttgcatcagcagcgtgcgtgagcagatgcgccagcaagatagcaaaagcaggaagagagccagccggaagacaagtacctctgaagatggagaaagaggccatctgggtacaacgttgcagttacgtcagaccaggacacttcctgtttacaggagactataaaacctttgccccatcctcacttggggctgacgccgttttaggcctcagcccgccagcacccaggctctcattaaaacagcatgttgctccacaatgtcgtgt

SEQ ID NO: 285331 - DNA, 943 bp, Homo sapiens
tatagctgtccagggcactagctgtatacgtagtcacgacgtaatatggcatgactattgcattagtccagcgtggaggctactttctgctcaaaccactcatttgggtcccgtgcccaacgtcacccatcctcagcaaaaccaccattatttccttctgcctggtttccagaaagttcccctaaagccctgaggaatcaccgaatgaaaggggctttttacaaacaggaaacttaagtggagtgccaatacacaacatggattgcagcaggctcggtctaagataaaaccagacggtggacaacaggccagaaccttctggaaccttctggaatgcaacttattactgccagagggtctttgatgagagtctactctccaccatttgtcttcagagagaatacccacctattctctttccgtggaaaggtttttgcttgtctgatgactgatggctccacccagacctgccaaccactcccgcggccccatccagaagtggctcagcgtgcatgaggaccatctccaacatccctgtgattgtacccccaaccaaccagcagcaagaacctattgcctagtcacctcccctctctttccccaactatcattgaaaaagtctggcttccaaattttccgggagactgatttgggcccagccccagggcgcaaggccgcttgcatcagcagcgtgcgtgagcagatgcgccagcaagatagcaaaagcaggaagagagccagccggaagacaagtacctctgaagatggagaaagaggccatctgggtacaacgttgcagttacgtcagaccaggacacttcctgtttacaggagactataaaacctttgccccatcctcacttggggctgacgccgttttaggcctcagcccgccagcacccaggctctcattaaaacagcatgttgctccacaatgtcgtgt

SEQ ID NO: 285332 - DNA, 1578 bp, Homo sapiens
tatagctgtccagggcactagctgtatacgtagtcacgacgtaatatggcatgactattgcattagtccagcgtggaggctactttctgctcaaaccactcatttgggtcccgtgcccaacgtcacccatcctcagcaaaaccaccattatttccttctgcctggtttccagaaagttcccctaaagccctgaggaatcaccgaatgaaaggggctttttacaaacaggaaacttaagtggagtgccaatacacaacatggattgcagcaggctcggtctaagataaaaccagacggtggacaacaggccaggtaagacccacatggtctgcactccctggttctgttattgtgtggaggaatgtcttagtctgttgctcctgtgggtgtagctaaagcacaaaccaggagtcctcatccttagaaagcagttagacagacatctgagaaccaatcccaaactgcagccttccacagaaccttctggaaccttctggaatgcaacttattactgccagagggtctttgatgagagtctactctccaccatttgtcttcagagagaatacccacctattctctttccgtggaaaggtaagttattggagtttatgcagtctggtatattaattgagagctttacttcaaagaatgtcacgtttatggttcagtctcacagactgggttaaaaaggcagtgttgactattaagttgtaaattactatgatgatcattattattgaagcaagctgtgagaaatgagcattatcttacaatatctgcattttagtgaacctgaaggaagagtgtattgctggaattacagaagcctgagaaccacaggggaattctcactgcagggtattcagggtcaaaagctgattctattttgcatgctcaatccttcgtcaatttatttttatttctttctttattttttgagacagggtcttactctgtcgcccaggctggaaggccttggtgcaatctcagctcactgcaacctcgcctcccgggttcaagtgattctcctgcctcagcctcccacgtgactgggattacaggtttttgcttgtctgatgactgatggctccacccagacctgccaaccactcccgcggccccatccagaagtggctcagcgtgcatgaggaccatctccaacatccctgtgattgtacccccaaccaaccagcagcaagaacctattgcctagtcacctcccctctctttccccaactatcattgaaaaagtctggcttccaaattttccgggagactgatttgggcccagccccagggcgcaaggccgcttgcatcagcagcgtgcgtgagcagatgcgccagcaagatagcaaaagcaggaagagagccagccggaagacaagtacctctgaagatggagaaagaggccatctgggtacaacgttgcagttacgtcagaccaggacacttcctgtttacaggagactataaaacctttgccccatcctcacttggggctgacgccgttttaggcctcagcccgccagcacccaggctctcattaaaacagcatgttgctccacaatgtcgtgt

SEQ ID NO: 285333 - DNA, 1829 bp, Homo sapiens
  misc_feature (3)..(3): n is a, c, g, or t
  misc_feature (5)..(5): n is a, c, g, or t
  misc_feature (151)..(151): n is a, c, g, or t
  misc_feature (192)..(192): n is a, c, g, or t
  misc_feature (690)..(690): n is a, c, g, or t
ggnancacaggttggccaggtgcccgtcacaccagccccaagtgccccaggggtcgtgcagacctgtccaggtgtgctgctgaccagcagggctggccgctcatggagacgcatcaccagcccgctcccagcatcctgctccatgaaggcngaccgctccatggctgggtcctcaggttctgagctgaaggnggagaaaaaaaccctgtgagaggccacagagcaggcccaggacccagaacgggcatctcctgccatggcaaggcctgcaggctcccaacggttggggtgcccagccgcatcagcagcaccaggccacccctgccaatcgaggcatgggcttgctttctctaatattgtttctgggtgctaaggttacaacagcaaacaagactgactcattccttttctccacgggacttactgtcttatcatcccctggactcaagatgagggtgctaggatgccctcccacaccaccccagcttacccaggggcacacctcagggtatgtggacctgcacaaaggtcccttccttagccccatgagacaccccaggggacacacaggtccacagatcctgccacaggcctgggaacccattggcaggagagtaagacagtgcaggggtccacaaacatttcttaaggggccagagagtaaatacttcaggctttgcaggccagacnttctctgttgcaaaacgcaattctgctattgtagctcaaaggcggctatagacaactcagaagttaatgagtgtgttgtgtcccaatgaaacttgatttacaaaagcaggagactggcctgtagccttagtttgccaacccctggatgagtgggttcccaggtctgcagtgagaaggggagaggccagggcagtggcgagcaggagagaaggcagctgaggatgggaggcctaccaggccctgaacagagagtgcgtgctgcccaccttcatgaggagccggtgctgcaggtccagaggtgcctctttaaagaaagatgccagcttgtcgtagacggtcacagccctgcaatgaaatcatggcaggactattgcattagtccagcgtggaggctactttctgctcaaaccactcatttgggtcccgtgcccaacgtcacccatcctcagcaaaaccaccattatttccttctgcctggtttccagaaagttcccctaaagccctgaggaatcaccgaatgaaaggggctttttacaaacaggaaacttaagtggagtgccaatacacaacatggattgcagcaggctcggtctaagataaaaccagacggtggacaacaggccaggtttttgcttgtctgatgactgatggctccacccagacctgccaaccactcccgcggccccatccagaagtggctcagcgtgcatgaggaccatctccaacatccctgtgattgtacccccaaccaaccagcagcaagaacctattgcctagtcacctcccctctctttccccaactatcattgaaaaagtctggcttccaaattttccgggagactgatttgggcccagccccagggcgcaaggccgcttgcatcagcagcgtgcgtgagcagatgcgccagcaagatagcaaaagcaggaagagagccagccggaagacaagtacctctgaagatggagaaagaggccatctgggtacaacgttgcagttacgtcagaccaggacacttcctgtttacaggagactataaaacctttgccccatcctcacttggggctgacgccgttttaggcctcagcccgccagcacccaggctctcattaaaacagcatgttgctccacaatgtcgtgt

SEQ ID NO: 285334 - DNA, 921 bp, Homo sapiens
aaagacaaattcaacatcatatactttgtgacactccctccaggacgactaacgtcttcaatgactgcacctcttatttccataatcattatctttttgtactaactgcattatttttacttgaacaaaaaggttgtaattcccgcctcacggttccgagtcatgatacaactgatctcctgtttccctagcatgcaaccttccggaaaccgctttgtttccctatttgtcggacactgacttcagggaggcccggtcggcctctttggtgagcacggtgttgagctgatcactggtgcgcccttaataacgccggcgggactcaccccaatccgaaacccaccatcccgacgtgcttttgagtggcgttctgcccgttcttaacgcgcgagctactgcacgctattctcacagccgggatgggcttctttaaccacgtgaagtacttgtatgaactatgaaaataaaccctggattggcttttctgaggaagttcaagcacctaattaacccctggtggagaaaaagccacgcactctcacgcgattggagatcagagttggagcctgagggtgaaagcctcatgctgagaagagtggagcgggaagataaagcatggcaacattgatgacaccctaggcctaatacaccagccctgacctgcttaccttctctcatttgtaggctatgtagtccagtcacttttacgtgcagctgagtacaaccctaaatgatatatcaatcgcttcagtgaccatttatatgtcaatagcttgcacatttattatttgcaaccaaagtatctctggaggtactcatgtgcatatacagtattactggaaacttctacttggatatcctccaggcaactcgaatattttaacatggccaaagcacatcttgtcctccaacctactcccc

SEQ ID NO: 285335 - DNA, 423 bp, Homo sapiens
gtaatgacatgatcctttattgtcaatatgcttacagtccactagggggagccaaatatataaataagcttaagaattacgttgaaggggccagaatagaagtctgtggaaggtgtgggatgggatgacagcatcagaaagaattgggcaaatctgtcccaggactaggtcagaaaaacgcctccctagggaaggtgccaccccaaacacgtgtttctgagaccccttacccgaaataaggaggctgccaaggtgagcatggaacggttaggcgttttgtatggagcaaactggggggaccccagctgagacctctggcctgggccttgtgattcacgcataggctcatcttatcggccaccgggtctgagaagaaactaccaccctgcaagttaacagggatccctccgagaacgggcacct

SEQ ID NO: 285336 - DNA, 1050 bp, Homo sapiens
gtaatgacatgatcctttattgtcaatatgcttacagtccactagggggagccaaatatataaataagcttaagaattacgttgaaggggccagaatagaagtctgtggaaggtgtgggatgggatgacagcatcagaaagaattgggcaaatctgtcccaggactaggtcagaaaaacgcctccctagggaaggtgccaccccaaacacgtgtttctgagaccccttacccgaaataaggaggctgccaagcgatacttgaggttggaccagatgatgttttcttgagagaagcagaaaacgccaagtcggcctccacgcattgtggtgtctatggtgacgccagagtcagccaccaactcagagccttcataaaatcgtaccctgcggacaacacggccggaggggcctccatgaaatccaacccggggttccccatcctgcggtcacaaaagtcctggcatgtccttggggactatcctaggtcagaattgctcagggaaatgaaggctctgggatgcagaacggagaatgctttgcttctagagcaaggaaaaatacttgtattgagcatcatgaagttcgtgttactaacctcacaggcaatcgacagcctgggagatagtccctagggcttcagatcttgtgtggtgttcatcccaccatcttcaggcccacagtgtgtcatttttccacctctgctttgttaggtgctggagagatcaggcgcatggtgagtcgcttctgcctgggccagtgtcacacagagactacccttttctgcagttatccagaggtagcttcaaaggacggattctgggagacttaaaaatgaacagctctcagagttttgtgtttgatgatgtcacattggtagcttgaaatcagcaatgaggacaatgcggagttacatcatggaaactggaaaatgctaccaactagggctttctgtgatttgcttaccagcatataccactggaaatgggtcatcagttaggcttgcagaagcctcccctccccagaccagctccgtggctggagaatgcacag

SEQ ID NO: 285337 - DNA, 410 bp, Homo sapiens
agaaactgccagctaccggaaggaaaacatcgggtatagtcgatcagtgattcagaacagaagcagagtatcatcggcaacattttccaaattgctgaaaatcagcagattccatactattaacattgtactttaaatcagttcactctcacctacaatgaacacatctaactattaaacatccatcttcgtgccatttaaaattgcgtccaacagcaagagccacagtggcaaacagaaacattttacatgcttgtcagactggactctcttctaatgggcaagaaccgcacactacactgaagttttgaaagaccaaagtgccaatagtaaagagtagaacttaaattccttaagttcaaaagtgtctaaagaaaaactctgcggcccagaagatccaagttggcacc

SEQ ID NO: 285338 - DNA, 1539 bp, Homo sapiens
tgcggccgcggcctgcaggagcgcggcgaggcactggccgcctacctggacggccgtgagccagtcctgcgcttccggccgcgcgaggaggaggcgctgctgggcgagatcgtgcgcgccgcagccgccggctcgggagacctgccgcccctcgggcccgccacgctgctggcgctgtgcgtgcagcattccgcccgtgagctggagctgggccacctgccacgactgctgggccgcctggcccggctcatcaaggaggccgtctgggaaaagattaaggaaattggagaccgtcagccagaaaaccaccctgagggggtccccgaggtgcccctgactcctgaagctgtgtctgtggagctgcggccactcatgctgtggatggccaacaccacggagctgcttagctttgtgcaggagaaggtgctggaaatggagaaggaggctgaccaagaggacccacagctctgcaatgacttggaattatgtgatgaggccatggccctcctggatgaggtcatcatgtgtaccttccagcagtctgtctactacctcaccaagactctctattcaacgctgcctgctctcctggatagtaaccctttcacagctggtgcagagctgccggggcctggcgcggagctgggggccatgcctccaggattgagacctaccctgggcgtgttccaggcagccttggagctgaccagccagtgcgagctgcaccctgacctcgtgtctcagacttttggctacttgttcttcttctccaacgcatcccttctcaactcgctgatggaacgaggtcaaggccggcctttctatcaatggtcccgagctgttcaaatccgaaccaacctggacctcgtcttggactggctacagggagctgggctgggcgacattgccactgagttcttccggaaactctccatggctgtgaacctgctctgtgtgccccgcacttccctgctcaaggcttcatggagcagcctaagaaccgaccaccccaccttgacccccgcccagctgcaccatctgctcagccactatcagctgggccctggccgcgggccgccagccgcgtgggaccctccccctgcagagcgggaggctgtggacacaggggacatcttcgaaagcttctcctcgcacccgcccctcatcctccccctggggagctcgcgcctgcgcctcactggtccagtgacggacgatgccttgcaccgtgaactccgtaggctccgccgcctcctctgggatcttgagcagcaggagctgccagccaattatcgccatgggcctcccgtggccacgtctccttgagaaccaataccaaacgagcgcgcgaaccttgaaatgtcacgggcttctacggacaggagcccgcctgagcgcaaagctttctgggagttgtagttcttatcccgcgtggaatgttgggagattgagttttcgggaagtagcggatgggacggtgggagcatgggcttaggatgtgaatgccagggagcaataaaggtatccgtggtatcggca

SEQ ID NO: 285339 - DNA, 2362 bp, Homo sapiens
ggcagggccaaccctacccagatctcctcccccaggcctggtctcctcacaggacgccccctccccgctcttcctgccgggtttcctcttgccttttcctgtcccccacccagtgctgggagccgtggcagaggcaagagcagtggaactgacccaggccagtggagccagggcctccgggtgtgccggacccgaagcaggggccatgctgtctggtgaacggaaggagggcggaagcccccgcttcgggaagcttcatctccccgtgggcctgtggatcaattcccccaggaagcagctggcgaagctggggcggcgctggcccagcgcagcctctgtcaagtcttcttcgtcggacacggggagccgcagcagcgagccgctacctccgcccccgccgcacgtggagctgcggcgagtgggcgctgtcaaggcggccgggggagcctccggtagccgcgccaagcgcatctcccagctcttccggggctcggggaccgggaccacggggtccagcggcgcaggaggccctgggaccccggggggcgcgcagcgctgggccagcgagaagaagctgccggagctggcggcgggcgtggcccccgagcccccgctggctacccgcgccacggcgcctccgggggtcctcaagatcttcggcgccggactggcatcgggcgccaactacaagagcgtgctggccacggcgcgctccacggcgcgcgagctcgtggccgaggcgctagagcgctacggcctagcaggcagccccggcggtggccccggcgagagcagctgcgtggacgccttcgctttgtgcgacgctctgggccggcccgcggcggcgggcgtgggaagcggcgagtggcgggcggagcacctgcgcgtgctgggcgactccgagcgcccgctgctggtgcaggagctgtggcgggcgcggcccggctgggcgcggcgcttcgagttgcgcggccgcgaggaggcgcggcgcctggagcaggaggccttcggggccgcggacagcgaaggcaccggcgccccttcgtggcggccacagaagaaccgctcccgggcggcgtcgggtggggcagcgctggccagtcctggcccggggaccggatcaggggccccagctgggtctggaggcaaggagcgctcagaaaacttgtctttgcggcgcagcgtgtcggagcttagccttcaggggcggcggcggcggcagcaggagcggagacagcaggcacttagcatggccccaggggcagccgacgcccaaatcggaactgcagaccccggggacttcgatcagttgactcagtgcctcatccaggcccccagcaaccgcccctacttcctgctgctccagggctaccaggacgcccagactctctattcaacgctgcctgctctcctggatagtaaccctttcacagctggtgcagagctgccggggcctggcgcggagctgggggccatgcctccaggattgagacctaccctgggcgtgttccaggcagccttggagctgaccagccagtgcgagctgcaccctgacctcgtgtctcagacttttggctacttgttcttcttctccaacgcatcccttctcaactcgctgatggaacgaggtcaaggccggcctttctatcaatggtcccgagctgttcaaatccgaaccaacctggacctcgtcttggactggctacagggagctgggctgggcgacattgccactgagttcttccggaaactctccatggctgtgaacctgctctgtgtgccccgcacttccctgctcaaggcttcatggagcagcctaagaaccgaccaccccaccttgacccccgcccagctgcaccatctgctcagccactatcagctgggccctggccgcgggccgccagccgcgtgggaccctccccctgcagagcgggaggctgtggacacaggggacatcttcgaaagcttctcctcgcacccgcccctcatcctccccctggggagctcgcgcctgcgcctcactggtccagtgacggacgatgccttgcaccgtgaactccgtaggctccgccgcctcctctgggatcttgagcagcaggagctgccagccaattatcgccatgggcctcccgtggccacgtctccttgagaaccaataccaaacgagcgcgcgaaccttgaaatgtcacgggcttctacggacaggagcccgcctgagcgcaaagctttctgggagttgtagttcttatcccgcgtggaatgttgggagattgagttttcgggaagtagcggatgggacggtgggagcatgggcttaggatgtgaatgccagggagcaataaaggtatccgtggtatcggca

SEQ ID NO: 285340 - DNA, 2392 bp, Homo sapiens
ggcagggccaaccctacccagatctcctcccccaggcctggtctcctcacaggacgccccctccccgctcttcctgccgggtttcctcttgccttttcctgtcccccacccagtgctgggagccgtggcagaggcaagagcagtggaactgacccaggccagtggagccagggcctccgggtgtgccggacccgaagcaggggccatgctgtctggtgaacggaaggagggcggaagcccccgcttcgggaagcttcatctccccgtgggcctgtggatcaattcccccaggaagcagctggcgaagctggggcggcgctggcccagcgcagcctctgtcaagtcttcttcgtcggacacggggagccgcagcagcgagccgctacctccgcccccgccgcacgtggagctgcggcgagtgggcgctgtcaaggcggccgggggagcctccggtagccgcgccaagcgcatctcccagctcttccggggctcggggaccgggaccacggggtccagcggcgcaggaggccctgggaccccggggggcgcgcagcgctgggccagcgagaagaagctgccggagctggcggcgggcgtggcccccgagcccccgctggctacccgcgccacggcgcctccgggggtcctcaagatcttcggcgccggactggcatcgggcgccaactacaagagcgtgctggccacggcgcgctccacggcgcgcgagctcgtggccgaggcgctagagcgctacggcctagcaggcagccccggcggtggccccggcgagagcagctgcgtggacgccttcgctttgtgcgacgctctgggccggcccgcggcggcgggcgtgggaagcggcgagtggcgggcggagcacctgcgcgtgctgggcgactccgagcgcccgctgctggtgcaggagctgtggcgggcgcggcccggctgggcgcggcgcttcgagttgcgcggccgcgaggaggcgcggcgcctggagcaggaggccttcggggccgcggacagcgaaggcaccggcgccccttcgtggcggccacagaagaaccgctcccgggcggcgtcgggtggggcagcgctggccagtcctggcccggggaccggatcaggggccccagctgggtctggaggcaaggagcgctcagaaaacttgtctttgcggcgcagcgtgtcggagcttagccttcaggggcggcggcggcggcagcaggagcggagacagcaggcacttagcatggccccaggggcagccgacgcccaaatcggaactgcagaccccggggacttcgatcagttgactcagtgcctcatccaggcccccagcaaccgcccctacttcctgctgctccagggctaccaggacgcccagactctctattcaacgctgcctgctctcctggatagtaaccctttcacagctggtgcagagctgccggggcctggcgcggagctgggggccatgcctccaggattgagacctaccctgggcgtgttccaggcagccttggagctgaccagccagtgcgagctgcaccctgacctcgtgtctcagacttttggctacttgttcttcttctccaacgcatcccttctcaactcgctgatggaacgaggtcaaggccggcctttctatcaatggtcccgagctgttcaaatccgaaccaacctggacctcgtcttggactggctacagggagctgggctgggcgacattgccactgagttcttccggaaactctccatggctgtgaacctgctctgtgtgccccgcacttccctgctcaaggcttcatggagcagcctaagaaccgaccaccccaccttgacccccgcccagctgcaccatctgctcagccactatcagctgggccctggccgcgggccgccagccgcgtgggaccctccccctgcagagcgggaggctgtggacacagactctaaccgcgccgccttcggcctcacaggggacatcttcgaaagcttctcctcgcacccgcccctcatcctccccctggggagctcgcgcctgcgcctcactggtccagtgacggacgatgccttgcaccgtgaactccgtaggctccgccgcctcctctgggatcttgagcagcaggagctgccagccaattatcgccatgggcctcccgtggccacgtctccttgagaaccaataccaaacgagcgcgcgaaccttgaaatgtcacgggcttctacggacaggagcccgcctgagcgcaaagctttctgggagttgtagttcttatcccgcgtggaatgttgggagattgagttttcgggaagtagcggatgggacggtgggagcatgggcttaggatgtgaatgccagggagcaataaaggtatccgtggtatcggca

SEQ ID NO: 285341 - DNA, 2214 bp, Homo sapiens
ggcagggccaaccctacccagatctcctcccccaggcctggtctcctcacaggacgccccctccccgctcttcctgccgggtttcctcttgccttttcctgtcccccacccagtgctgggagccgtggcagaggcaagagcagtggaactgacccaggccagtggagccagggcctccgggtgtgccggacccgaagcaggggccatgctgtctggtgaacggaaggagggcggaagcccccgcttcgggaagcttcatctccccgtgggcctgtggatcaattcccccaggaagcagctggcgaagctggggcggcgctggcccagcgcagcctctgtcaagtcttcttcgtcggacacggggagccgcagcagcgagccgctacctccgcccccgccgcacgtggagctgcggcgagtgggcgctgtcaaggcggccgggggagcctccggtagccgcgccaagcgcatctcccagctcttccggggctcggggaccgggaccacggggtccagcggcgcaggaggccctgggaccccggggggcgcgcagcgctgggccagcgagaagaagctgccggagctggcggcgggcgtggcccccgagcccccgctggctacccgcgccacggcgcctccgggggtcctcaagatcttcggcgccggactggcatcgggcgccaactacaagagcgtgctggccacggcgcgctccacggcgcgcgagctcgtggccgaggcgctagagcgctacggcctagcaggcagccccggcggtggccccggcgagagcagctgcgtggacgccttcgctttgtgcgacgctctgggccggcccgcggcggcgggcgtgggaagcggcgagtggcgggcggagcacctgcgcgtgctgggcgactccgagcgcccgctgctggtgcaggagctgtggcgggcgcggcccggctgggcgcggcgcttcgagttgcgcggccgcgaggaggcgcggcgcctggagcaggaggccttcggggccgcggacagcgaaggcaccggcgccccttcgtggcggccacagaagaaccgctcccgggcggcgtcgggtggggcagcgctggccagtcctggcccggggaccggatcaggggccccagctgggtctggaggcaaggagcgctcagaaaacttgtctttgcggcgcagcgtgtcggagcttagccttcaggggcggcggcggcggcagcaggagcggagacagcaggcacttagcatggccccaggggcagccgacgcccaaatcggaactgcagaccccggggacttcgatcagttgactcagtgcctcatccaggcccccagcaaccgcccctacttcctgctgctccagggctaccaggacgcccagactctctattcaacgctgcctgctctcctggatagtaaccctttcacagctggtgcagagctgccggggcctggcgcggagctgggggccatgcctccaggattgagacctaccctgggcgtgttccaggcagccttggagctgaccagccagtgcgagctgcaccctgacctcgtgtctcagacttttggctacttgttcttcttctccaacgcatcccttctcaactcgctgatggaacgaggtcaaggccggcctttctatcaatggtcccgagctgttcaaatccgaaccaacctggacctcgtcttggactggctacagggagctgggctgggcgacattgccactgagttcttccggaaactctccatggctgtgaacctgctctgtgtgccccgcacttccctgctcaaggggacatcttcgaaagcttctcctcgcacccgcccctcatcctccccctggggagctcgcgcctgcgcctcactggtccagtgacggacgatgccttgcaccgtgaactccgtaggctccgccgcctcctctgggatcttgagcagcaggagctgccagccaattatcgccatgggcctcccgtggccacgtctccttgagaaccaataccaaacgagcgcgcgaaccttgaaatgtcacgggcttctacggacaggagcccgcctgagcgcaaagctttctgggagttgtagttcttatcccgcgtggaatgttgggagattgagttttcgggaagtagcggatgggacggtgggagcatgggcttaggatgtgaatgccagggagcaataaaggtatccgtggtatcggca

SEQ ID NO: 285342 - DNA, 2821 bp, Homo sapiens
ggcagggccaaccctacccagatctcctcccccaggcctggtctcctcacaggacgccccctccccgctcttcctgccgggtttcctcttgccttttcctgtcccccacccagtgctgggagccgtggcagaggcaagagcagtggaactgacccaggccagtggagccagggcctccgggtgtgccggacccgaagcaggggccatgctgtctggtgaacggaaggagggcggaagcccccgcttcgggaagcttcatctccccgtgggcctgtggatcaattcccccaggaagcagctggcgaagctggggcggcgctggcccagcgcagcctctgtcaagtcttcttcgtcggacacggggagccgcagcagcgagccgctacctccgcccccgccgcacgtggagctgcggcgagtgggcgctgtcaaggcggccgggggagcctccggtagccgcgccaagcgcatctcccagctcttccggggctcggggaccgggaccacggggtccagcggcgcaggaggccctgggaccccggggggcgcgcagcgctgggccagcgagaagaagctgccggagctggcggcgggcgtggcccccgagcccccgctggctacccgcgccacggcgcctccgggggtcctcaagatcttcggcgccggactggcatcgggcgccaactacaagagcgtgctggccacggcgcgctccacggcgcgcgagctcgtggccgaggcgctagagcgctacggcctagcaggcagccccggcggtggccccggcgagagcagctgcgtggacgccttcgctttgtgcgacgctctgggccggcccgcggcggcgggcgtgggaagcggcgagtggcgggcggagcacctgcgcgtgctgggcgactccgagcgcccgctgctggtgcaggagctgtggcgggcgcggcccggctgggcgcggcgcttcgagttgcgcggccgcgaggaggcgcggcgcctggagcaggaggccttcggggccgcggacagcgaaggcaccggcgccccttcgtggcggccacagaagaaccgctcccgggcggcgtcgggtggggcagcgctggccagtcctggcccggggaccggatcaggggccccagctgggtctggaggcaaggagcgctcagaaaacttgtctttgcggcgcagcgtgtcggagcttagccttcaggggcggcggcggcggcagcaggagcggagacagcaggcacttagcatggccccaggggcagccgacgcccaaatcggaactgcagaccccggggacttcgatcagttgactcagtgcctcatccaggcccccagcaaccgcccctacttcctgctgctccagggctaccaggacgcccagactctctattcaacgctgcctgctctcctggatagtaaccctttcacagctggtgcagagctgccggggcctggcgcggagctgggggccatgcctccaggattgagacctaccctgggcgtgttccaggcagccttggagctgaccagccagtgcgagctgcaccctgacctcgtgtctcagacttttggctacttgttcttcttctccaacgcatcccttctcaactcgctgatggaacgaggtcaaggccggcctttctatcaatggtcccgagctgttcaaatccgaaccaacctggacctcgtcttggactggctacagggagctgggctgggcgacattgccactgagttcttccggaaactctccatggctgtgaacctgctctgtgtgccccgcacttccctgctcaaggcttcatggagcagcctaagaaccgaccaccccaccttgacccccgcccagctgcaccatctgctcagccactatcagctgggccctggccgcgggccgccagccgcgtgggaccctccccctgcagagcgggaggctgtggacacaggggacatcttcgaaagcttctcctcgcacccgcccctcatcctccccctggggagctcgcgcctgcgcctcactggtccagtgacggacgatgccttgcaccgtgaactccgtaggctccgccgcctcctctgggatcttgagcagcaggagctgccagccaattatcgccatgggcctcccgtggccacgtctccttgagaaccaataccaaacgagcgcgcgaaccttgaaatgtcacgggcttctacggacaggagcccgcctgagcgcaaagctttctgggagttgtagttcttatcccgcgtggaatgttgggagattgagttttcgggaagtagcggatgggacggtgggagcatgggcttaggatgtgaatgccagggagcaataaaggtatccgtggtatcggcaaaaaaaaaaaaaaaaaaaaaaaaaaaaaaaaaaaaaaagacacaaaacagaaagggggggggaggcacaaaaagaactcccagcagggggggctcgcacattgaccagaccaaccagaatatgaggaaacagaggaggggccccaacagagagaagccatataaaaaaagagagggagatgacggagagataaaaaccccggagcagggaaacacgcggaccacacgagagaaacccttgggaaaagaaacaccccacaaaaagacgcggggggggacacacaagggggaaaaaacacccaaagaagagagtaaaacagcccacacagggagaaaaacaaccaatcaacgggtataacagcgtggcggcaacagacagcagaacatatacgacgccggagagaaaaagcagtcgacacggaggaaaatgacacaagacagacataattacaaccgcggc

SEQ ID NO: 285343 - DNA, 1024 bp, Homo sapiens
gggagttgtagtccaatcacttgtttccacttctctattttctcagactctctattcaacgctgcctgctctcctggatagtaaccctttcacagctggtgcagagctgccggggcctggcgcggagctgggggccatgcctccaggattgagacctaccctgggcgtgttccaggcagccttggagctgaccagccagtgcgagctgcaccctgacctcgtgtctcagacttttggctacttgttcttcttctccaacgcatcccttctcaactcgctgatggaacgaggtcaaggccggcctttctatcaatggtcccgagctgttcaaatccgaaccaacctggacctcgtcttggactggctacagggagctgggctgggcgacattgccactgagttcttccggaaactctccatggctgtgaacctgctctgtgtgccccgcacttccctgctcaaggcttcatggagcagcctaagaaccgaccaccccaccttgacccccgcccagctgcaccatctgctcagccactatcagctgggccctggccgcgggccgccagccgcgtgggaccctccccctgcagagcgggaggctgtggacacaggggacatcttcgaaagcttctcctcgcacccgcccctcatcctccccctggggagctcgcgcctgcgcctcactggtccagtgacggacgatgccttgcaccgtgaactccgtaggctccgccgcctcctctgggatcttgagcagcaggagctgccagccaattatcgccatgggcctcccgtggccacgtctccttgagaaccaataccaaacgagcgcgcgaaccttgaaatgtcacgggcttctacggacaggagcccgcctgagcgcaaagctttctgggagttgtagttcttatcccgcgtggaatgttgggagattgagttttcgggaagtagcggatgggacggtgggagcatgggcttaggatgtgaatgccagggagcaataaaggtatccgtggtatcggca

SEQ ID NO: 285344 - DNA, 1859 bp, Homo sapiens
ggcagggccaaccctacccagatctcctcccccaggcctggtctcctcacaggacgccccctccccgctcttcctgccgggtttcctcttgccttttcctgtcccccacccagtgctgggagccgtggcagaggcaagagcagtggaactgacccaggccagtggagccagggcctccgggtgtgccggacccgaagcaggggccatgctgtctggtgaacggaaggagggcggaagcccccgcttcgggaagcttcatctccccgtgggcctgtggatcaattcccccaggaagcagctggcgaagctggggcggcgctggcccagcgcagcctctgtcaagtcttcttcgtcggacacggggagccgcagcagcgagccgctacctccgcccccgccgcacgtggagctgcggcgagtgggcgctgtcaaggcggccgggggagcctccggtagccgcgccaagcgcatctcccagctcttccggggctcggggaccgggaccacggggtccagcggcgcaggaggccctgggaccccggggggcgcgcagcgctgggccagcgagaagaagctgccggagctggcggcgggcgtggcccccgagcccccgctggctacccgcgccacggcgcctccgggggtcctcaagatcttcggcgccggactggcatcgggcgccaactacaagagcgtgctggccacggcgcgctccacggcgcgcgagctcgtggccgaggcgctagagcgctacggcctagcaggcagccccggcggtggccccggcgagagcagctgcgtggacgccttcgctttgtgcgacgctctgggccggcccgcggcggcgggcgtgggaagcggcgagtggcgggcggagcacctgcgcgtgctgggcgactccgagcgcccgctgctggtgcaggagctgtggcgggcgcggcccggctgggcgcggcgcttcgagttgcgcggccgcgaggaggcgcggcgcctggagcaggaggccttcggggccgcggacagcgaaggcaccggcgccccttcgtggcggccacagaagaaccgctcccgggcggcgtcgggtggggcagcgctggccagtcctggcccggggaccggatcaggggccccagctgggtctggaggcaaggagcgctcagaaaacttgtctttgcggcgcagcgtgtcggagcttagccttcaggggcggcggcggcggcagcaggagcggagacagcaggcacttagcatggccccaggggcagccgacgcccaaatcggaactgcagaccccggggacttcgatcagttgactcagtgcctcatccaggcccccagcaaccgcccctacttcctgctgctccagggctaccaggacgcccagactctctattcaacgctgcctgctctcctggatagtaaccctttcacagctggtgcagagctgccggggcctggcgcggagctgggggccatgcctccaggattgagacctaccctgggcgtgttccaggcagccttggagctgaccagccagtgcgagctgcaccctgacctcgtgtctcagacttttggctacttgttcttcttctccaacgcatcccttctcaactcgctgatggaacgaggtcaaggccggcctttctatcaatggtcccgagctgttcaaatccgaaccaacctggacctcgtcttggactggctacagggagctgggctgggcgacattgccactgagttcttccggaaactctccatggctgtgaacctgctctgtgtgccccgcacttccctgctcaaggtgactcctggtcagctatacctgacccctgacctctgactcctcaacccccctcagc

SEQ ID NO: 285345 - DNA, 248 bp, Homo sapiens
caggcactggagatgagagaagggaatgagcccttttggagcttaaggagagacagaccttaactaatgacacaataaacttaataattacaattgaatcaggaacaatggacaagtaatgcaagacgctatgacaggtagataggggactgatgccagcttctccttggtggaaggtgggaagtgaccttccctggattaccagcactttaaaacccacacttctgcttctgccttacctggccact

SEQ ID NO: 285346 - DNA, 525 bp, Homo sapiens
gattacaggcgtgagccaccgcgcccggcccccaacgtttctttttaagcctgtcatatctcacattaaatgtgtaagtctctgaactgtagggctttgaacaaaggaaagttccatgagaatactatatgatgccaatttctactgttaggaacgcgataacagagtgcagtgggggagaaaataccgtcctcaagatctgagaaactggagaggaaaagtcacaggacaaccaacttctctatgacatagcccagcatctgaggaaagtcctgcaatagtggaggtggagcagagggtatgagctgggaagcaaatggagcaggagctggaggctgccccatccactccaagccagagaacaagcagaggctgccacaggagatcctgggcaagtaatcagccacagcatctagattagcatgaaggaaacactggccaaattaaaagatgaaacttccaaaaggtaaatctctgtgtattcatgcctaatcttccaaggttgtgtaaataatttttttctac

SEQ ID NO: 285347 - DNA, 1535 bp, Homo sapiens
aagagtctatacttctttaattattgcccttgtttttagtatttcagggttggtccacaggactcagggaaggagaaaaaagtataaaaatttcttttcttattacaagaattccaagatgtgtcagagttgaccagaagcatagagaaaactacatagtcgagtacccaccaggggaatgtggtagaattggcagtctgttggtctctttgtaatgtcagattaaagaaatcacctggaggctgacattggccccttcccttcccaggaggcagatctggcctaaatacggagatgcgtacaaagaagacctaggatcacaatcgttcttagccatcaaactcttcttccaggtcctagagaaagtggccactctataccaaagccaaagaactgcagagtactcctcttggttggggtttcatattgctcttgcaattcagtttcctctcatctttgctgtcatttcgtgggtaccaacagccttggccaggtgtgagaagtgtccattactattgtttgctctgactatcttgcgcaaagatgccaagtaaggctggagcaaaggccttggtgatactcttgccttggacagataaatggtggtagtgtagctagtccctcagttgcacctgtttgtattccaaaggcagtaaacacagatgttcagaagccctttataatcaagatgtcaaatatctgaaattattccccagctctgacaaaacttgccttctgggtgtggagacaaaacaagaatttgtgactactgctgatcacatctagaactgccttgaggctggccatgaagacttgaaaccacaattttcactgaggatctaaacctcagatcacatttgtttggggctactgtggggtaaggggatattaaggatgtaaaagggatgttgcaaatgctcatgagaccaggttttgtggcacgctagggccaccactaattctccatgatgacttctccacaggacttgcttaagcacaggcacaggacccaccaataatcagatgtgcactctacacagactgcacccaccgagaacaggtcacagtcctgtgacacaaacccatatacacaaccgagaggttggcattttggtccatgcttatttaacaaattcccttctgctgtgggcactaggacagggggctggcaatactcagatgagctgtcccacccccaagtccaaagcagcagctctcaggcctcctctgctgcctcatgccattccaaacatgatggctgggcttacacacctatcttactggaagcctccctctctgtgttccctttccaccactattccattacttccacaggagctggaggctgccccatccactccaagccagagaacaagcagaggctgccacaggagatcctgggcaagtaatcagccacagcatctagattagcatgaaggaaacactggccaaattaaaagatgaaacttccaaaaggtaaatctctgtgtattcatgcctaatcttccaaggttgtgtaaataatttttttctac

SEQ ID NO: 285348 - DNA, 1481 bp, Homo sapiens
aagagtctatacttctttaattattgcccttgtttttagtatttcagggttggtccacaggactcagggaaggagaaaaaagtataaaaatttcttttcttattacaagaattccaagatgtgtcagagttgaccagaagcatagagaaaactacatagtcgagtacccaccaggggaatgtggtagaattggcagtctgttggtctctttgtaatgtcagattaaagaaatcacctggaggctgacattggccccttcccttcccaggaggcagatctggcctaaatacggagatgcgtacaaagaagacctaggatcacaatcgttcttagccatcaaactcttcttccaggtcctagagaaagtggccactctataccaaagccaaagaactgcagagtactcctcttggttggggtttcatattgctcttgcaattcagtttcctctcatctttgctgtcatttcgtgggtaccaacagccttggccaggtgtgagaagtgtccattactattgtttgctctgactatcttgcgcaaagatgccaagtaaggctggagcaaaggccttggtgatactcttgccttggacagataaatggtggtagtgtagctagtccctcagttgcacctgtttgtattccaaaggcagtaaacacagatgttcagaagccctttataatcaagatgtcaaatatctgaaattattccccagctctgacaaaacttgccttctgggtgtggagacaaaacaagaatttgtgactactgctgcactgaggatctaaacctcagatcacatttgtttggggctactgtggggtaaggggatattaaggatgtaaaagggatgttgcaaatgctcatgagaccaggttttgtggcacgctagggccaccactaattctccatgatgacttctccacaggacttgcttaagcacaggcacaggacccaccaataatcagatgtgcactctacacagactgcacccaccgagaacaggtcacagtcctgtgacacaaacccatatacacaaccgagaggttggcattttggtccatgcttatttaacaaattcccttctgctgtgggcactaggacagggggctggcaatactcagatgagctgtcccacccccaagtccaaagcagcagctctcaggcctcctctgctgcctcatgccattccaaacatgatggctgggcttacacacctatcttactggaagcctccctctctgtgttccctttccaccactattccattacttccacaggagctggaggctgccccatccactccaagccagagaacaagcagaggctgccacaggagatcctgggcaagtaatcagccacagcatctagattagcatgaaggaaacactggccaaattaaaagatgaaacttccaaaaggtaaatctctgtgtattcatgcctaatcttccaaggttgtgtaaataatttttttctac

SEQ ID NO: 285349 - DNA, 1884 bp, Homo sapiens
ggttggccggggagagcgaagcgccgcccacgcggctgggaaagcttggggtggcgctggcgggaggtggggccgggggcgggttcctggcggagggtggggcagacgtgggttaccgggtgtgccaaccaaaccctgaacagaggaggtggcggtggtggccctcgcctgtggcccccgtgctgcttgcactcgaactcgtcgccatggaggagctccaggagcctctgagaggacagctccggctctgcttcacgcaagctgcccggactagcctcttactgctcaggctcaacgacgctgccctgcgggcgctgcaagagtgtcagcggcaacaggtacggccggtgattgctttccaaggccaccgagggtatctgagactcccaggccctggttggtcctgcctcttctccttcatagtgtcccagtgttgtcaggagggcgctggtggtagcttggaccttgtgtgccaacgcttcctcaggtctgggcctaacagcctccactgcctgggctcactcagggagcgcctcattatttgggcagccatggattctatcccagccccatcatcagttcagggacacaacctgactgaagatgccagacatcctgagagttggcagaacacaggaggctattctgaaggagatgcagtatcacagccacagatggcactagaggaggtgtcagtgtcagatccactggcaagcaaccaaggacagtcactcccaggatcctcaagggagcacatggcacagtgggaagtgagaagccagacccatgttccaaacagagaacctgttcaggcactgccttcctctgccagccggaaacgtctggacaagaaacgttcagtgcctgtagccactgtagaactggaagaaaagaggttcagaactctgcctttagtgccaagccccctacaaggcctgaccaatcaggatttacaagagggagaagattgggagcaagaagatgaggacatggaccccagattagaacacagttcctcagttcaagaagattctgaatccccaagtcctgaagatataccagactacctcctgcaatacagggccatccacagtgcagaacagcaacatgcctatgagcaggactttgagacagattatgctgaataccgcatcctgcatgcccgtgttgggactgcaagccaaaggttcatagagctgggagcagagattaaaagagttcggcgaggaactccagaatacaaggtcctggaagacaagataatccaggaatataaaaagttcaggaagcagtacccaagttacagagaagaaaagcgtcgctgtgagtaccttcaccagaaattgtcccacattaaaggtctcatcctggagtttgaggaaaagaacaggggcagctgaagttatcaagggaatttttgagcctctgcttagtgaaacacaaaggaacaaagcagctataaactaaatagaatgcaactatctgcttttcttatgctgaccactggagtccatggtggcaagtagagagctgctctaggttcttgaggtttggttttcattattaatttttagggtatgggcactgtgcaaagactccatagctgtgcctaggagtctaggaaaagtgacagaggcttggcttttttacctttagttcagccaagtcattttcaagtcctgagaaatgacatcatcttcaggataaaataatgaggacattagacaaaccaaactaagtgaattttagcctggtagcctctctaaggaaacagtaataataacttctgataagagttaaaagaacttgtagcatacctggatataatgggaaagggcctgggtgttacccatgtactgaaaatgaacttttaccaacatggct

SEQ ID NO: 285350 - DNA, 1988 bp, Homo sapiens
aaaccctcaaggggttgcaggttcagctttcacttagagacagcaactccaaattcagggtcgctggggaaactaaggcaggactggggactctgagtgagaggtcagacgctggtcgcggactctttctcccgagaactggggatagctcttccgatagcccaaagcgattcatgcggatcctagaagaaagcgccgagaggaggtggcggtggtggccctcgcctgtggcccccgtgctgcttgcactcgaactcgtcgccatggaggagctccaggagcctctgagaggacagctccggctctgcttcacgcaagctgcccggactagcctcttactgctcaggctcaacgacgctgccctgcgggcgctgcaagagtgtcagcggcaacaggtacggccggtgattgctttccaaggccaccgagggtatctgagactcccaggccctggttggtcctgcctcttctccttcatagtgtcccagtgttgtcaggagggcgctggtggtagcttggaccttgtgtgccaacgcttcctcaggtctgggcctaacagcctccactgcctgggctcactcagggagcgcctcattatttgggcagccatggattctatcccagccccatcatcagttcagggacacaacctgactgaagatgccagacatcctgagagttggcagaacacaggaggctattctgaaggagatgcagtatcacagccacagatggcactagaggaggtgtcagtgtcagatccactggcaagcaaccaaggacagtcactcccaggatcctcaagggagcacatggcacagtgggaagtgagaagccagacccatgttccaaacagagaacctgttcaggcactgccttcctctgccagccggaaacgtctggacaagaaacgttcagtgcctgtagccactgtagaactggaagaaaagaggttcagaactctgcctttagtgccaagccccctacaaggcctgaccaatcaggatttacaagagggagaagattgggagcaagaagatgaggacatggaccccagattagaacacagttcctcagttcaagaagattctgaatccccaagtcctgaagatataccagactacctcctgcaatacagggccatccacagtgcagaacagcaacatgcctatgagcaggactttgagacagattatgctgaataccgcatcctgcatgcccgtgttgggactgcaagccaaaggttcatagagctgggagcagagattaaaagagttcggcgaggaactccagaatacaaggtcctggaagacaagataatccaggaatataaaaagttcaggaagcagtacccaagttacagagaagaaaagcgtcgctgtgagtaccttcaccagaaattgtcccacattaaaggtctcatcctggagtttgaggaaaagaacaggggcagctgaagttatcaagggaatttttgagcctctgcttagtgaaacacaaaggaacaaagcagctataaactaaatagaatgcaactatctgcttttcttatgctgaccactggagtccatggtggcaagtagagagctgctctaggttcttgaggtttggttttcattattaatttttagggtatgggcactgtgcaaagactccatagctgtgcctaggagtctaggaaaagtgacagaggcttggcttttttacctttagttcagccaagtcattttcaagtcctgagaaatgacatcatcttcaggataaaataatgaggacattagacaaaccaaactaagtgaattttagcctggtagcctctctaaggaaacagtaataataacttctgataagagttaaaagaacttgtagcatacctggatataatgggaaagggcctgggtgttacccatgtactgaaaatgaacttttaccaacatggctaaaaaattaaaactgactgcttctgtgtcctttgtacaagtttatat

SEQ ID NO: 285351 - DNA, 694 bp, Homo sapiens
caaggtagaatgagaatttttactttttgacatggatgctttttctctgcagcagtacccaagttacagagaagaaaagcgtcgctgtgagtaccttcaccagaaattgtcccacattaaaggtctcatcctggagtttgaggaaaagaacaggggcagctgaagttatcaagggaatttttgagcctctgcttagtgaaacacaaaggaacaaagcagctataaactaaatagaatgcaactatctgcttttcttatgctgaccactggagtccatggtggcaagtagagagctgctctaggttcttgaggtttggttttcattattaatttttagggtatgggcactgtgcaaagactccatagctgtgcctaggagtctaggaaaagtgacagaggcttggcttttttacctttagttcagccaagtcattttcaagtcctgagaaatgacatcatcttcaggataaaataatgaggacattagacaaaccaaactaagtgaattttagcctggtagcctctctaaggaaacagtaataataacttctgataagagttaaaagaacttgtagcatacctggatataatgggaaagggcctgggtgttacccatgtactgaaaatgaacttttaccaacatggctaaaaaattaaaactgactgcttctgtgtcctttgtacaagtttatat

SEQ ID NO: 285352 - DNA, 2156 bp, Homo sapiens
ggttggccggggagagcgaagcgccgcccacgcggctgggaaagcttggggtggcgctggcgggaggtggggccgggggcgggttcctggcggagggtggggcagacgtgggttaccgggtgtgccaaccaaaccctgaacagaggaggtggcggtggtggccctcgcctgtggcccccgtgctgcttgcactcgaactcgtcgccatggaggagctccaggagcctctgagaggacagctccggctctgcttcacgcaagctgcccggactagcctcttactgctcaggctcaacgacgctgccctgcgggcgctgcaagagtgtcagcggcaacaggtacggccggcccccttcttctctagtcactgcccctagggaccttgggcctcagccggcgaccctggagaaggtgcaggggagagggagcggcttccgcaagctctggcctccccacctctccaagtgaagcccgctaggcaggtgatcccgggctccggacgccggatcctggggacactgcttcacctgcgctcaacggtcacatcttcgctctccccgcaggtacggccggtgattgctttccaaggccaccgagggtatctgagactcccaggccctggttggtcctgcctcttctccttcatagtgtcccagtgttgtcaggagggcgctggtggtagcttggaccttgtgtgccaacgcttcctcaggtctgggcctaacagcctccactgcctgggctcactcagggagcgcctcattatttgggcagccatggattctatcccagccccatcatcagttcagggacacaacctgactgaagatgccagacatcctgagagttggcagaacacaggaggctattctgaaggagatgcagtatcacagccacagatggcactagaggaggtgtcagtgtcagatccactggcaagcaaccaaggacagtcactcccaggatcctcaagggagcacatggcacagtgggaagtgagaagccagacccatgttccaaacagagaacctgttcaggcactgccttcctctgccagccggaaacgtctggacaagaaacgttcagtgcctgtagccactgtagaactggaagaaaagaggttcagaactctgcctttagtgccaagccccctacaaggcctgaccaatcaggatttacaagagggagaagattgggagcaagaagatgaggacatggaccccagattagaacacagttcctcagttcaagaagattctgaatccccaagtcctgaagatataccagactacctcctgcaatacagggccatccacagtgcagaacagcaacatgcctatgagcaggactttgagacagattatgctgaataccgcatcctgcatgcccgtgttgggactgcaagccaaaggttcatagagctgggagcagagattaaaagagttcggcgaggaactccagaatacaaggtcctggaagacaagataatccaggaatataaaaagttcaggaagcagtacccaagttacagagaagaaaagcgtcgctgtgagtaccttcaccagaaattgtcccacattaaaggtctcatcctggagtttgaggaaaagaacaggggcagctgaagttatcaagggaatttttgagcctctgcttagtgaaacacaaaggaacaaagcagctataaactaaatagaatgcaactatctgcttttcttatgctgaccactggagtccatggtggcaagtagagagctgctctaggttcttgaggtttggttttcattattaatttttagggtatgggcactgtgcaaagactccatagctgtgcctaggagtctaggaaaagtgacagaggcttggcttttttacctttagttcagccaagtcattttcaagtcctgagaaatgacatcatcttcaggataaaataatgaggacattagacaaaccaaactaagtgaattttagcctggtagcctctctaaggaaacagtaataataacttctgataagagttaaaagaacttgtagcatacctggatataatgggaaagggcctgggtgttacccatgtactgaaaatgaacttttaccaacatggctaaaaaattaaaactgactgcttctgtgtcctttgtacaagtttatat

SEQ ID NO: 285353 - DNA, 1680 bp, Homo sapiens
aaaccctcaaggggttgcaggttcagctttcacttagagacagcaactccaaattcagggtcgctggggaaactaaggcaggactggggactctgagtgagaggtcagacgctggtcgcggactctttctcccgagaactggggatagctcttccgatagcccaaagcgattcatgcggatcctagaagaaagcgccgagaggaggtggcggtggtggccctcgcctgtggcccccgtgctgcttgcactcgaactcgtcgccatggaggagctccaggagcctctgagaggacagctccggctctgcttcacgcaagctgcccggactagcctcttactgctcaggctcaacgacgctgccctgcgggcgctgcaagagtgtcagcggcaacaggtacggccggtgattgctttccaaggccaccgagggtatctgagactcccaggccctggttggtcctgcctcttctccttcatagtgtcccagtgttgtcaggagggcgctggtggtagcttggaccttgtgtgccaacgcttcctcaggtctgggcctaacagcctccactgcctgggctcactcagggagcgcctcattatttgggcagccatggattctatcccagccccatcatcagttcagggacacaacctgactgaagatgccagacatcctgagagttggcagaacacaggaggctattctgaaggagatgcagtatcacagccacagatggcactagaggaggtgtcagtgtcagatccactggcaagcaaccaaggacagtcactcccaggatcctcaagggagcacatggcacagtgggaagtgagaagccagacccatgttccaaacagagaacctgttcaggcactgccttcctctgccagccggaaacgtctggacaagaaacgttcagtgcctgtagccactgtagaactggaagaaaagaggttcagaactctgcctttagtgccaagccccctacaaggcctgaccaatcaggatttacaagagggagaagattgggagcaagaagatgaggacatggaccccagattagaacacagttcctcagttcaagaagattctgaatccccaagtcctgaagatataccagactacctcctgtgagttccttgctttttccaatttcatcaagacttgttcatatattaagatacacttcctggaagctgggggcttttcaggggcaatgaaattgaaggtgacaactctctgctcctggcaggcaatacagggccatccacagtgcagaacagcaacatgcctatgagcaggactttgagacagattatgctgaataccgcatcctgcatgcccgtgttgggactgcaagccaaaggttcatagagctgggagcagagattaaaagagttcggcgaggaactccagaatacaaggtaaggacaggacccagcctggctttccagctctactggccattaaccccctgctaaccatccatacacctgtgtttataaagtgactaagcaaagtgacaaggaaacctgtttgaagggaaaaattagtctgtatcatttggtagaatgagaagggaagttacttcccttctttttttggggggacagtctagtccagcccaggcaacaagagcgaaactccgtctcaaaaaataattaaataaataaataaaccc

SEQ ID NO: 285354 - DNA, 1738 bp, Homo sapiens
gcaaggaaaaaaagaagagagaagaagaggaggaagcggaaataacggcggaggtgcgaggcctgggtggagccggactagcctcttactgctcaggctcaacgacgctgccctgcgggcgctgcaagagtgtcagcggcaacaggtacggccggtgattgctttccaaggccaccgagggtatctgagactcccaggccctggttggtcctgcctcttctccttcatagtgtcccagtgttgtcaggagggcgctggtggtagcttggaccttgtgtgccaacgcttcctcaggtctgggcctaacagcctccactgcctgggctcactcagggagcgcctcattatttgggcagccatggattctatcccagccccatcatcagttcagggacacaacctgactgaagatgccagacatcctgagagttggcagaacacaggaggctattctgaaggagatgcagtatcacagccacagatggcactagaggaggtgtcagtgtcagatccactggcaagcaaccaaggacagtcactcccaggatcctcaagggagcacatggcacagtgggaagtgagaagccagacccatgttccaaacagagaacctgttcaggcactgccttcctctgccagccggaaacgtctggacaagaaacgttcagtgcctgtagccactgtagaactggaagaaaagaggttcagaactctgcctttagtgccaagccccctacaaggcctgaccaatcaggatttacaagagggagaagattgggagcaagaagatgaggacatggaccccagattagaacacagttcctcagttcaagaagattctgaatccccaagtcctgaagatataccagactacctcctgcaatacagggccatccacagtgcagaacagcaacatgcctatgagcaggactttgagacagattatgctgaataccgcatcctgcatgcccgtgttgggactgcaagccaaaggttcatagagctgggagcagagattaaaagagttcggcgaggaactccagaatacaaggtcctggaagacaagataatccaggaatataaaaagttcaggaagcagtacccaagttacagagaagaaaagcgtcgctgtgagtaccttcaccagaaattgtcccacattaaaggtctcatcctggagtttgaggaaaagaacaggggcagctgaagttatcaagggaatttttgagcctctgcttagtgaaacacaaaggaacaaagcagctataaactaaatagaatgcaactatctgcttttcttatgctgaccactggagtccatggtggcaagtagagagctgctctaggttcttgaggtttggttttcattattaatttttagggtatgggcactgtgcaaagactccatagctgtgcctaggagtctaggaaaagtgacagaggcttggcttttttacctttagttcagccaagtcattttcaagtcctgagaaatgacatcatcttcaggataaaataatgaggacattagacaaaccaaactaagtgaattttagcctggtagcctctctaaggaaacagtaataataacttctgataagagttaaaagaacttgtagcatacctggatataatgggaaagggcctgggtgttacccatgtactgaaaatgaacttttaccaacatggctaaaaaattaaaactgactgcttctgtgtcctttgtacaagtttatat

SEQ ID NO: 285355 - DNA, 1503 bp, Homo sapiens
gggtcagtagcaggacgctagtgacgcgcttgtacctagcgcgccaacgcttcctcagcgtctgggcctaacagcctccactgcctgggctcactcagggagcgcctcattatttgggcagccatggattctatcccagccccatcatcagttcagggacacaacctgactgaagatgccagacatcctgagagttggcagaacacaggaggctattctgaaggagatgcagtatcacagccacagatggcactagaggaggtgtcagtgtcagatccactggcaagcaaccaaggacagtcactcccaggatcctcaagggagcacatggcacagtgggaagtgagaagccagacccatgttccaaacagagaacctgttcaggcactgccttcctctgccagccggaaacgtctggacaagaaacgttcagtgcctgtagccactgtagaactggaagaaaagaggttcagaactctgcctttagtgccaagccccctacaaggcctgaccaatcaggatttacaagagggagaagattgggagcaagaagatgaggacatggaccccagattagaacacagttcctcagttcaagaagattctgaatccccaagtcctgaagatataccagactacctcctgcaatacagggccatccacagtgcagaacagcaacatgcctatgagcaggactttgagacagattatgctgaataccgcatcctgcatgcccgtgttgggactgcaagccaaaggttcatagagctgggagcagagattaaaagagttcggcgaggaactccagaatacaaggtcctggaagacaagataatccaggaatataaaaagttcaggaagcagtacccaagttacagagaagaaaagcgtcgctgtgagtaccttcaccagaaattgtcccacattaaaggtctcatcctggagtttgaggaaaagaacaggggcagctgaagttatcaagggaatttttgagcctctgcttagtgaaacacaaaggaacaaagcagctataaactaaatagaatgcaactatctgcttttcttatgctgaccactggagtccatggtggcaagtagagagctgctctaggttcttgaggtttggttttcattattaatttttagggtatgggcactgtgcaaagactccatagctgtgcctaggagtctaggaaaagtgacagaggcttggcttttttacctttagttcagccaagtcattttcaagtcctgagaaatgacatcatcttcaggataaaataatgaggacattagacaaaccaaactaagtgaattttagcctggtagcctctctaaggaaacagtaataataacttctgataagagttaaaagaacttgtagcatacctggatataatgggaaagggcctgggtgttacccatgtactgaaaatgaacttttaccaacatggctaaaaaattaaaactgactgcttctgtgtcctttgtacaagtttatat

SEQ ID NO: 285356 - DNA, 959 bp, Homo sapiens
ggccggaagtgcgtgggctgccgggctggcccagcttagggttttcaggaaatttggaagctgccgcagtagttggagtctaaggactcgtgacaatcttcgggtgcccttcgagagaaaaggggaggatgccactggagtcatcctcttcaatgccactatccttcccatctctcttaccctcagtaccacacaatactaacccttcccctcctctgatgtcttacatcacctcccaggagatgaagtgtattcttcactggtttgccaattggtcaggtccccagcgtgaacgtttcctagaggacctggtagctaaggcagtgccagaaaaattacaaccactgctggatagtctggagcagcttagtgtgtctggggcagaccgaccaccttctatctttgagtgccagctacatctttgggatcagtggtttcgaggctgggctgagcaggagcgcaatgaatttgtcagacagctggagttcagtgagccagacttcgtggcaaagttttaccaagcagtggctgctacagctggtaaggactgataggcattcagaccaaagaagataaccatagctgatggagccatgactctctacaatgataactcaattcaaatgtgtcgcctaaagctctggaactggtattccaaccagctgaccgaactcactgaccagtacaggcatggttatttcaacattaatagcatgtcaactggactcctatttgtaaatgttatcaatctaagcaatccagctcatcagtctactagtttgcttctttccgagagatgtcaagtcctcaagaatttgatggcttcttctgcagctataaccacaaggaacctacacattgtaactcaagtccactgctggctcatgaaatgtgtaaagtagaaccctccttcccgagaaataagacaggacaataaaaggtggcgtttttgtacttta

SEQ ID NO: 285357 - DNA, 1117 bp, Homo sapiens
ggccggaagtgcgtgggctgccgggctggcccagcttagggttttcaggaaatttggaagctgccgcagtagttggagtctaaggactcgtgacaatcttcgggtgcccttcgagagaaaaggggaggatgccactggagtcatcctcttcaatgccactatccttcccatctctcttaccctcagtaccacacaatactaacccttcccctcctctgatgtcttacatcacctcccaggagatgaagtgtattcttcactggtttgccaattggtcaggtccccagcgtgaacgtttcctagaggacctggtagctaaggcagtgccagaaaaattacaaccactgctggatagtctggagcagcttagtgtgtctggggcagaccgaccaccttctatctttgagtgccagctacatctttgggatcagtggtttcgaggctgggctgagcaggagcgcaatgaatttgtcagacagctggagttcagtgagccagacttcgtggcaaagttttaccaagcagtggctgctacagctggtaaggactgataggcattcagaccaaagaagataaccatagctgatggagccatgactctctacaatgataactcaattcaaatgtgtcgcctaaagctctggaactggtattccaaccagctgaccgaactcactgaccagtacaggcatggttatttcaacattaatagcatgtcaactggactcctatttgtaaatgttatcaatctaagcaatccagctcatcagtctactagtttgcttctttccgagagatgtcaagtcctcaagaatttgatggcttcttctgcagctataaccacaaggaacctacacattgtaactcaagtccactgctggctcatgaaatgtgtaaagtagaaccctccttcccgagaaataagacaggacaataaaaggtggcgtttttgtactttacctggattccattggctggttttaccactcctatcagattgtagtgtaattgtgtgatacgcaaaccattagtttacccagtgatgatttaataaaattatgaaaaatcaggagagggagataattagttgcttcctccttcacactgtttgaatcga

SEQ ID NO: 285358 - DNA, 1070 bp, Homo sapiens
ggccggaagtgcgtgggctgccgggctggcccagcttagggttttcaggaaatttggaagctgccgcagtagttggagtctaaggactcgtgacaatcttcgggtgcccttcgagagaaaaggggaggatgccactggagtcatcctcttcaatgccactatccttcccatctctcttaccctcagtaccacacaatactaacccttcccctcctctgatgtcttacatcacctcccaggagatgaagtgtattcttcactggtttgccaattggtcaggtccccagcgtgaacgtttcctagaggacctggtagctaaggcagtgccagaaaaattacaaccactgctggatagtctggagcagcttagtgtgtctggggcagaccgaccaccttctatctttgagtgccagctacatctttgggatcagtggtttcgaggctgggctgagcaggagcgcaatgaatttgtcagacagctggagttcagtgagccagacttcgtggcaaagttttaccaagcagtggctgctacagctggtaaggactgataggcattcagaccaaagaagataaccatagctgatggagccatgactctctacaatgataactcaattcaaatgtgtcgcctaaagctctggaactggtattccaaccagctgaccgaactcactgaccagtacaggcatggttatttcaacattaatagcatgtcaactggactcctatttgtaaatgttatcaatctaagcaatccagctcatcagtctactagtttgcttctttccgagagatgtcaagtcctcaagaatttgatggcttcttctgcagctataaccacaaggaacctacacattgtaactcaagtccactgctggctcatgaaatgtgtaaagtagaaccctccttcccgagaaataagacaggacaataaaaggtggcgtttttgtactttacctggattccattggctggttttaccactcctatcagattgtagtgtaattgtgtgatacgcaaaccattagtttacccagtgatgatttaataaaattatgaaaaatcag

SEQ ID NO: 285359 - DNA, 667 bp, Homo sapiens
ggccggaagtgcgtgggctgccgggctggcccagcttagggttttcaggaaatttggaagctgccgcagtagttggagtctaaggactcgtgacaatcttcgggtgcccttcgagagaaaaggggaggatgccactggagtcatcctcttcaatgccactatccttcccatctctcttaccctcagtaccacacaatactaacccttcccctcctctgatgtcttacatcacctcccaggagatgaagtgtattcttcactggtttgccaattggtcaggtccccagcgtgaacgtttcctagaggacctggtagctaaggcagtgccagaaaaattacaaccactgctggatagtctggagcagcttagtgtgtctggggcagaccgaccaccttctatctttgagtgccagctacatctttgggatcagtggtttcgaggctgggctgagcaggagcgcaatgagatgttggaaggggccataagatgttggaaggggtcatgagatgttggaaggagcgatgagatgttggaaggagtcatgagatgttggacggggccatgagatgttggacggagggctgagatgttggaaggagcgatgagatgttggacggggcctgcgatgttgacaggcgcgatgagatgtcggaaggggggatcctc

SEQ ID NO: 285360 - DNA, 479 bp, Homo sapiens
ttttctggtaggctgtggttcccattacacccaccaggattagcagcattaggcagagtcccatggacagccttaggtgggtcatggagggattatggtctgaagtaaccagcaacctaggaacatagaaggtaatatttggcatggaataatgcctagccttagtagataaagcggcattacctttttttttttttttttttggagacaaggtcttggtctccactgcattccagcctgggtgacagagcgagaccctgtctcaaaaaagaagaagaaaaaggtggggggaggggactaagatccctatgtcctagagatgggggaatgtgttattgtatgggaggagggagtcaggtagtgacgggactggatgatcgtgttagggatctttgttctctgaaacgcaaccctgtctaggacaatatacacgtgagtgagtgcttaataaatttaatttcaaacatccggactccatg

SEQ ID NO: 285361 - DNA, 506 bp, Homo sapiens
tagcaggtgttcctattctgtaagtttgctttacaacaatacgaaaataagtgacaatttacaggttgaacaatttatttttgtaccaaaataaagaatggatctttagaactgtaaaacttcacccttttttcattgccaggctatataatattgacaaccggggaaagaggcattccaaagaaagtagaaattaagtatacacaatagattttccatccagttgtctcacaagaaattattctcttcccactgcattccagcctgggtgacagagcgagaccctgtctcaaaaaagaagaagaaaaaggtggggggaggggactaagatccctatgtcctagagatgggggaatgtgttattgtatgggaggagggagtcaggtagtgacgggactggatgatcgtgttagggatctttgttctctgaaacgcaaccctgtctaggacaatatacacgtgagtgagtgcttaataaatttaatttcaaacatccggactccatg

SEQ ID NO: 285362 - DNA, 429 bp, Homo sapiens
tagcaggtgttcctattctgtaagtttgctttacaacaatacgaaaataagtgacaatttacaggttgaacaatttatttttgtaccaaaataaagaatggatctttagaactgtaaaacttcacccttttttcattgccaggctatataatattgacaaccggggaaagagccactgcattccagcctgggtgacagagcgagaccctgtctcaaaaaagaagaagaaaaaggtggggggaggggactaagatccctatgtcctagagatgggggaatgtgttattgtatgggaggagggagtcaggtagtgacgggactggatgatcgtgttagggatctttgttctctgaaacgcaaccctgtctaggacaatatacacgtgagtgagtgcttaataaatttaatttcaaacatccggactccatg

SEQ ID NO: 285363 - DNA, 1055 bp, Homo sapiens
ggccggaagtgcgtgggctgccgggctggcccagcttagggttttcaggaaatttggaagctgccgcagtagttggagtctaaggactcgtgacaatcttcgggtgcccttcgagagaaaaggggaggatgccactggagtcatcctcttcaatgccactatccttcccatctctcttaccctcagtaccacacaatactaacccttcccctcctctgatgtcttacatcacctcccaggagatgaagtgtattcttcactggtttgccaattggtcaggtccccagcgtgaacgtttcctagaggacctggtagctaaggcagtgccagaaaaattacaaccactgctggatagtctggagcagcttagtgtgtctggggcagaccgaccaccttctatctttgagtgccagctacatctttgggatcagtggtttcgaggctgggctgagcaggagcgcaatgaatttgtcagacagctggagttcagtgagccagacttcgtggcaaagttttaccaagcagtggctgctacagctggtaaggactgataggcattcagaccaaagaagataaccatagctgatggagccatgactctctacaatgataactcaattcaaatgtgtcgcctaaagctctggaactggtattccaaccagctgaccgaactcactgaccagtacaggcatggttatttcaacattaatagcatgtcaactggactcctatttgtaaatgttatcaatctaagcaatccagctcatcagtctactagtttgcttctttccgagagatgtcaagtcctcaagaatttgatggcttcttctgcgcgcaggggttctcagatgccgagagcatgtgtaaactacagtccagtgctgggctcataagacgtgctaggtgtagtaccatcggttccgagatataagaactgcacaataaacagtagcatttgagtaggtatgacgtggattcacatcgattggttccacgcatctcgtatcagaatcgtagcgtatagtgtgcactagtttaattggtgggtgactgta

SEQ ID NO: 285364 - DNA, 1801 bp, Homo sapiens
tctcgaacacctgggctcaagcgatcctcttgcctcggcctctcaaagtgctgagattactttggaagtgcaagaaccaccgcgtctggcccatactaaatattaaggacaattgtttaaagacatggattgtcataaaatagtataacacttgttagatctctaagccaacaaaccaactggactcttttttaagaacgtctcaaacacccgggcttctggttctttcatgcgttaccttattttgagcaaggtccttactctgctttttaacttttcctggtgctttacaggaaatgtaaggaggtaacggatgttatggagttgttggcatatttcagaggcttatatgcacattgaaggctctttcatcataaatgttttttctttcttcccccactgttgatagctgcaaaacaattagcatcagccttgaccagctgcacgtactagattttaaaatgtgtgcattttcattttggagaagatgtaatggaccaacattaatcattgtttttttctttacccaacctggcacatagaagtaagaggaagagaatgaacaagaaatatattggttatttttaggttctttataagaaagatggaggaagacagtgggtggggaagaatgggtttgaaaaaggcaggcaaataggaaatgaagttatttttggtgatttttctaaggtagttggataataatctaaataaaggactcttattattttgggtctttgaattcataaaaagtaattttctctgtagatgctaattgagtgtggtaagatgtcttgttgcttgaaagttgtattttcgttgctctacctggagagcatataacagtgcttttatgttgatgccactggagtcatcctcttcaatgccactatccttcccatctctcttaccctcagtaccacacaatactaacccttcccctcctctgatgtcttacatcacctcccaggagatgaagtgtattcttcactggtttgccaattggtcaggtccccagcgtgaacgtttcctagaggacctggtagctaaggcagtgccagaaaaattacaaccactgctggatagtctggagcagcttagtgtgtctggggcagaccgaccaccttctatctttgagtgccagctacatctttgggatcagtggtttcgaggctgggctgagcaggagcgcaatgaatttgtcagacagctggagttcagtgagccagacttcgtggcaaagttttaccaagcagtggctgctacagctggtaaggactgataggcattcagaccaaagaagataaccatagctgatggagccatgactctctacaatgataactcaattcaaatgtgtcgcctaaagctctggaactggtattccaaccagctgaccgaactcactgaccagtacaggcatggttatttcaacattaatagcatgtcaactggactcctatttgtaaatgttatcaatctaagcaatccagctcatcagtctactagtttgcttctttccgagagatgtcaagtcctcaagaatttgatggcttcttctgcagctataaccacaaggaacctacacattgtaactcaagtccactgctggctcatgaaatgtgtaaagtagaaccctccttcccgagaaataagacaggacaataaaaggtggcgtttttgtactttacctggattccattggctggttttaccactcctatcagattgtagtgtaattgtgtgatacgcaaaccattagtttacccagtgatgatttaataaaattatgaaaaatcag

SEQ ID NO: 285365 - DNA, 1025 bp, Homo sapiens
ggccggaagtgcgtgggctgccgggctggcccagcttagggttttcaggaaatttggaagctgccgcagtagttggagtctaaggactcgtgacaatcttcgggtgcccttcgagagaaaaggggaggatgccactggagtcatcctcttcaatgccactatccttcccatctctcttaccctcagtaccacacaatactaacccttcccctcctctgatgtcttacatcacctcccaggagatgaagtgtattcttcactggtttgccaattggtcaggtccccagcgtgaacgtttcctagaggacctggtagctaaggcagtgccagaaaaattacaccgaccaccttctatctttgagtgccagctacatctttgggatcagtggtttcgaggctgggctgagcaggagcgcaatgaatttgtcagacagctggagttcagtgagccagacttcgtggcaaagttttaccaagcagtggctgctacagctggtaaggactgataggcattcagaccaaagaagataaccatagctgatggagccatgactctctacaatgataactcaattcaaatgtgtcgcctaaagctctggaactggtattccaaccagctgaccgaactcactgaccagtacaggcatggttatttcaacattaatagcatgtcaactggactcctatttgtaaatgttatcaatctaagcaatccagctcatcagtctactagtttgcttctttccgagagatgtcaagtcctcaagaatttgatggcttcttctgcagctataaccacaaggaacctacacattgtaactcaagtccactgctggctcatgaaatgtgtaaagtagaaccctccttcccgagaaataagacaggacaataaaaggtggcgtttttgtactttacctggattccattggctggttttaccactcctatcagattgtagtgtaattgtgtgatacgcaaaccattagtttacccagtgatgatttaataaaattatgaaaaatcag

SEQ ID NO: 285366 - DNA, 1091 bp, Homo sapiens
ggcttactgagtacccaggaaatgtggcacggctgccgaagataagttaggtagtacatataggactctgtcgtacgaatccttcagggtgccctgcgcagtagaataaggggtaggattggcctctgcgagtcaatcctctgtcagtggcgcgactatcgcatgtcgtcatcgtacatcatatacccatgcaagtgactactcgaatgactaacacctgtgcactccttacctcatgatggtgcttcacagtcagccaggagatgaagtgtattcttcactggtttgccaattggtcaggtccccagcgtgaacgtttcctagaggacctggtagctaaggcagtgccagaaaaattacaaccactgctggatagtctggagcagcttagtgtgtctggggcagaccgaccaccttctatctttgagtgccagctacatctttgggatcagtggtttcgaggctgggctgagcaggagcgcaatgaatttgtcagacagctggagttcagtgagccagacttcgtggcaaagttttaccaagcagtggctgctacagctggtaaggactgataggcattcagaccaaagaagataaccatagctgatggagccatgactctctacaatgataactcaattcaaatgtgtcgcctaaagctctggaactggtattccaaccagctgaccgaactcactgaccagtacaggcatggttatttcaacattaatagcatgtcaactggactcctatttgtaaatgttatcaatctaagcaatccagctcatcagtctactagtttgcttctttccgagagatgtcaagtcctcaagaatttgatggcttcttctgcagctataaccacaaggaacctacacattgtaactcaagtccactgctggctcatgaaatgtgtaaagtagaaccctccttcccgagaaataagacaggacaataaaaggtggcgtttttgtactttacctggattccattggctggttttaccactcctatcagattgtagtgtaattgtgtgatacgcaaaccattagtttacccagtgatgatttaataaaattatgaaaaatcag

SEQ ID NO: 285367 - DNA, 962 bp, Homo sapiens
ggccggaagtgcgtgggctgccgggctggcccagcttagggttttcaggaaatttggaagctgccgcagtagttggagtctaaggactcgtgacaatcttcgggtgcccttcgagagaaaaggggagccaggagatgaagtgtattcttcactggtttgccaattggtcaggtccccagcgtgaacgtttcctagaggacctggtagctaaggcagtgccagaaaaattacaaccactgctggatagtctggagcagcttagtgtgtctggggcagaccgaccaccttctatctttgagtgccagctacatctttgggatcagtggtttcgaggctgggctgagcaggagcgcaatgaatttgtcagacagctggagttcagtgagccagacttcgtggcaaagttttaccaagcagtggctgctacagctggtaaggactgataggcattcagaccaaagaagataaccatagctgatggagccatgactctctacaatgataactcaattcaaatgtgtcgcctaaagctctggaactggtattccaaccagctgaccgaactcactgaccagtacaggcatggttatttcaacattaatagcatgtcaactggactcctatttgtaaatgttatcaatctaagcaatccagctcatcagtctactagtttgcttctttccgagagatgtcaagtcctcaagaatttgatggcttcttctgcagctataaccacaaggaacctacacattgtaactcaagtccactgctggctcatgaaatgtgtaaagtagaaccctccttcccgagaaataagacaggacaataaaaggtggcgtttttgtactttacctggattccattggctggttttaccactcctatcagattgtagtgtaattgtgtgatacgcaaaccattagtttacccagtgatgatttaataaaattatgaaaaatcag

SEQ ID NO: 285368 - DNA, 836 bp, Homo sapiens
atccccgggaatgggtgtaccgtcagtggtgagcactggggtcaggtctaagacgctggagtggctatcagggggggtagtttacgctgtggagagtaattcaccaaccactgctggatagtctggagcagcttagtgtgtctggggcagaccgaccaccttctatctttgagtgccagctacatctttgggatcagtggtttcgaggctgggctgagcaggagcgcaatgaatttgtcagacagctggagttcagtgagccagacttcgtggcaaagttttaccaagcagtggctgctacagctggtaaggactgataggcattcagaccaaagaagataaccatagctgatggagccatgactctctacaatgataactcaattcaaatgtgtcgcctaaagctctggaactggtattccaaccagctgaccgaactcactgaccagtacaggcatggttatttcaacattaatagcatgtcaactggactcctatttgtaaatgttatcaatctaagcaatccagctcatcagtctactagtttgcttctttccgagagatgtcaagtcctcaagaatttgatggcttcttctgcagctataaccacaaggaacctacacattgtaactcaagtccactgctggctcatgaaatgtgtaaagtagaaccctccttcccgagaaataagacaggacaataaaaggtggcgtttttgtactttacctggattccattggctggttttaccactcctatcagattgtagtgtaattgtgtgatacgcaaaccattagtttacccagtgatgatttaataaaattatgaaaaatcag

SEQ ID NO: 285369 - DNA, 777 bp, Homo sapiens
ggccggaagtgcgtgggctgccgggctggcccagcttagggttttcaggaaatttggaagctgccgcagtagttggagtctaaggactcgtgacaatcttcgggtgcccttcgagagaaaaggggaggatgccactggagtcatcctcttcaatgccactatccttcccatctctcttaccctcagtaccacacaatactaacccttcccctcctctgatgtcttacatcacctcccaggagatgaagtgtattcttcactggtttgccaattggtcaggtccccagcgtgaacgtttcctagaggacctggtagctaaggcagtgccagaaaaattacaaccactgctggatagtctggagcagcttagtgtgtctggggcagaccgaccaccttctatctttgagtgccagctacatctttgggatcagtggtttcgaggctgggctgagcaggagcgcaatgaatttgtcagacagctggagttcagtgagccagacttcgtggcaaagttttaccaagcagtggctgctacagctggtaaggactgataggcattcagaccaaagaagaagaaaaaggtggggggaggggactaagatccctatgtcctagagatgggggaatgtgttattgtatgggaggagggagtcaggtagtgacgggactggatgatcgtgttagggatctttgttctctgaaacgcaaccctgtctaggacaatatacacgtgagtgagtgcttaataaatttaatttcaaacatccggactccatg

SEQ ID NO: 285370 - DNA, 1492 bp, Homo sapiens
tctcgaacacctgggctcaagcgatcctcttgcctcggcctctcaaagtgctgagattactttggaagtgcaagaaccaccgcgtctggcccatactaaatattaaggacaattgtttaaagacatggattgtcataaaatagtataacacttgttagatctctaagccaacaaaccaactggactcttttttaagaacgtctcaaacacccgggcttctggttctttcatgcgttaccttattttgagcaaggtccttactctgctttttaacttttcctggtgctttacaggaaatgtaaggaggtaacggatgttatggagttgttggcatatttcagaggcttatatgcacattgaaggctctttcatcataaatgttttttctttcttcccccactgttgatagctgcaaaacaattagcatcagccttgaccagctgcacgtactagattttaaaatgtgtgcattttcattttggagaagatgtaatggaccaacattaatcattgtttttttctttacccaacctggcacatagaagtaagaggaagagaatgaacaagaaatatattggttatttttaggttctttataagaaagatggaggaagacagtgggtggggaagaatgggtttgaaaaaggcaggcaaataggaaatgaagttatttttggtgatttttctaaggtagttggataataatctaaataaaggactcttattattttgggtctttgaattcataaaaagtaattttctctgtagatgctaattgagtgtggtaagatgtcttgttgcttgaaagttgtattttcgttgctctacctggagagcatataacagtgcttttatgttgatgccactggagtcatcctcttcaatgccactatccttcccatctctcttaccctcagtaccacacaatactaacccttcccctcctctgatgtcttacatcacctcccaggagatgaagtgtattcttcactggtttgccaattggtcaggtccccagcgtgaacgtttcctagaggacctggtagctaaggcagtgccagaaaaattacctggtaaggactgataggcattcagaccaaagaagataaccatagctgatggagccatgactctctacaatgataactcaattcaaatgtgtcgcctaaagctctggaactggtattccaaccagctgaccgaactcactgaccagtacaggcatggttatttcaacattaatagcatgtcaactggactcctatttgtaaatgttatcaatctaagcaatccagctcatcagtctactagtttgcttctttccgagagatgtcaagtcctcaagaatttgatggcttcttctgcagctataaccacaaggaacctacacattgtaactcaagtccactgctggctcatgaaatgtgtaaagtagaaccctccttcccgagaaataagacaggacaataaaaggtggcgtttttgtacttta

SEQ ID NO: 285371 - DNA, 3489 bp, Homo sapiens
ggccggtagccgccccgccccgcggggcgccacgggcgggtcttggcagcgcccactgagccagccgggccgcaggtgccgcccccgatacacggtgtcccgcccaagctgatccgcgtctgcggtcggtcggtgcgtgcgtgcgcctcgtcggtccgcgtgtctggccgagagcccccttcctctgcggccatgactccgccgccgccgccgccccctcccccgggccctgaccccgcggccgaccccgccgcggacccctgcccctggcccggatcactggtcgtcctcttcggggctacggcgggtgcgctgggacgggacctgggctcggacgagaccgacttaatcctcctagtttggcaagtggttgagccgcggagccgccaggtggggacgctgcacaaatcgctggttcgtgccgaggcggccgcactgagtacgcagtgccgcgaggcgagcggcctgagcgccgacagcctggcgcgggcagagccgctggacaaggtgctgcagcagttctcacagctggtgaacggggatgtggctttgctgggcgggggcccctacatgctctgcactgatgggcagcagctattgcgacaggtcctgcaccccgaggcctccaggaagaacctggtgctccccgacatgttcttctccttctatgacctccgaagagaattccatatgcagcatccaagcacctgccctgccagggacctcactgtggccaccatggcacagggtttaggactggagacagatgccacagaggatgactttggggtctgggaagtcaagacaatggtagctgttatcctccatctactcaaagagcccagcagtcaattgttttcgaagcccgaggtgataaagcagaaatacgagacggggccttgctctgacagcactgtgccctgcccctacagcagcaaggctgatgtggtggacagtgagactgtggtacgggctcgtgggttgccgtggcagtcatcagaccaggacgtggctcgcttcttcaaagggctcaacgtggccaggggtggtgtagcactctgcctcaacgcccagggccgcagaaatggcgaggccctcatccgctttgtggacagcgagcagcgggacctagcgctgcagagacacaagcaccacatgggcgtccgctatattgaggtgtataaagcgacaggggaggagtttgtaaagattgcagggggcacatcactagaggtggctcgtttcttgtcacgggaagaccaagtgatcctgcggctgcggggactgcccttctcggctgggccaacggacgtgcttggcttcctggggccagagtgcccagtgactgggggtaccgaggggctgctctttgtgcgccatcctgatggccggccgactggtgatgccttcgccctctttgcttgtgaggagctggcacaggctgcactgcgcaggcacaagggcatgctgggtaagcgatacattgaactcttccggagcactgcagccgaagtgcagcaggtcttgaaccgctatgcatccggcccactccttcctacactgactgccccactgctgcccatccccttcccactggcacctgggactgggagggactgtgtacgcctccgaggcctgccctacacggccaccattgaagacatcctgagctttctgggggaggcagcagctgacattcggccccacggtgtacacatggtgctcaaccagcagggccggccatcgggcgatgccttcattcagatgacatcagcagagcgagccctagctgctgctcagcgttgccataagaaggtgatgaaggagcgctacgtggaggtggtcccctgttccacagaggagatgagccgagtgctgatggggggcaccttgggccgcagtggcatgtcccctccaccctgcaagctgccctgcctctcaccacctacctacaccaccttccaagccaccccaacgctcattcccacggagacggcagctctatacccctcttcagcactgctcccagctgccagggtgcctgctgcccccacccctgttgcctactatccagggccagccactcaactctacctgaactacacagcctactacccaagccccccagtctcccccaccactgtgggctacctcactacacccactgctgccctggcctctgctcccacctcagtgttgtcccagtcaggagccttggtccgcatgcagggtgtcccatacacggctggtatgaaggatctgctcagcgtcttccaggcctaccagctacccgctgatgactacaccagtctgatgcctgttggtgacccacctcgcactgtgttacaagcccccaaggaatgggtgtgtttgtaggagagaaagccaggaggtaagagccagctgatatcctcggcgaacatgtctctcctgagtccagaagaccagcaccctcaacctggtagcttctttctggcttgtcaaagctctcagaaggtacctagaggagcccaagccccagctccatcctccacttattctgcctgtttcccccaaagacaatggctggaccctgcatgcagggctgggggtggaatggggctaaccagctcctgatggcctgagccaggcatcttgactggcacctggagagcccttaagtctgtcctggctgtggcccatgccgacagatatcgtggggctgacaggtccacggcaggcttgctttcttttataaaatggaagctctggtaccttcaatgtatgactcctgggagaatcaagggtccatctgagcctctgagtaaagatcccaatgttctacctctccctgtccctcttgtaggggatagggaggcagagagagccagcccctaccctcagagtatctggacctcagagaccatgttgtgccaggggtggtcccacctaaagatgctagcccctctccaggtgggcataaggagtaacagatggcaaaaccacaaactattttgatggactgtgctgcagtatcaccagaagacattagggggcagtaggcccccacacaaaaccttcaggcttgaattttaaaggggaggactttctgccaacttttcttgtatgccttgggaaagccagttgccctgaacccagcagacaccatggaatgtcctttgcacgcattaaatggtacagaactgaagcctcggaagcaatttggaactcgatcttctcttccttaaatgaaaagttattgaccaaatggactttttaaaagacacaggacccttaactttgccccaaagtgaggggctccacaccaaccccaggcggaggaacactcagacagattaaggatactgttgacctgtcactgtttattatttcagcactaaaactgaggagcctcaactgctggctcttcttccctttgtatttgtgtaaggagcactgcactcccataaaaggttttaaaatacaaaatgtacaagaacacacaattcc

SEQ ID NO: 285372 - DNA, 2328 bp, Homo sapiens
ggcacgaggggagaccggagcgggagacagcggtgacaggagcagcggccgggagcccttagggaggcagacagagcctgcagccaatgccccaggagccctcggttccaaccaactgatgcccctgtgcccactggcccacgccatgcagccccagtccgttctgcacagcggctacttccacccactacttcgggcctggcagacagccaccaccaccctcaatgcctccaacctcatctaccccatctttgtcacgtcaattgttttcgaagcccgaggtgataaagcagaaatacgagacggggccttgcagcaaggctgatgtggtggacagtgagactgtggtacgggctcgtgggttgccgtggcagtcatcagaccaggacgtggctcgcttcttcaaagggctcaacgtggccaggtgtataaagcgacaggggaggagtttgtaaagattgcagggggcacatcactagaggtggctcgtttcttgtcacgggaagaccaagtgatcctgcggctgcggggactgcccttctcggctgggccaacggacgtgcttggcttcctggggccagagtgcccagtgactgggggtaccgaggggctgctctttgtgcgccatcctgatggccggccgactggtgatgccttcgccctctttgcttgtgaggagctggcacaggctgcactgcgcaggcacaagggcatgctgggtaagcgatacattgaactcttccggagcactgcagccgaagtgcagcaggtcttgaaccgctatgcatccggcccactccttcctacactgactgccccactgctgcccatccccttcccactggcacctgggactgggagggactgtgtacgcctccgaggcctgccctacacggccaccattgaagacatcctgagctttctgggggaggcagcagctgacattcggccccacggtgtacacatggtgctcaaccagcagggccggccatcgggcgatgccttcattcagatgacatcagcagagcgagccctagctgctgctcagcgttgccataagaaggcctctcaccacctacctacaccaccttccaagccaccccaacgctcattcccacggagacggcagctctatacccctcttcagcactgctcccagctgccagggtgcctgctgcccccacccctgttgcctactatccagggccagccactcaactctacctgaactacacagcctactacccaagccccccagtctcccccaccactgtgggctacctcactacacccactgctgccctggcctctgctcccacctcagtgttgtcccagtcaggagccttggtccgcatgcagggtgtcccatacacggctggtatgaaggatctgctcagcgtcttccaggcctaccagctacccgctgatgactacaccagtctgatgcctgttggtgacccacctcgcactgtgttacaagcccccaaggaatgggtgtgtttgtaggagagaaagccaggaggtaagagccagctgatatcctcggcgaacatgtctctcctgagtccagaagaccagcaccctcaacctggtagcttctttctggcttgtcaaagctctcagaaggtacctagaggagcccaagccccagctccatcctccacttattctgcctgtttcccccaaagacaatggctggaccctgcatgcagggctgggggtggaatggggctaaccagctcctgatggcctgagccaggcatcttgactggcacctggagagcccttaagtctgtcctggctgtggcccatgccgacagatatcgtggggctgacaggtccacggcaggcttgctttcttttataaaatggaagctctggtaccttcaatgtatgactcctgggagaatcaagggtccatctgagcctctgagtaaagatcccaatgttctacctctccctgtccctcttgtaggggatagggaggcagagagagccagcccctaccctcagagtatctggacctcagagaccatgttgtgccaggggtggtcccacctaaagatgctagcccctctccaggtgggcataaggagtaacagatggcaaaaccacaaactattttgatggactgtgctgcagtatcaccagaagacattagggggcagtaggcccccacacaaaaccttcaggcttgaattttaaaggggaggactttctgccaacttttcttgtatgccttgggaaagccagttgccctgaacccagcagacaccatggaatgtcctttgcacgcattaaatggtacagaactgaagcctcggaagc

SEQ ID NO: 285373 - DNA, 302 bp, Homo sapiens
tctgctctggtcgacttctgctatccattttataaaacacaaggtttcaatttgagcccatctgagccttaaagatccattctgaataccaaaaacagggcttcacagccaggcccagaagaggtctggtgataatggctggccctgggtggggatagtttacacccgggcagcagcaccacacatgaacccaaagacatgttctttttaaagctgttttcagccatgtttctctgtgcatctccagtaagcagaaggtcgacgggtacccgggctccgaaatcggtaatcatgggtcctaa

SEQ ID NO: 285374 - DNA, 4530 bp, Homo sapiens
ggccggtagccgccccgccccgcggggcgccacgggcgggtcttggcagcgcccactgagccagccgggccgcaggtgccgcccccgatacacggtgtcccgcccaagctgatccgcgtctgcggtcggtcggtgcgtgcgtgcgcctcgtcggtccgcgtgtctggccgagagcccccttcctctgcggccatgactccgccgccgccgccgccccctcccccgggccctgaccccgcggccgaccccgccgcggacccctgcccctggcccggatcactggtcgtcctcttcggggctacggcgggtgcgctgggacgggacctgggctcggacgagaccgacttaatcctcctagtttggcaagtggttgagccgcggagccgccaggtggggacgctgcacaaatcgctggttcgtgccgaggcggccgcactgagtacgcagtgccgcgaggcgagcggcctgagcgccgacagcctggcgcgggcagagccgctggacaaggtgctgcagcagttctcacagctggtgaacggggatgtggctttgctgggcgggggcccctacatgctctgcactgatgggcagcagctattgcgacaggtcctgcaccccgaggcctccaggaagaacctggtgctccccgacatgttcttctccttctatgacctccgaagagaattccatatgcagcatccaagcacctgccctgccagggacctcactgtggccaccatggcacagggtttaggactggagacagatgccacagaggatgactttggggtctgggaagtcaagacaatggtagctgttatcctccatctactcaaagagcccagcagtcaattgttttcgaagcccgaggtgataaagcagaaatacgagacggggccttgcagcaaggctgatgtggtggacagtgagactgtggtacgggctcgtgggttgccgtggcagtcatcagaccaggacgtggctcgcttcttcaaagggctcaacgtggccaggggtggtgtagcactctgcctcaacgcccagggccgcagaaatggcgaggccctcatccgctttgtggacagcgagcagcgggacctagcgctgcagagacacaagcaccacatgggcgtccgctatattgaggtgtataaagcgacaggggaggagtttgtaaagattgcagggggcacatcactagaggtggctcgtttcttgtcacgggaagaccaagtgatcctgcggctgcggggactgcccttctcggctgggccaacggacgtgcttggcttcctggggccagagtgcccagtgactgggggtaccgaggggctgctctttgtgcgccatcctgatggccggccgactggtgatgccttcgccctctttgcttgtgaggagctggcacaggctgcactgcgcaggcacaagggcatgctgggtaagcgatacattgaactcttccggagcactgcagccgaagtgcagcaggtcttgaaccgctatgcatccggcccactccttcctacactgactgccccactgctgcccatccccttcccactggcacctgggactgggagggactgtgtacgcctccgaggcctgccctacacggccaccattgaagacatcctgagctttctgggggaggcagcagctgacattcggccccacggtgtacacatggtgctcaaccagcagggccggccatcgggcgatgccttcattcagatgacatcagcagagcgagccctagctgctgctcagcgttgccataagaaggtgatgaaggagcgctacgtggaggtggtcccctgttccacagaggagatgagccgagtgctgatggggggcaccttgggccgcagtggcatgtcccctccaccctgcaagctgccctgcctctcaccacctacctacaccaccttccaagccaccccaacgctcattcccacggagacggcagctctatacccctcttcagcactgctcccagctgccagggtgcctgctgcccccacccctgttgcctactatccagggccagccactcaactctacctgaactacacagcctactacccaagccccccagtctcccccaccactgtgggctacctcactacacccactgctgccctggcctctgctcccacctcagtgttgtcccagtcaggagccttggtccgcatgcagggtgtcccatacacggctggtatgaaggatctgctcagcgtcttccaggcctaccagctacccgctgatgactacaccagtctgatgcctgttggtgacccacctcgcactgtgttacaagcccccaaggaatgggtgtgtttgtaggagagaaagccaggaggtaagagccagctgatatcctcggcgaacatgtctctcctgagtccagaagaccagcaccctcaacctggtagcttctttctggcttgtcaaagctctcagaaggtacctagaggagcccaagccccagctccatcctccacttattctgcctgtttcccccaaagacaatggctggaccctgcatgcagggctgggggtggaatggggctaaccagctcctgatggcctgagccaggcatcttgactggcacctggagagcccttaagtctgtcctggctgtggcccatgccgacagatatcgtggggctgacaggtccacggcaggcttgctttcttttataaaatggaagctctggtaccttcaatgtatgactcctgggagaatcaagggtccatctgagcctctgagtaaagatcccaatgttctacctctccctgtccctcttgtaggggatagggaggcagagagagccagcccctaccctcagagtatctggacctcagagaccatgttgtgccaggggtggtcccacctaaagatgctagcccctctccaggtgggcataaggagtaacagatggcaaaaccacaaactattttgatggactgtgctgcagtatcaccagaagacattagggggcagtaggcccccacacaaaaccttcaggcttgaattttaaaggggaggactttctgccaacttttcttgtatgccttgggaaagccagttgccctgaacccagcagacaccatggaatgtcctttgcacgcattaaatggtacagaactgaagcctcggaagcaatttggaactcgatcttctcttccttaaatgaaaagttattgaccaaatggactttttaaaagacacaggacccttaactttgccccaaagtgaggggctccacaccaaccccaggcggaggaacactcagacagattaaggatactgttgacctgtcactgtttattatttcagcactaaaactgaggagcctcaactgctggctcttcttccctttgtatttgtgtaaggagcactgcactcccataaaaggttttaaaatacaaaatgtacaagaacacacaattccaagtgctgtaaacataactgagaaccagttcctttactaaacatccattttataaaacacaaggtttcaatttgagcccatctgagccttaaagatccattctgaataccaaaaacagggcttcacagccaggcccagaagaggtctggtgataatggctggccctgggtggggatagtttacacccgggcagcagcaccacacatgaacccaaagacatgttctttttaaagctgttttcagccatgtttctctgtgcatctccagtaagcagaaggctacccattccattcctcaacccaagagctagcacagttagagtaggagggggtgcgtactagcacgtgcccagttgctcagtgctgctagtagaaattgatttgcatagtccaatggatgtgtgctttaacaccactatgttgcacaaaaatttaagtctttatctacaaagccaaaaaatattgactcttaacaccaaagcttttacaaagctgatataaaactgcttacatagtatacaaagctctattttaaaatttaatgtttattttaaataggaaagcatttctagtgctacaggcatcaaggtatttagaaggcatcaaaatttggtgcatagcaactctggatcatagaggcttttaattcttgagggcacaaagggtattgcaaggggaactcttgcaataacctcatgtgaggcagctacaccaggggcaaaagggtaggggcaagtctggccatttctctggaatgtcaaccgagaggccaacttcttgcccctccaaaggaagctgtgggcgtccaaccacaggcccagaagcaaatctcactatccacattctgtgacacaactcacttttcaagaaaatttgaaaacacccagctccaagaggggccacagtgatctgctgaagaatagacctttttctctaactaactttaggggagaaatctaaaatatattttgttttttttaaagaccatacttcctcatcctgagtcaacagctcctaacctactgacaacaggtggtgggcaataggccagctccctttcccagacctgaac

SEQ ID NO: 285375 - DNA, 3168 bp, Homo sapiens
ggccggtagccgccccgccccgcggggcgccacgggcgggtcttggcagcgcccactgagccagccgggccgcaggtgccgcccccgatacacggtgtcccgcccaagctgatccgcgtctgcggtcggtcggtgcgtgcgtgcgcctcgtcggtccgcgtgtctggccgagagcccccttcctctgcggccatgactccgccgccgccgccgccccctcccccgggccctgaccccgcggccgaccccgccgcggacccctgcccctggcccggatcactggtcgtcctcttcggggctacggcgggtgcgctgggacgggacctgggctcggacgagaccgacttaatcctcctagtttggcaagtggttgagccgcggagccgccaggtggggacgctgcacaaatcgctggttcgtgccgaggcggccgcactgagtacgcagtgccgcgaggcgagcggcctgagcgccgacagcctggcgcgggcagagccgctggacaaggtgctgcagcagttctcacagctggtgaacggggatgtggctttgctgggcgggggcccctacatgctctgcactgatgggcagcagctattgcgacaggtcctgcaccccgaggcctccaggaagaacctggtgctccccgacatgttcttctccttctatgacctccgaagagaattccatatgcagcatccaagcacctgccctgccagggacctcactgtggccaccatggcacagggtttaggactggagacagatgccacagaggatgactttggggtctgggaagtcaagacaatggtagctgttatcctccatctactcaaagagcccagcagtcaattgttttcgaagcccgaggtgataaagcagaaatacgagacggggccttgcagcaaggctgatgtggtggacagtgagactgtggtacgggctcgtgggttgccgtggcagtcatcagaccaggacgtggctcgcttcttcaaagggctcaacgtggccaggggtggtgtagcactctgcctcaacgcccagggccgcagaaatggcgaggccctcatccgctttgtggacagcgagcagcgggacctagcgctgcagagacacaagcaccacatgggcgtccgctatattgaggtgtataaagcgacaggggaggagtttgtaaagattgcagggggcacatcactagaggtggctcgtttcttgtcacgggaagaccaagtgatcctgcggctgcggggactgcccttctcggctgggccaacggacgtgcttggcttcctggggccagagtgcccagtgactgggggtaccgaggggctgctctttgtgcgccatcctgatggccggccgactggtgatgccttcgccctctttgcttgtgaggagctggcacaggctgcactgcgcaggcacaagggcatgctgggtaagcgatacattgaactcttccggagcactgcagccgaagtgcagcaggtcttgaaccgctatgcatccggcccactccttcctacactgactgccccactgctgcccatccccttcccactggcacctgggactgggagggactgtgtacgcctccgaggcctgccctacacggccaccattgaagacatcctgagctttctgggggaggcagcagctgacattcggccccacggtgtacacatggtgctcaaccagcagggccggccatcgggcgatgccttcattcagatgacatcagcagagcgagccctagctgctgctcagcgttgccataagaaggtgatgaaggagcgctacgtggaggtggtcccctgttccacagaggagatgagccgagtgctgatggggggcaccttgggccgcagtggcatgtcccctccaccctgcaagctgccctgcctctcaccacctacctacaccaccttccaagccaccccaacgctcattcccacggagacggcagctctatacccctcttcagcactgctcccagctgccagggtgcctgctgcccccacccctgttgcctactatccagggccagccactcaactctacctgaactacacagcctactacccaagccccccagtctcccccaccactgtgggctacctcactacacccactgctgccctggcctctgctcccacctcagtgttgtcccagtcaggagccttggtccgcatgcagggtgtcccatacacggctggtatgaaggatctgctcagcgtcttccaggcctaccagctacccgctgatgactacaccagtctgatgcctgttggtgacccacctcgcactgtgttacaagcccccaaggaatgggtgtgtttgtaggagagaaagccaggaggtaagagccagctgatatcctcggcgaacatgtctctcctgagtccagaagaccagcaccctcaacctggtagcttctttctggcttgtcaaagctctcagaaggtacctagaggagcccaagccccagctccatcctccacttattctgcctgtttcccccaaagacaatggctggaccctgcatgcagggctgggggtggaatggggctaaccagctcctgatggcctgagccaggcatcttgactggcacctggagagcccttaagtctgtcctggctgtggcccatgccgacagatatcgtggggctgacaggtccacggcaggcttgctttcttttataaaatggaagctctggtaccttcaatgtatgactcctgggagaatcaagggtccatctgagcctctgagtaaagatcccaatgttctacctctccctgtccctcttgtaggggatagggaggcagagagagccagcccctaccctcagagtatctggacctcagagaccatgttgtgccaggggtggtcccacctaaagatgctagcccctctccaggtgggcataaggagtaacagatggcaaaaccacaaactattttgatggactgtgctgcagtatcaccagaagacattagggggcagtaggcccccacacaaaaccttcaggcttgaattttaaaggggaggactttctgccaacttttcttgtatgccttgggaaagccagttgccctgaacccagcagacaccatggaatgtcctttgcacgcattaaatggtacagaactgaagcctcggaagc

SEQ ID NO: 285376 - DNA, 3808 bp, Homo sapiens
ggcacgaggggagaccggagcgggagacagcggtgacaggagcagcggccgggagcccttagggaggcagacagagcctgcagccaatgccccaggagccctcggttccaaccaactgatgcccctgtgcccactggcccacgccatgcagccccagtccgttctgcacagcggctacttccacccactacttcgggcctggcagacagccaccaccaccctcaatgcctccaacctcatctaccccatctttgtcacgtcaattgttttcgaagcccgaggtgataaagcagaaatacgagacggggccttgcagcaaggctgatgtggtggacagtgagactgtggtacgggctcgtgggttgccgtggcagtcatcagaccaggacgtggctcgcttcttcaaagggctcaacgtggccaggtgtataaagcgacaggggaggagtttgtaaagattgcagggggcacatcactagaggtggctcgtttcttgtcacgggaagaccaagtgatcctgcggctgcggggactgcccttctcggctgggccaacggacgtgcttggcttcctggggccagagtgcccagtgactgggggtaccgaggggctgctctttgtgcgccatcctgatggccggccgactggtgatgccttcgccctctttgcttgtgaggagctggcacaggctgcactgcgcaggcacaagggcatgctgggtaagcgatacattgaactcttccggagcactgcagccgaagtgcagcaggtcttgaaccgctatgcatccggcccactccttcctacactgactgccccactgctgcccatccccttcccactggcacctgggactgggagggactgtgtacgcctccgaggcctgccctacacggccaccattgaagacatcctgagctttctgggggaggcagcagctgacattcggccccacggtgtacacatggtgctcaaccagcagggccggccatcgggcgatgccttcattcagatgacatcagcagagcgagccctagctgctgctcagcgttgccataagaaggtgatgaaggagcgctacgtggaggtggtcccctgttccacagaggagatgagccgagtgctgatggggggcaccttgggccgcagtggcatgtcccctccaccctgcaagctgccctgcctctcaccacctacctacaccaccttccaagccaccccaacgctcattcccacggagacggcagctctatacccctcttcagcactgctcccagctgccagggtgcctgctgcccccacccctgttgcctactatccagggccagccactcaactctacctgaactacacagcctactacccaagccccccagtctcccccaccactgtgggctacctcactacacccactgctgccctggcctctgctcccacctcagtgttgtcccagtcaggagccttggtccgcatgcagggtgtcccatacacggctggtatgaaggatctgctcagcgtcttccaggcctaccagctacccgctgatgactacaccagtctgatgcctgttggtgacccacctcgcactgtgttacaagcccccaaggaatgggtgtgtttgtaggagagaaagccaggaggtaagagccagctgatatcctcggcgaacatgtctctcctgagtccagaagaccagcaccctcaacctggtagcttctttctggcttgtcaaagctctcagaaggtacctagaggagcccaagccccagctccatcctccacttattctgcctgtttcccccaaagacaatggctggaccctgcatgcagggctgggggtggaatggggctaaccagctcctgatggcctgagccaggcatcttgactggcacctggagagcccttaagtctgtcctggctgtggcccatgccgacagatatcgtggggctgacaggtccacggcaggcttgctttcttttataaaatggaagctctggtaccttcaatgtatgactcctgggagaatcaagggtccatctgagcctctgagtaaagatcccaatgttctacctctccctgtccctcttgtaggggatagggaggcagagagagccagcccctaccctcagagtatctggacctcagagaccatgttgtgccaggggtggtcccacctaaagatgctagcccctctccaggtgggcataaggagtaacagatggcaaaaccacaaactattttgatggactgtgctgcagtatcaccagaagacattagggggcagtaggcccccacacaaaaccttcaggcttgaattttaaaggggaggactttctgccaacttttcttgtatgccttgggaaagccagttgccctgaacccagcagacaccatggaatgtcctttgcacgcattaaatggtacagaactgaagcctcggaagcaatttggaactcgatcttctcttccttaaatgaaaagttattgaccaaatggactttttaaaagacacaggacccttaactttgccccaaagtgaggggctccacaccaaccccaggcggaggaacactcagacagattaaggatactgttgacctgtcactgtttattatttcagcactaaaactgaggagcctcaactgctggctcttcttccctttgtatttgtgtaaggagcactgcactcccataaaaggttttaaaatacaaaatgtacaagaacacacaattccaagtgctgtaaacataactgagaaccagttcctttactaaacatccattttataaaacacaaggtttcaatttgagcccatctgagccttaaagatccattctgaataccaaaaacagggcttcacagccaggcccagaagaggtctggtgataatggctggccctgggtggggatagtttacacccgggcagcagcaccacacatgaacccaaagacatgttctttttaaagctgttttcagccatgtttctctgtgcatctccagtaagcagaaggctacccattccattcctcaacccaagagctagcacagttagagtaggagggggtgcgtactagcacgtgcccagttgctcagtgctgctagtagaaattgatttgcatagtccaatggatgtgtgctttaacaccactatgttgcacaaaaatttaagtctttatctacaaagccaaaaaatattgactcttaacaccaaagcttttacaaagctgatataaaactgcttacatagtatacaaagctctattttaaaatttaatgtttattttaaataggaaagcatttctagtgctacaggcatcaaggtatttagaaggcatcaaaatttggtgcatagcaactctggatcatagaggcttttaattcttgagggcacaaagggtattgcaaggggaactcttgcaataacctcatgtgaggcagctacaccaggggcaaaagggtaggggcaagtctggccatttctctggaatgtcaaccgagaggccaacttcttgcccctccaaaggaagctgtgggcgtccaaccacaggcccagaagcaaatctcactatccacattctgtgacacaactcacttttcaagaaaatttgaaaacacccagctccaagaggggccacagtgatctgctgaagaatagacctttttctctaactaactttaggggagaaatctaaaatatattttgttttttttaaagaccatacttcctcatcctgagtcaacagctcctaacctactgacaacaggtggtgggcaataggccagctccctttcccagacctgaac

SEQ ID NO: 285377 - DNA, 3304 bp, Homo sapiens
ggccggtagccgccccgccccgcggggcgccacgggcgggtcttggcagcgcccactgagccagccgggccgcaggtgccgcccccgatacacggtgtcccgcccaagctgatccgcgtctgcggtcggtcggtgcgtgcgtgcgcctcgtcggtccgcgtgtctggccgagagcccccttcctctgcggccatgactccgccgccgccgccgccccctcccccgggccctgaccccgcggccgaccccgccgcggacccctgcccctggcccggatcactggtcgtcctcttcggggctacggcgggtgcgctgggacgggacctgggctcggacgagaccgacttaatcctcctagtttggcaagtggttgagccgcggagccgccaggtggggacgctgcacaaatcgctggttcgtgccgaggcggccgcactgagtacgcagtgccgcgaggcgagcggcctgagcgccgacagcctggcgcgggcagagccgctggacaaggtgctgcagcagttctcacagctggtgaacggggatgtggctttgctgggcgggggcccctacatgctctgcactgatgggcagcagctattgcgacaggtcctgcaccccgaggcctccaggaagaacctggtgctccccgacatgttcttctccttctatgacctccgaagagaattccatatgcagcatccaagcacctgccctgccagggacctcactgtggccaccatggcacagggtttaggactggagacagatgccacagaggatgactttggggtctgggaagtcaagacaatggtagctgttatcctccattcaactctacctgaactacacagcctactacccaagccccccagtctcccccaccactgtgggctacctcactacacccactgctgccctggcctctgctcccacctcagtgttgtcccagtcaggagccttggtccgcatgcagggtgtcccatacacggctggtatgaaggatctgctcagcgtcttccaggcctaccagctacccgctgatgactacaccagtctgatgcctgttggtgacccacctcgcactgtgttacaagcccccaaggaatgggtgtgtttgtaggagagaaagccaggaggtaagagccagctgatatcctcggcgaacatgtctctcctgagtccagaagaccagcaccctcaacctggtagcttctttctggcttgtcaaagctctcagaaggtacctagaggagcccaagccccagctccatcctccacttattctgcctgtttcccccaaagacaatggctggaccctgcatgcagggctgggggtggaatggggctaaccagctcctgatggcctgagccaggcatcttgactggcacctggagagcccttaagtctgtcctggctgtggcccatgccgacagatatcgtggggctgacaggtccacggcaggcttgctttcttttataaaatggaagctctggtaccttcaatgtatgactcctgggagaatcaagggtccatctgagcctctgagtaaagatcccaatgttctacctctccctgtccctcttgtaggggatagggaggcagagagagccagcccctaccctcagagtatctggacctcagagaccatgttgtgccaggggtggtcccacctaaagatgctagcccctctccaggtgggcataaggagtaacagatggcaaaaccacaaactattttgatggactgtgctgcagtatcaccagaagacattagggggcagtaggcccccacacaaaaccttcaggcttgaattttaaaggggaggactttctgccaacttttcttgtatgccttgggaaagccagttgccctgaacccagcagacaccatggaatgtcctttgcacgcattaaatggtacagaactgaagcctcggaagcaatttggaactcgatcttctcttccttaaatgaaaagttattgaccaaatggactttttaaaagacacaggacccttaactttgccccaaagtgaggggctccacaccaaccccaggcggaggaacactcagacagattaaggatactgttgacctgtcactgtttattatttcagcactaaaactgaggagcctcaactgctggctcttcttccctttgtatttgtgtaaggagcactgcactcccataaaaggttttaaaatacaaaatgtacaagaacacacaattccaagtgctgtaaacataactgagaaccagttcctttactaaacatccattttataaaacacaaggtttcaatttgagcccatctgagccttaaagatccattctgaataccaaaaacagggcttcacagccaggcccagaagaggtctggtgataatggctggccctgggtggggatagtttacacccgggcagcagcaccacacatgaacccaaagacatgttctttttaaagctgttttcagccatgtttctctgtgcatctccagtaagcagaaggctacccattccattcctcaacccaagagctagcacagttagagtaggagggggtgcgtactagcacgtgcccagttgctcagtgctgctagtagaaattgatttgcatagtccaatggatgtgtgctttaacaccactatgttgcacaaaaatttaagtctttatctacaaagccaaaaaatattgactcttaacaccaaagcttttacaaagctgatataaaactgcttacatagtatacaaagctctattttaaaatttaatgtttattttaaataggaaagcatttctagtgctacaggcatcaaggtatttagaaggcatcaaaatttggtgcatagcaactctggatcatagaggcttttaattcttgagggcacaaagggtattgcaaggggaactcttgcaataacctcatgtgaggcagctacaccaggggcaaaagggtaggggcaagtctggccatttctctggaatgtcaaccgagaggccaacttcttgcccctccaaaggaagctgtgggcgtccaaccacaggcccagaagcaaatctcactatccacattctgtgacacaactcacttttcaagaaaatttgaaaacacccagctccaagaggggccacagtgatctgctgaagaatagacctttttctctaactaactttaggggagaaatctaaaatatattttgttttttttaaagaccatacttcctcatcctgagtcaacagctcctaacctactgacaacaggtggtgggcaataggccagctccctttcccagacctgaac

SEQ ID NO: 285378 - DNA, 2123 bp, Homo sapiens
ggccggtagccgccccgccccgcggggcgccacgggcgggtcttggcagcgcccactgagccagccgggccgcaggtgccgcccccgatacacggtgtcccgcccaagctgatccgcgtctgcggtcggtcggtgcgtgcgtgcgcctcgtcggtccgcgtgtctggccgagagcccccttcctctgcggccatgactccgccgccgccgccgccccctcccccgggccctgaccccgcggccgaccccgccgcggacccctgcccctggcccggatcactggtcgtcctcttcggggctacggcgggtgcgctgggacgggacctgggctcggacgagaccgacttaatcctcctagtttggcaagtggttgagccgcggagccgccaggtggggacgctgcacaaatcgctggttcgtgccgaggcggccgcactgagtacgcagtgccgcgaggcgagcggcctgagcgccgacagcctggcgcgggcagagccgctggacaaggtgctgcagcagttctcacagctggtgaacggggatgtggctttgctgggcgggggcccctacatgctctgcactgatgggcagcagctattgcgacaggtcctgcaccccgaggcctccaggaagaacctggtgctccccgacatgttcttctccttctatgacctccgaagagaattccatatgcagcatccaagcacctgccctgccagggacctcactgtggccaccatggcacagggtttaggactggagacagatgccacagaggatgactttggggtctgggaagtcaagacaatggtagctgttatcctccatctactcaaagagcccagcagtcaattgttttcgaagcccgaggtgataaagcagaaatacgagacggggccttgcagcaaggctgatgtggtggacagtgagactgtggtacgggctcgtgggttgccgtggcagtcatcagaccaggacgtggctcgcttcttcaaagggctcaacgtggccaggggtggtgtagcactctgcctcaacgcccagggccgcagaaatggcgaggccctcatccgctttgtggacagcgagcagcgggacctagcgctgcagagacacaagcaccacatgggcgtccgctatattgaggtgtataaagcgacaggggaggagtttgtaaagattgcagggggcacatcactagaggtggctcgtttcttgtcacgggaagaccaagtgatcctgcggctgcggggactgcccttctcggctgggccaacggacgtgcttggcttcctggggccagagtgcccagtgactgggggtaccgaggggctgctctttgtgcgccatcctgatggccggccgactggtgatgccttcgccctctttgcttgtgaggagctggcacaggctgcactgcgcaggcacaagggcatgctgggtaagcgatacattgaactcttccggagcactgcagccgaagtgcagcaggtcttgaaccgctatgcatccggcccactccttcctacactgactgccccactgctgcccatccccttcccactggcacctgggactgggagggactgtgtacgcctccgaggcctgccctacacggccaccattgaagacatcctgagctttctgggggaggcagcagctgacattcggccccacggtgtacacatggtgctcaaccagcagggccggccatcgggcgatgccttcattcagatgacatcagcagagcgagccctagctgctgctcagcgttgccataagaaggtgatgaaggagcgctacgtggaggtggtcccctgttccacagaggagatgagccgagtgctgatggggggcaccttgggccgcagtggcatgtcccctccaccctgcaagctgccctgcctctcaccacctacctacaccaccttccaagccaccccaacgctcattcccacggagacggcagctctatacccctcttcagcactgctcccagctgccagggtgcctgctgcccccacccctgttgcctactatccagggccagccactcaactctacctgaactacacagcctactacccaagcccagttccccacatgtgggtactcataaaccc

SEQ ID NO: 285379 - DNA, 1578 bp, Homo sapiens
ggccggtagccgccccgccccgcggggcgccacgggcgggtcttggcagcgcccactgagccagccgggccgcaggtgccgcccccgatacacggtgtcccgcccaagctgatccgcgtctgcggtcggtcggtgcgtgcgtgcgcctcgtcggtccgcgtgtctggccgagagcccccttcctctgcggccatgactccgccgccgccgccgccccctcccccgggccctgaccccgcggccgaccccgccgcggacccctgcccctggcccggatcactggtcgtcctcttcggggctacggcgggtgcgctgggacgggacctgggctcggacgagaccgacttaatcctcctagtttggcaagtggttgagccgcggagccgccaggtggggacgctgcacaaatcgctggttcgtgccgaggcggccgcactgagtacgcagtgccgcgaggcgagcggcctgagcgccgacagcctggcgcgggcagagccgctggacaaggtgctgcagcagttctcacagctggtgaacggggatgtggctttgctgggcgggggcccctacatgctctgcactgatgggcagcagctattgcgacaggtcctgcaccccgaggcctccaggaagaacctggtgctccccgacatgttcttctccttctatgacctccgaagagaattccatatgcagcatccaagcacctgccctgccagggacctcactgtggccaccatggcacagggtttaggactggagacagatgccacagaggatgactttggggtctgggaagtcaagacaatggtagctgttatcctccatctactcaaagagcccagcagtcaattgttttcgaagcccgaggtgataaagcagaaatacgagacggggccttgcagcaaggctgatgtggtggacagtgagactgtggtacgggctcgtgggttgccgtggcagtcatcagaccaggacgtggctcgcttcttcaaagggctcaacgtggccaggggtggtgtagcactctgcctcaacgcccagggccgcagaaatggcgaggccctcatccgctttgtggacagcgagcagcgggacctagcgctgcagagacacaagcaccacatgggcgtccgctatattgaggtgtataaagcgacaggggaggagtttgtaaagattgcagggggcacatcactagaggtggctcgtttcttgtcacgggaagaccaagtgatcctgcggctgcggggactgcccttctcggctgggccaacggacgtgcttggcttcctggggccagagtgcccagtgactgggggtaccgaggggctgctctttgtgcgccatcctgatggccggccgactggtgatgccttcgccctctttgcttgtgaggagctggcacaggctgcactgcgcaggcacaagggcatgctgggtaagcgatacattgaactcttccggagcactgcagccgaagtgcagcaggtgagcgcccagggctccccacccccagatgtactgttactccagggcggccctctgtgtccctgccctacttggcatgaccagcct

SEQ ID NO: 285380 - DNA, 1253 bp, Homo sapiens
ggccggtagccgccccgccccgcggggcgccacgggcgggtcttggcagcgcccactgagccagccgggccgcaggtgccgcccccgatacacggtgtcccgcccaagctgatccgcgtctgcggtcggtcggtgcgtgcgtgcgcctcgtcggtccgcgtgtctggccgagagcccccttcctctgcggccatgactccgccgccgccgccgccccctcccccgggccctgaccccgcggccgaccccgccgcggacccctgcccctggcccggatcactggtcgtcctcttcggggctacggcgggtgcgctgggacgggacctgggctcggacgagaccgacttaatcctcctagtttggcaagtggttgagccgcggagccgccaggtggggacgctgcacaaatcgctggttcgtgccgaggcggccgcactgagtacgcagtgccgcgaggcgagcggcctgagcgccgacagcctggcgcgggcagagccgctggacaaggtgctgcagcagttctcacagctggtgaacggggatgtggctttgctgggcgggggcccctacatgctctgcactgatgggcagcagctattgcgacaggtcctgcaccccgaggcctccaggaagaacctggtgctccccgacatgttcttctccttctatgacctccgaagagaattccatatgcagcatccaagcacctgccctgccagggacctcactgtggccaccatggcacagggtttaggactggagacagatgccacagaggatgactttggggtctgggaagtcaagacaatggtagctgttatcctccatctactcaaagagcccagcagtcaattgttttcgaagcccgaggtgataaagcagaaatacgagacggggccttgctctgacagcactgtgccctgcccctacagcagcaaggctgatgtggtggacagtgagactgtggtacgggctcgtgggttgccgtggcagtcatcagaccaggacgtggctcgcttcttcaaagggctcaacgtggccaggggtggtgtagcactctgcctcaacgcccagggccgcagaaatggcgaggccctcatccgctttgtggacagcgagcagcgggacctagcgctgcagagacacaagcaccacatgggcgtccgctatattgagagtatgtcgcgactggggtggcggatgtcaagttctacacaggcacagcaatggcgatgactcactgacttcatctc

SEQ ID NO: 285381 - DNA, 907 bp, Homo sapiens
ggccggtagccgccccgccccgcggggcgccacgggcgggtcttggcagcgcccactgagccagccgggccgcaggtgccgcccccgatacacggtgtcccgcccaagctgatccgcgtctgcggtcggtcggtgcgtgcgtgcgcctcgtcggtccgcgtgtctggccgagagcccccttcctctgcggccatgactccgccgccgccgccgccccctcccccgggccctgaccccgcggccgaccccgccgcggacccctgcccctggcccggatcactggtcgtcctcttcggggctacggcgggtgcgctgggacgggacctgggctcggacgagaccgacttaatcctcctagtttggcaagtggttgagccgcggagccgccaggtggggacgctgcacaaatcgctggttcgtgccgaggcggccgcactgagtacgcagtgccgcgaggcgagcggcctgagcgccgacagcctggcgcgggcagagccgctggacaaggtgctgcagcaggtgagcgccggggtgggtggcggcatggcctggacgtgaggacatttctgggcgggattggcggccggaggctaggcctggcgtgccgcaaccaaccggtccaggcggcaggactgggctcttgtttgaaactttgagcgactctcgcgtgtgcgtgcccctttcatccgcgcgtgccagccattcccctgggctccttacttttcaaccattgcaggaacctactcctaccgaagggatcgggacgcaggctttgggatccatccccagttcccgcccggggagcgaggccgagacgcctttgggagacctgctgggtcaggtctccctgagccgcagccggaagcgaaaggggtcgaggggcccatataggtcacctgtccttgcg

SEQ ID NO: 285382 - DNA, 835 bp, Homo sapiens
ggccggtagccgccccgccccgcggggcgccacgggcgggtcttggcagcgcccactgagccagccgggccgcaggtgccgcccccgatacacggtgtcccgcccaagctgatccgcgtctgcggtcggtcggtgcgtgcgtgcgcctcgtcggtccgcgtgtctggccgagagcccccttcctctgcggccatgactccgccgccgccgccgccccctcccccgggccctgaccccgcggccgaccccgccgcggacccctgcccctggcccggatcactggtcgtcctcttcggggctacggcgggtgcgctgggacgggacctgggctcggacgagaccgacttaatcctcctagtttggcaagtggttgagccgcggagccgccaggtggggacgctgcacaaatcgctggttcgtgccgaggcggccgcactgagtacgcagtgccgcgaggcgagcggcctgagcgccgacagcctggcgcgggcagagccgctggacaaggtgctgcagcagttctcacagctggtgaacggggatgtggctttgctgggcgggggcccctacatgctctgcactgatgggcagcagctattgcgacaggtcctgcaccccgaggcctccaggaagaacctggtgctccccgacatgttcttctccttctatgacctccgaagagaattccatatgcagcatccaagcacctgccctgccagggacctcactgtggccaccatggcacagggtatctgtgacccagcagggttagggtggagaagccactgtgggtacatgtgtctgagtatgtgcatgctgtgggtgggtaatatgg

SEQ ID NO: 285383 - DNA, 626 bp, Homo sapiens
ggggtctggttattggagtcggggcctcaggcagttgtcatttggggggtttattcatcaacatcatgtatctctgggttccattttatcaggttaaaatggagttaaaattcacagtgaacagataagaagacctcttcactgatttgtcagagttacaactcccaagcagctggagagcactaacgataaaaggaccaacccgcaactctggctttctgcctacacatccctgaagatctggcagcttctgtttgcatccttgtcataagacttcctcttccgttcagcaaaccttcctaagaagttacaatctcaaaggtcctacattccttttcactaatgtcatctgtccacagagaagtccacctgtggcaaactgctcttcataggcttgcctagtagagggtgatgggttctgtctttctaggtcaaggaactactttatttttgtcctgtaagcccttttcatcagttaaaaatatttttattaaggaattcatttaaaacataggctgggcacagcagctcatgcctgtcatcccagcactttgagaggtcgaggcaggtggatcacctgaggtcaggagtttgtgaccagtcagttgaccaacctggccaacatg

SEQ ID NO: 285384 - DNA, 681 bp, Homo sapiens
acgtaggaggatgtgatctgtgtcctatctggaatatcaaggggatgaaggcaatggaagtagctaccacttggtgacttagacaaactcttaatgtaaaaccaccatcagagccaccctggagttatggcaaggccaccacagtctcctccaaaggccactgatatggaactgggaacctccctccatagaatgctaaatggctgatgtgaacttggttaaggatctataattcttcttacgaagaaatattcaagcatctatgaagtagacaggatggtatcatgaatgcccccgtgcccctcaccagcttcaacaataatcaacttatgacttcacagctcctctacatccgcgctacttttcctctgctcccacactgctgtttttgtttgttggcttattaacaactttattaagacatatttcacatatcacaaaattgatccatttcaagtatataactcagtgatttctaataactttaccaagtgttgaaaccattgctataagtcaattttaggacatttccatccttccagtaatctcactcatgtccttttacagttaatgcccattcccgtctcccatcacaggcaaacattattaaaaatttaaataaaatagaatttacaattcagttcctcagtttctagccacatttcaattgctccactgggc

SEQ ID NO: 285385 - DNA, 352 bp, Homo sapiens
acgtaggaggatgtgatctgtgtcctatctggaatatcaaggggatgaaggcaatggaagtagctaccacttggtgacttagacaaactcttaatgtaaaaccaccatcagagccaccctggagttatggcaaggccaccacagtctcctccaaaggccactgatatggaactgggaacctccctccatagaatgctaaatggctgatgtgaacttggttaaggatctataattcttcttacgaagaggaaagttctggaagaccaaagaaaatatgtcatgaaatcaagccattaagaagttgtgactccaaaaaagtaaaagcgtgagctactgtacacacatgtatgtt

SEQ ID NO: 285386 - DNA, 581 bp, Homo sapiens
acgtaggaggatgtgatctgtgtcctatctggaatatcaaggggatgaaggcaatggaagtagctaccacttggtgacttagacaaactcttaatgtaaaaccaccatcagagccaccctggagttatggcaaggccaccacagtctcctccaaaggccactgatatggaactgggaacctccctccatagaatgctaaatggctgatgtgaacttggttaaggatctataattcttcttacgaaggttaaaatggagttaaaattcacagtgaacagataagaagacctcttcactgatttgtcagagttacaactcccaagcagctggagagcactaacgataaaaggaccaacccgcaactctggctttctgcctacacatccctgaagatctggcagcttctgtttgcatccttgtcataagacttcctcttccgttcagcaaaccttcctaagaagttacaatctcaaagaggaaagttctggaagaccaaagaaaatatgtcatgaaatcaagccattaagaagttgtgactccaaaaaagtaaaagcgtgagctactgtacacacatgtatgtt

SEQ ID NO: 285387 - DNA, 557 bp, Homo sapiens
tgtcttatttcaagcagaagttgccgccctaacttccaaatttggggactgaacatcgttcaccgaatacactttgtgatgttttaggtgatgaagtacctgctgccagagtttcccctgaaacacacaaagaagagtcttttacttgtgattcagttgtttcaggagttcttgactggccaatgtgcaaggattcatgtaagctgcttttcacttcttcttctggtcgttgtgattttgctggaggttttgataccactggactcttctgaatggtctggacatcagttggcgagagaaaggcactgaagaaattttcagattcatcgaccacagtcctccgaactggctttgtgattgctttaggagaggctattggtggactctgaggttcagtgtttgatttcaacccccaggttgaagtatcccatcctccactgacaggggaacttattcctttaacaaaaaagtaaatattaaaaaagaacacatatatgttacattaatatttcaatcatcattataaatcagtataaatataaatttagaaaaaatac

SEQ ID NO: 285388 - DNA, 760 bp, Homo sapiens
cgaggaggaggcggaggagacggcggctgttccagaggagggagtcgtcataaccggctactgccgctcaccggaaacctcgggcgcgggagctgggccagggggcgccaaggagcagctgggacaccttggccagccggcgccgtgggcgggctcgggccccgcagaggcaggaccgggactacacccaggagggccagggcgcggggcccgacgctcggagcggcttcagcccggcgagcggcctcgacccggcgagcgcagcagggaggggctcagagtcgaggaaccatctgcccttcctggcgttctcccgcgaacgttcgcgcgagtccgccagctccctcaccagggccggaaagaccgacggcacgtgccggcgccggacgcccatctccatcgcagcagcccgcgcctccttgagcgagagcgttaaagcgctcagaggatgttaggacggggtgggtagaaaacctgactcttcgtgtcttctgcgttgcactgaggtggatttttacttttgtcttatttcaagcagaagttgccgccctaacttccaaatttggggactgaacatcgttcaccgaatacactttgtgatggtgaggatactttggagtccacacacattttaaaagcagtatagttttacctatccgtaaactcatcaagttcaaatgctactctgtggagtttaatttttatggttttgttaatttactttattactgcttataattatttgaactcccatccccca

SEQ ID NO: 285389 - DNA, 781 bp, Homo sapiens
  misc_feature (161)..(161): n is a, c, g, or t
  misc_feature (239)..(239): n is a, c, g, or t
  misc_feature (268)..(268): n is a, c, g, or t
cttccaggcctcaaggtatagcgcgcgccctgcgggcgtgaaggtaactttatgacccgttatcctggttcggggttcggacagctgagtttgagaatggttgtataggccttccacgggacctcgatttcaggaccttgaattactcccaggacttcgtngtcttttggggactgcaaagctttagtgtttattttactagccatcccaggaggcaagtaggaaataactagttcagnttttttaacaacgaacttgattttatcanacactgcagcttccccaaccccgcgcacagcgggcactggtttcgggcctctctgtctcctacgaagtccccagagcaactcggatttgggaaatttctctctagcgttgcccaaacacacttgggtcggccgcgcgccctcaggacgtggacagggagggcttccccgtgtccaggaaagcgaccgggcattgcccccagtctcccccaaatttgggcattgtccccgggtcttccaacggactgggcgttgctcccggacactgaggactggccccggggtctcgctcaccttcagcagcgtccaccgcctgccacagagcgttcgatcgctcgctgcctgagctcctggtgcgcccgcggacgcagcctccagcttcgcggagatggtttccccagacccccaaattatcgtggtggcccccgagaccgaactcgcgtctatgcaagtccaacgcactgaggacggggtaaccattatccagatatttggggtgggccgcaaaggcgagc

SEQ ID NO: 285390 - DNA, 887 bp, Homo sapiens
tacttcataaactttaagatagttatgttttattcctggggaatacccctgagtgccaccctgcgattcgcgctcgagtagctgtgagaaaagccgcttcgtgtcgggggtcgactgttccctgctggccagctgtgggtgtggagccagtgactttgcctcttcacatcttggtgactccgtggctgtgtggacacaggattgcaggggcaggagtggaagcaagaagcctcctaaggagatggatgctggagctgtggtgagagggaaggggggccagggctgagaaggggtggagagaggtgggttgactaggacacatggcagagccggtgcgctggctgtatggagtgaggactaatggggaatcaaggacgtccagctgtggatggcagaagggccactgtctgaagtgggaagtctggacattcccaaaggagtctttgaaagactgggtcttctcctgagcctgagagcagtgcttcttccaatggcactgcttccattttaagcatcagcatggcccgggagcttgttggaatgaagaatctccagctccacccgaaacctgctgaatcagaaccagcatttaacacgtcaccaggatcccaggtcacttggctgtccttggctcaactgtgagtaaggaggagtcctgcggaatgaaaaatgactacccagatttgccaccaaaatccagcaggagtgccttagaaagcagggtaacatactcacaggatctgtggatcaggacgtgaacatctctggaagccattatctaccccacaccatctctctagcacttagtacacggcctgtacagagcagatgctcggcaaggatctggagaaagaaagaatgaatgaataaataaacaaagaaatcag

SEQ ID NO: 285391 - DNA, 421 bp, Homo sapiens
gtggtaggatcaagacactgttttctgttccagctcattttgcgaacaatgttatgtcacaggtcacttggctgtccttggctcaactgtgagtaaggaggagtcctgcggaatgaaaaatgactacccagatttgccaccaaaatccagcaggagtgccttagaaagcagagacgagaggacacagacacacagagacagcatgtgaagacaggcaagattgtgtgatgctgccacgagcccagggatgctgggaaccagaagctggaagagacaaggaaggattctccctctcagggttattgtggtgaccacagaatgcatttggaagtggctttgtaaactgcagagtgataagccaattcaatatttggagttgtgttttatcttccaaaggcctcagtaaacatttgtagaactg

SEQ ID NO: 285392 - DNA, 1754 bp, Homo sapiens
ttccggctcggccattgtttttggtctaacgggcagtagagtgtccggcttcggtgccgagtgccaccgcgagtgggccgagacgcggagggaggcgcggccggagctcgggtcgccgacgctggccaggaccgcgcttcttcccggcggcaggcggcgcggtccccgtgactctcagaagccgcccgatgtagagccgcttctttgtctcatacccctgaccattcgtgcgtggcacggagccgggtatctgcgggtacagcgatgaacagggcagacgtggccaggtgagcggcgctgctgaagcctggtttaacacgaaaggccacactaccatcacccctttctccaaccctgaaaaacagttcctgagacctgaactattgaccatcattttaatcggaccaactgcagctgtaacaagcttctctttggggtcacaatgaccactgcaggcaggggaaatttaggcctcatccccaggagcactgctttccagaagcaagaggggcgcctgactgtgaagcaggagccagcaaaccagacctgggggcagggcagcagtctccagaagaactatcctcctgtctgcgaaatcttccggctacacttcaggcaattgtgttaccacgagatgtctgggccgcaggaagcattgagccggcttcgggagctctgccgctggtggctcatgccagaggtgcacaccaaggagcagatcctggagctgctggtgcttgagcagttcctgagcatcctccctggggagctccggacctgggtgcagctgcatcaccctgagagtggtgaggaggctgtggctgtggtggaggatttccagagacacctcagtggatcagaggaggtttcagccccagcacagaaacaggaaatgcattttgaggagacaacagctctgggtacaacaaaggaatctcctcctacctcacccctcagtgggggctcagcccctggagcccacctggagcctccttatgacccagggacacaccacctccccagtggggacttcgctcaatgtacttctccagttcctacccttcctcaagtggggaactcaggagaccaagcaggggcaactgtacttcggatggtcaggccccaggatactgtggcatatgaggacctatctgtagactacactcagaagaaatggaaaagtctcacactcagtcagagagccctgcagtggaacatgatgccagaaaatcaccatagcatggcctccttgggctggagtacaatggcgtgatcttggctcacttcaatctccagctcccgagttcaagcgattctcctgcctcagactcctgagtagctgggattacaggcgcctgccaccatgcccagctaatttttgtaatatttagtagagacggggtttcaccatgttggccaggctggtttcgaactcctgacctcaggtgatccacccgcctcagcctcccaaagtggtgggattacaggcgtgagccaccacacccagcctattctttttaagtttcttgatgtagtggcagtagtcttgtgctcttcaggagagtgtcccgagttctacgtcccacatcaactgagggtgtgaacttgtggaggacttttgtctgaatctctttttcaatctctatacaatgtggcggagttgtgccacctacatgagccaatggagaagaaagctcctggtatactttaagtactcaacaatattaaatactgaatatttgtcaattgacgaa

SEQ ID NO: 285393 - DNA, 706 bp, Homo sapiens
cggccgctgcaaatgaccaattcttaagatatgtgaaaaaccattcagttgtagcaaacatcatacaccagagactttgtttgacatcagataaatcacacgggttagagaactttttggtttttagaggtcaaggaatcattcatcatgagcttccatattttgcacatatttctgaaaaatattcctgaagtggaaaagttttgttatacaacacatagttcctggtacatgagggaacccacgaaaaaaggtatcagtaaacagtgttacagaacttccaatttaatatatatatgttttagtcaaacagaattcaaacccaaggacagtttaggtggtggtcagacccagtgaaggtgctgggagtggtatacttactcacttacctcttaaacatgcaatgaaaatattctacagccaaacccttatcataaactccagccctggtcattcagcttctaaatgcagtaggaaatgtcaagagatggtggatgttaacaagttattgagtactgtcccatgttgggagacagttctgtcaagatgttgacctttttctggagtactacagagcgtgcattcctgaaaacctctaggggttagggacaggttgtgaatttgtcaattgtgaatacgcacatggtggcactataaaaagaattgaaagtaaatcccctatccctaacatcaggtcatgctctgc

SEQ ID NO: 285394 - DNA, 811 bp, Homo sapiens
ttccggctcggccattgtttttggtctaacgggcagtagagtgtccggcttcggtgccgagtgccaccgcgagtgggccgagacgcggagggaggcgcggccggagctcgggtcgccgacgctggccaggaccgcgcttcttcccggcggcaggcggcgcggtccccgtgactctcagaagccgcccgatgtagagccgcttctttgtctcatacccctgaccattcgtgcgtggcacggagccgggtatctgcgggtacagcgatgaacagggcagacgtggccaggccacactaccatcacccctttctccaaccctgaaaaacagttcctgagacctgaactattgaccatcattttaatcggaccaactgcagctgtaacaagcttctctttggggtcacaatgaccactgcaggcaggggaaatttaggcctcatccccaggagcactgctttccagaagcaagaggggcgcctgactgtgaagcaggagccagcaaaccagacctgggggcagggcagcagtctccagaagaactatcctcctgtctgcgaaatcttccggctacacttcaggcaattgtgttaccacgagatgtctgggccgcaggaagcattgagccggcttcgggagctctgccgctggtggctcatgccagaggtgcacaccaaggagcagatcctggagctgctggtgcttgagcagttcctgagcatcctccctggggagctccggacctgggtgcagctgcatcaccccttgaaaaattgttaaagaaagcttgttggctttttgttggaaagaattt

SEQ ID NO: 285395 - DNA, 3499 bp, Homo sapiens
  misc_feature (2435)..(2435): n is a, c, g, or t
ttccggctcggccattgtttttggtctaacgggcagtagagtgtccggcttcggtgccgagtgccaccgcgagtgggccgagacgcggagggaggcgcggccggagctcgggtcgccgacgctggccaggaccgcgcttcttcccggcggcaggcggcgcggtccccgtgactctcagaagccgcccgatgtagagccgcttctttgtctcatacccctgaccattcgtgcgtggcacggagccgggtatctgcgggtacagcgatgaacagggcagacgtggccaggtgagcggcgctgctgaagcctggtttaacacgaaaggccacactaccatcacccctttctccaaccctgaaaaacagttcctgagacctgaactattgaccatcattttaatcggaccaactgcagctgtaacaagcttctctttggggtcacaatgaccactgcaggcaggggaaatttaggcctcatccccaggagcactgctttccagaagcaagaggggcgcctgactgtgaagcaggagccagcaaaccagacctgggggcagggcagcagtctccagaagaactatcctcctgtctgcgaaatcttccggctacacttcaggcaattgtgttaccacgagatgtctgggccgcaggaagcattgagccggcttcgggagctctgccgctggtggctcatgccagaggtgcacaccaaggagcagatcctggagctgctggtgcttgagcagttcctgagcatcctccctggggagctccggacctgggtgcagctgcatcaccctgagagtggtgaggaggctgtggctgtggtggaggatttccagagacacctcagtggatcagaggaggtttcagccccagcacagaaacaggaaatgcattttgaggagacaacagctctgggtacaacaaaggaatctcctcctacctcacccctcagtgggggctcagcccctggagcccacctggagcctccttatgacccagggacacaccacctccccagtggggacttcgctcaatgtacttctccagttcctacccttcctcaagtggggaactcaggagaccaagcaggggcaactgtacttcggatggtcaggccccaggatactgtggcatatgaggacctatctgtagactacactcagaagaaatggaaaagtctcacactcagtcagagagccctgcagtggaacatgatgccagaaaatcaccatagcatggcctccttggaggtgagaacatgatgaagggttcagagttgactccaaagcaggaattttttaaaggatcagagtcatctaacaggacatcagggggactctttggggtggttcctggggcagcagagactggagatgtttgtgaagatactttcaaggagttagaaggacaaacctcagatgaagaagggagcagactagaaaatgatttcttggaaataacagatgaagataagaaaaaatccacaaaagacagatatgacaaatataaggaagttggggaacatccacctctgtcttccagtcctgttgaacatgaaggagttttaaagggacagaaatcctatcgatgtgatgaatgtggcaaagctttcaatcggagttctcaccttattggccatcagagaatccacactggagagaaaccctatgagtgtaatgagtgtgggaagaccttcaggcaaacctcccagctcattgttcatctcagaacccacacaggggaaaaaccctatgaatgcagtgagtgtggaaaggcctataggcacagctcccatctcattcaacaccagagactccataatggggagaaaccctataaatgtaatgaatgtgcaaaagcctttactcagagttcccgactcattgaccaccagagaacccatactggggagaaaccttatgaatgcaatgagtgtggagaggcattcattcgaagcaaaagtcttgctcgacatcaggtcctgcacactggtaagaaaccttacaaatgcaatgagtgtgggagagcattctgttccaatagaaatctcattgaccatcagagaatccacactggggagaagccttatgagtgtagtgaatgtggcaaagccttcagtcggagtaaatgtcttattcgacatcagagcctccatactggggaaaagccatacaaatgtagtgaatgtgggaaagccttcaatcagaactctcaactcattgagcatgagcgaattcatactggagaaaaaccttttgaatgtagcgagtgtggtaaggcatttggtctgagtaaatgtcttattcggcaccagagacttcacacgggtgaaaagccctataaatgcaatgagtgtggaaaatccttcaatcaaaactcacaccttattatacaccagagaattcacactggtgagaaaccctatgaatntaatgagtgtgggaaggtattcagttatagctccagccttatggtacatcagagaacccatactggggaaaaaccctataaatgcaatgattgtgggaaagcttttagtgacagctcacagcttattgtacaccagagagtccacaccggagagaaaccttatgaatgtagtgaatgtgggaaagcctttagtcagcgttccacttttaatcaccaccagcgaactcacactggagagaagtcctcaggtctggcttggtcagtttcttaaggtatggttctctgagacagagagcaacgacctttgagttaagctgtctttataagcaggatgctcatagtggtttcccggagccagtagtcacggtggaccattccctacttgctttttccttggatcactaaggtgggagagtaggagtaacttattccagttcttacccattattaggaaggtaaggactacacatgtcattgaattgtaggtttcctttttttttctttacttttaaattttaacttttaaaatctatttcatttcttagttatgcatctcataatcagactccatgctttttaaagacagagataatatcttctctattctattctacttcctccatttcaccatttatacaaagtcattcaaaaaggctgattcatgccttcctgcctcttggctatggccctccccatctactctttaaactttaatctataacttttcatcagttttgttccctatctagaaaacattttcttctgtttgctaatctttgtccctcacaatttttgaaatccatctcatcactgaaatactttcttcttcaagtacttttttatttttcttcaacttctcttgatttgacctcagtgctttgaattcactggtgctacaatatgtaactgtggttaattgccttgtaaattttgcgtgtctgtatacttttataccaacttattgtaggctctttgaggtcaggtatgtatttctttcccatatagatagtattttgtacataccagttgttaaataaataatttttaaaatcaaaaaactcaca

SEQ ID NO: 285396 - DNA, 3462 bp, Homo sapiens
  misc_feature (2398)..(2398): n is a, c, g, or t
ttccggctcggccattgtttttggtctaacgggcagtagagtgtccggcttcggtgccgagtgccaccgcgagtgggccgagacgcggagggaggcgcggccggagctcgggtcgccgacgctggccaggaccgcgcttcttcccggcggcaggcggcgcggtccccgtgactctcagaagccgcccgatgtagagccgcttctttgtctcatacccctgaccattcgtgcgtggcacggagccgggtatctgcgggtacagcgatgaacagggcagacgtggccaggccacactaccatcacccctttctccaaccctgaaaaacagttcctgagacctgaactattgaccatcattttaatcggaccaactgcagctgtaacaagcttctctttggggtcacaatgaccactgcaggcaggggaaatttaggcctcatccccaggagcactgctttccagaagcaagaggggcgcctgactgtgaagcaggagccagcaaaccagacctgggggcagggcagcagtctccagaagaactatcctcctgtctgcgaaatcttccggctacacttcaggcaattgtgttaccacgagatgtctgggccgcaggaagcattgagccggcttcgggagctctgccgctggtggctcatgccagaggtgcacaccaaggagcagatcctggagctgctggtgcttgagcagttcctgagcatcctccctggggagctccggacctgggtgcagctgcatcaccctgagagtggtgaggaggctgtggctgtggtggaggatttccagagacacctcagtggatcagaggaggtttcagccccagcacagaaacaggaaatgcattttgaggagacaacagctctgggtacaacaaaggaatctcctcctacctcacccctcagtgggggctcagcccctggagcccacctggagcctccttatgacccagggacacaccacctccccagtggggacttcgctcaatgtacttctccagttcctacccttcctcaagtggggaactcaggagaccaagcaggggcaactgtacttcggatggtcaggccccaggatactgtggcatatgaggacctatctgtagactacactcagaagaaatggaaaagtctcacactcagtcagagagccctgcagtggaacatgatgccagaaaatcaccatagcatggcctccttggaggtgagaacatgatgaagggttcagagttgactccaaagcaggaattttttaaaggatcagagtcatctaacaggacatcagggggactctttggggtggttcctggggcagcagagactggagatgtttgtgaagatactttcaaggagttagaaggacaaacctcagatgaagaagggagcagactagaaaatgatttcttggaaataacagatgaagataagaaaaaatccacaaaagacagatatgacaaatataaggaagttggggaacatccacctctgtcttccagtcctgttgaacatgaaggagttttaaagggacagaaatcctatcgatgtgatgaatgtggcaaagctttcaatcggagttctcaccttattggccatcagagaatccacactggagagaaaccctatgagtgtaatgagtgtgggaagaccttcaggcaaacctcccagctcattgttcatctcagaacccacacaggggaaaaaccctatgaatgcagtgagtgtggaaaggcctataggcacagctcccatctcattcaacaccagagactccataatggggagaaaccctataaatgtaatgaatgtgcaaaagcctttactcagagttcccgactcattgaccaccagagaacccatactggggagaaaccttatgaatgcaatgagtgtggagaggcattcattcgaagcaaaagtcttgctcgacatcaggtcctgcacactggtaagaaaccttacaaatgcaatgagtgtgggagagcattctgttccaatagaaatctcattgaccatcagagaatccacactggggagaagccttatgagtgtagtgaatgtggcaaagccttcagtcggagtaaatgtcttattcgacatcagagcctccatactggggaaaagccatacaaatgtagtgaatgtgggaaagccttcaatcagaactctcaactcattgagcatgagcgaattcatactggagaaaaaccttttgaatgtagcgagtgtggtaaggcatttggtctgagtaaatgtcttattcggcaccagagacttcacacgggtgaaaagccctataaatgcaatgagtgtggaaaatccttcaatcaaaactcacaccttattatacaccagagaattcacactggtgagaaaccctatgaatntaatgagtgtgggaaggtattcagttatagctccagccttatggtacatcagagaacccatactggggaaaaaccctataaatgcaatgattgtgggaaagcttttagtgacagctcacagcttattgtacaccagagagtccacaccggagagaaaccttatgaatgtagtgaatgtgggaaagcctttagtcagcgttccacttttaatcaccaccagcgaactcacactggagagaagtcctcaggtctggcttggtcagtttcttaaggtatggttctctgagacagagagcaacgacctttgagttaagctgtctttataagcaggatgctcatagtggtttcccggagccagtagtcacggtggaccattccctacttgctttttccttggatcactaaggtgggagagtaggagtaacttattccagttcttacccattattaggaaggtaaggactacacatgtcattgaattgtaggtttcctttttttttctttacttttaaattttaacttttaaaatctatttcatttcttagttatgcatctcataatcagactccatgctttttaaagacagagataatatcttctctattctattctacttcctccatttcaccatttatacaaagtcattcaaaaaggctgattcatgccttcctgcctcttggctatggccctccccatctactctttaaactttaatctataacttttcatcagttttgttccctatctagaaaacattttcttctgtttgctaatctttgtccctcacaatttttgaaatccatctcatcactgaaatactttcttcttcaagtacttttttatttttcttcaacttctcttgatttgacctcagtgctttgaattcactggtgctacaatatgtaactgtggttaattgccttgtaaattttgcgtgtctgtatacttttataccaacttattgtaggctctttgaggtcaggtatgtatttctttcccatatagatagtattttgtacataccagttgttaaataaataatttttaaaatcaaaaaactcaca

SEQ ID NO: 285397 - DNA, 3370 bp, Homo sapiens
  misc_feature (2306)..(2306): n is a, c, g, or t
ttccggctcggccattgtttttggtctaacgggcagtagagtgtccggcttcggtgccgagtgccaccgcgagtgggccgagacgcggagggaggcgcggccggagctcgggtcgccgacgctggccaggaccgcgcttcttcccggcggcaggcggcgcggtccccgtgactctcagaagccgcccgatgtagagccgcttctttgtctcatacccctgaccattcgtgcgtggcacggagccgggtatctgcgggtacagcgatgaacagggcagacgtggccaggccacactaccatcacccctttctccaaccctgaaaaacagttcctgagacctgaactattgaccatcattttaatcggaccaactgcagctgtaacaagcttctctttggggtcacaatgaccactgcaggcaggggaaatttaggcctcatccccaggagcactgctttccagaagcaagaggggcgcctgactgtgaagcaggagccagcaaaccagacctgggggcagggcagcagtctccagaagaactatcctcctgtctgcgaaatcttccggctacacttcaggcaattgtgttaccacgagatgtctgggccgcaggaagcattgagccggcttcgggagctctgccgctggtggctcatgccagaggtgcacaccaaggagcagatcctggagctgctggtgcttgagcagttcctgagcatcctccctggggagctccggacctgggtgcagctgcatcaccctgagagtggtgaggaggctgtggctgtggtggaggatttccagagacacctcagtggatcagaggaggtttcagccccagcacagaaacaggaaatgcattttgaggagacaacagctctgggtacaacaaaggaatctcctcctacctcacccctcagtgggggctcagcccctggagcccacctggagcctccttatgacccagggacacaccacctccccagtggggacttcggatactgtggcatatgaggacctatctgtagactacactcagaagaaatggaaaagtctcacactcagtcagagagccctgcagtggaacatgatgccagaaaatcaccatagcatggcctccttggaggtgagaacatgatgaagggttcagagttgactccaaagcaggaattttttaaaggatcagagtcatctaacaggacatcagggggactctttggggtggttcctggggcagcagagactggagatgtttgtgaagatactttcaaggagttagaaggacaaacctcagatgaagaagggagcagactagaaaatgatttcttggaaataacagatgaagataagaaaaaatccacaaaagacagatatgacaaatataaggaagttggggaacatccacctctgtcttccagtcctgttgaacatgaaggagttttaaagggacagaaatcctatcgatgtgatgaatgtggcaaagctttcaatcggagttctcaccttattggccatcagagaatccacactggagagaaaccctatgagtgtaatgagtgtgggaagaccttcaggcaaacctcccagctcattgttcatctcagaacccacacaggggaaaaaccctatgaatgcagtgagtgtggaaaggcctataggcacagctcccatctcattcaacaccagagactccataatggggagaaaccctataaatgtaatgaatgtgcaaaagcctttactcagagttcccgactcattgaccaccagagaacccatactggggagaaaccttatgaatgcaatgagtgtggagaggcattcattcgaagcaaaagtcttgctcgacatcaggtcctgcacactggtaagaaaccttacaaatgcaatgagtgtgggagagcattctgttccaatagaaatctcattgaccatcagagaatccacactggggagaagccttatgagtgtagtgaatgtggcaaagccttcagtcggagtaaatgtcttattcgacatcagagcctccatactggggaaaagccatacaaatgtagtgaatgtgggaaagccttcaatcagaactctcaactcattgagcatgagcgaattcatactggagaaaaaccttttgaatgtagcgagtgtggtaaggcatttggtctgagtaaatgtcttattcggcaccagagacttcacacgggtgaaaagccctataaatgcaatgagtgtggaaaatccttcaatcaaaactcacaccttattatacaccagagaattcacactggtgagaaaccctatgaatntaatgagtgtgggaaggtattcagttatagctccagccttatggtacatcagagaacccatactggggaaaaaccctataaatgcaatgattgtgggaaagcttttagtgacagctcacagcttattgtacaccagagagtccacaccggagagaaaccttatgaatgtagtgaatgtgggaaagcctttagtcagcgttccacttttaatcaccaccagcgaactcacactggagagaagtcctcaggtctggcttggtcagtttcttaaggtatggttctctgagacagagagcaacgacctttgagttaagctgtctttataagcaggatgctcatagtggtttcccggagccagtagtcacggtggaccattccctacttgctttttccttggatcactaaggtgggagagtaggagtaacttattccagttcttacccattattaggaaggtaaggactacacatgtcattgaattgtaggtttcctttttttttctttacttttaaattttaacttttaaaatctatttcatttcttagttatgcatctcataatcagactccatgctttttaaagacagagataatatcttctctattctattctacttcctccatttcaccatttatacaaagtcattcaaaaaggctgattcatgccttcctgcctcttggctatggccctccccatctactctttaaactttaatctataacttttcatcagttttgttccctatctagaaaacattttcttctgtttgctaatctttgtccctcacaatttttgaaatccatctcatcactgaaatactttcttcttcaagtacttttttatttttcttcaacttctcttgatttgacctcagtgctttgaattcactggtgctacaatatgtaactgtggttaattgccttgtaaattttgcgtgtctgtatacttttataccaacttattgtaggctctttgaggtcaggtatgtatttctttcccatatagatagtattttgtacataccagttgttaaataaataatttttaaaatcaaaaaactcaca

SEQ ID NO: 285398 - DNA, 912 bp, Homo sapiens
ttccggctcggccattgtttttggtctaacgggcagtagagtgtccggcttcggtgccgagtgccaccgcgagtgggccgagacgcggagggaggcgcggccggagctcgggtcgccgacgctggccaggaccgcgcttcttcccggcggcaggcggcgcggtccccgtgactctcagaagccgcccgatgtagagccgcttctttgtctcatacccctgaccattcgtgcgtggcacggagccgggtatctgcgggtacagcgatgaacagggcagacgtggccaggtgagcggcgctgctgaagcctggtttaacacgaaaggccacactaccatcacccctttctccaaccctgaaaaacagttcctgagacctgaactattgaccatcattttaatcggaccaactgcagctgtaacaagcttctctttggggtcacaatgaccactgcaggcaggggaaatttaggcctcatccccaggagcactgctttccagaagcaagaggggcgcctgactgtgaagcaggagccagcaaaccagacctgggggcagggcagcagtctccagaagaactatcctcctgtctgcgaaatcttccggctacacttcaggcaattgtgttaccacgagatgtctgggccgcaggaagcattgagccggcttcgggagctctgccgctggtggctcatgccagaggtgcacaccaaggagcagatcctggagctgctggtgcttgagcagttcctgagcatcctccctggggagctccggacctgggtgcagctgcatcaccctgagagtggtgaggaggctgtggctgtggtggaggatttccagagacacctcagtggatcagaggaggtgagcagttgagtctagaatggcggcctgatgcttctctaatgctt

SEQ ID NO: 285399 - DNA, 1298 bp, Homo sapiens
ttccggctcggccattgtttttggtctaacgggcagtagagtgtccggcttcggtgccgagtgccaccgcgagtgggccgagacgcggagggaggcgcggccggagctcgggtcgccgacgctggccaggaccgcgcttcttcccggcggcaggcggcgcggtccccgtgactctcagaagccgcccgatgtagagccgcttctttgtctcatacccctgaccattcgtgcgtggcacggagccgggtatctgcgggtacagcgatgaacagggcagacgtggccaggtgagcggcgctgctgaagcctggtttaacacgaaaggccacactaccatcacccctttctccaaccctgaaaaacagttcctgagacctgaactattgaccatcattttaatcggaccaactgcagctgtaacaagcttctctttggggtcacaatgaccactgcaggcaggggaaatttaggcctcatccccaggagcactgctttccagaagcaagaggggcgcctgactgtgaagcaggagccagcaaaccagacctgggggcagggcagcagtctccagaagaactatcctcctgtctgcgaaatcttccggctacacttcaggcaattgtgttaccacgagatgtctgggccgcaggaagcattgagccggcttcgggagctctgccgctggtggctcatgccagaggtgcacaccaaggagcagatcctggagctgctggtgcttgagcagttcctgagcatcctccctggggagctccggacctgggtgcagctgcatcaccctgagagtggtgaggaggctgtggctgtggtggaggatttccagagacacctcagtggatcagaggaggtttcagccccagcacagaaacaggaaatgcattttgaggagacaacagctctgggtacaacaaaggaatctcctcctacctcacccctcagtgggggctcagcccctggagcccacctggagcctccttatgacccagggacacaccacctccccagtggggacttcgctcaatgtacttctccagttcctacccttcctcaagtggggaactcaggagaccaagcaggggcaactgtacttcggatggtcaggccccaggatactgtggcatatgaggacctatctgtagactacactcagaagaaatggaaaagtctcacactcagtcagagagccctgcagtggaacatgatgccagaaaatcaccatagcatggcctccttgggtaatgattctgtttcctagtcacttaaagtctgcatgctgcaaa

SEQ ID NO: 285400 - DNA, 618 bp, Homo sapiens
cggccgctgcaaatgaccaattcttaagatatgtgaaaaaccattcagttgtagcaaacatcatacaccagagactttgtttgacatcagataaatcacacgggttagagaactttttggtttttagaggtcaaggaatcattcatcatgagcttccatattttgcacatatttctgaaaaatattcctgaagtggaaaagttttgttatacaacacatagttcctggtacatgagggaacccacgaaaaaaggctggagtacaatggcgtgatcttggctcacttcaatctccagctcccgagttcaagcgattctcccgcctcagcctcccaaagtggtgggattacaggcgtgagccaccacacccagcctattctttttaagtttcttgatgtagtggcagtagtcttgtgctcttcaggagagtgtcccgagttctacgtcccacatcaactgagggtgtgaacttgtggaggacttttgtctgaatctctttttcaatctctatacaatgtggcggagttgtgccacctacatgagccaatggagaagaaagctcctggtatactttaagtactcaacaatattaaatactgaatatttgtcaattgacgaa

SEQ ID NO: 285401 - DNA, 299 bp, Homo sapiens
actggtgagtaaggctgcggctatagcagccacaaccgtcagtaatgaacactccctcacacggagcacttcctcacccggagcactccctaacacagagcacttcctaacagaacacttcatcacacggagcacttcctctaacacggagcacttcctctaacacaggacacttcctcacacggaacacttcctcacacggagcacttcctgtaacaggacacttcctcacacggagcacttcctctaacatggagcacttcctgtaacacaggacacttcctcacacggagcacttc

SEQ ID NO: 285402 - DNA, 1444 bp, Homo sapiens
ccggggcaccggcggtgggcggggccagcagcgcaaactgcctgcagcggggaccggacctgcacaggccgcctatggcgggcggcgggtgggaccgcgagttacagccggccaactggggccagccaggagcctgagggtcggaagcccccaacacaagatgctgagctccttcctgagcccccagaatggcacctgggcagacaccttctctctgctcttggctcttgccgttgccctctacttgggctactactgggcatgtgtgcttcagaggcctcggctggtggctgggccgcagtttctggccttcctggagccacactgttccatcaccaccgagactttctacccaacgctgtggtgttttgaggggcgactacaaagcatcttccaagtcctcctgcagtctcagcccctagtcctttatcagagtgacatcctccaaacaccagatggaggccagctcctgctagactgggccaagcagcctgacagcagccaagaccctgatcctactacccagcccattgtgctgctgcttcctggcatcactggcagtagccaggagacatacgtcttgcacctagttaaccaagctctgagggatggctaccaggctgtcgtgtttaacaaccggggctgccgtggggaggaactgcggacccacagggctttttgtgccagcaatactgaagatctagagacagtcgtgaaccacataaagcatcgttatccccaagctccactgctggccgtgggcatctcttttggagggatactggtgctgaatcacctggcacaggccaggcaggctgcagggctggtggcagcactgactctgtctgcatgctgggattcctttgagaccactcgctccctggaaaccccactcaactcactgctcttcaatcagcccctcactgctgggctctgccaacttgtggaacgaaacagaaaggtgattgaaaaggtggtggacatagactttgtactacaggcccgtacaatccgccagtttgatgagcgctacacatctgtggcctttggatatcaagactgtgttacctactacaaagcagcaagccctagaaccaagatagatgccatccggatccctgtgctctatctcagtgcagcagatgaccccttctcccccgtctgtgcccttcccatacaggccgcccaacactccccctacgttgcgctgctcatcacagcccggggtggccacatcggcttcctggaagggctgctcccgtggcagcactggtacatgagccgcctcttgcatcagtacgccaaagccatcttccaggacccagaggggctgcctgacctcagggctctcttaccttctgaggacagaaacagctgacaagagtaccatttggggtctcagttcactctttccttgtttattaaatatcaacttttcctgcct

SEQ ID NO: 285403 - DNA, 803 bp, Homo sapiens
ccggggcaccggcggtgggcggggccagcagcgcaaactgcctgcagcggggaccggacctgcacaggccgcctatggcgggcggcgggtgggaccgcgagttacagccggccaactggggccagccaggagcctgagggtcggaagcccccaacacaagatgctgagctccttcctgagcccccagaatggcacctgggcagacaccttctctctgctcttggctcttgccgttgccctctacttgggctactactgggcatgtgtgcttcagaggcctcggctggtggctgggccgcagtttctggccttcctggagccacactgttccatcaccaccgagactttctacccaacgctgtggtgttttgaggggcgactacaaagcatcttccaagtcctcctgcagtctcagcccctagtcctttatcagagtgacatcctccaaacaccagatggaggccagctcctgctagactgggccaagcagcctgacagcagccaagaccctgatcctactacccagcccattgtgctgctgcttcctggcatcactggcagtagccaggagacatacgtcttgcacctagttaaccaagctctgagggatggctaccagtaaggatgggtgcagccccagagtggggtggcatctgagaacgtgtattagggagaagtcaatccggacactgatagataagaagaatgctacacaaagggagtctttggacaggggtctttctgaatactgaaaggggagaggggctaagaagggtctggctaagatgtacctgtgtgtgcca

SEQ ID NO: 285404 - DNA, 1380 bp, Homo sapiens
ccggggcaccggcggtgggcggggccagcagcgcaaactgcctgcagcggggaccggacctgcacaggccgcctatggcgggcggcgggtgggaccgcgagttacagccggccaactggggccagccaggagcctgagggtcggaagcccccaacacaagatgctgagctccttcctgagcccccagaatggcacctgggcagacaccttctctctgctcttggctcttgccgttgccctctacttgggctactactgggcatgtgtgcttcagtgacatcctccaaacaccagatggaggccagctcctgctagactgggccaagcagcctgacagcagccaagaccctgatcctactacccagcccattgtgctgctgcttcctggcatcactggcagtagccaggagacatacgtcttgcacctagttaaccaagctctgagggatggctaccaggctgtcgtgtttaacaaccggggctgccgtggggaggaactgcggacccacagggctttttgtgccagcaatactgaagatctagagacagtcgtgaaccacataaagcatcgttatccccaagctccactgctggccgtgggcatctcttttggagggatactggtgctgaatcacctggcacaggccaggcaggctgcagggctggtggcagcactgactctgtctgcatgctgggattcctttgagaccactcgctccctggaaaccccactcaactcactgctcttcaatcagcccctcactgctgggctctgccaacttgtggaacgaaacagaaaggtgattgaaaaggtggtggacatagactttgtactacaggtataatattcagccatgcccctggttcccccaaatgagtcttccactatcttcctattctttatcatcttagcctatcctatggtaagacctgcaggcccgtacaatccgccagtttgatgagcgctacacatctgtggcctttggatatcaagactgtgttacctactacaaagcagcaagccctagaaccaagatagatgccatccggatccctgtgctctatctcagtgcagcagatgaccccttctcccccgtctgtgcccttcccatacaggccgcccaacactccccctacgttgcgctgctcatcacagcccggggtggccacatcggcttcctggaagggctgctcccgtggcagcactggtacatgagccgcctcttgcatcagtacgccaaagccatcttccaggacccagaggggctgcctgacctcagggctctcttaccttctgaggacagaaacagctgacaagagtaccatttggggtctcagttcactctttccttgtttattaaatatcaacttttcctgcct

SEQ ID NO: 285405 - DNA, 1591 bp, Homo sapiens
ccggggcaccggcggtgggcggggccagcagcgcaaactgcctgcagcggggaccggacctgcacaggccgcctatggcgggcggcgggtgggaccgcgagttacagccggccaactggggccagccaggagcctgagggtcggaagcccccaacacaagatgctgagctccttcctgagcccccagaatggcacctgggcagacaccttctctctgctcttggctcttgccgttgccctctacttgggctactactgggcatgtgtgcttcagtgacatcctccaaacaccagatggaggccagctcctgctagactgggccaagcagcctgacagcagccaagaccctgatcctactacccagcccattgtgctgctgcttcctggcatcactggcagtagccaggagacatacgtcttgcacctagttaaccaagctctgagggatggctaccaggctgtcgtgtttaacaaccggggctgccgtggggaggaactgcggacccacagggctttttgtgccagcaatactgaagatctagagacagtcgtgaaccacataaagcatcgttatccccaagctccactgctggccgtgggcatctcttttggagggatactggtgctgaatcacctggcacaggccaggcaggctgcagggctggtggcagcactgactctgtctgcatgctgggattcctttgagaccactcgctccctggaaaccccactcaactcactgctcttcaatcagcccctcactgctgggctctgccaacttgtggaacgaaacagaaaggtgattgaaaaggtggtggacatagactttgtactacaggtataatattcagccatgcccctggttcccccaaatgagtcttccactatcttcctattctttatcatcttagcctatcctatggtaagacctgcaggcccgtacaatccgccagtttgatgagcgctacacatctgtggcctttggatatcaagactgtgttacctactacaaagcagcaagccctagaaccaagatagatgccatccggatccctgtgctctatctcagtgcagcagatgaccccttctcccccgtctgtgcccttcccatacaggccgcccaacactccccctacgttgcgctgctcatcacagcccggggtggccacatcggcttcctggaagggctgctcccgtggcagcactggtacatgagccgcctcttgcatcagtacgccaaagccatcttccaggacccagaggggctgcctgacctcagggctctcttaccttctgaggacagaaacagctgacaagagtaccatttggggtctcagttcactctttccttgtttattaaatatcaacttttcctgcctaatgggctgaggttcattttcccattcctcaaggtaagggtagactacctaggaacttattgcatctttaggccagctggcttagtgctacccatctgaacccccagattactacccaagtcttccttttgccccttcctgccctaacagcaagtaccaggccagtcccttccccagcaaatgccaggggcttcatgtgaagaggaactgg

SEQ ID NO: 285406 - DNA, 1212 bp, Homo sapiens
ccggggcaccggcggtgggcggggccagcagcgcaaactgcctgcagcggggaccggacctgcacaggccgcctatggcgggcggcgggtgggaccgcgagttacagccggccaactggggccagccaggagcctgagggtcggaagcccccaacacaagatgctgagctccttcctgagcccccagaatggcacctgggcagacaccttctctctgctcttggctcttgccgttgccctctacttgggctactactgggcatgtgtgcttcagtgacatcctccaaacaccagatggaggccagctcctgctagactgggccaagcagcctgacagcagccaagaccctgatcctactacccagcccattgtgctgctgcttcctggcatcactggcagtagccaggagacatacgtcttgcacctagttaaccaagctctgagggatggctaccaacccacagggctttttgtgccagcaatactgaagatctagagacagtcgtgaaccacataaagcatcgttatccccaagctccactgctggccgtgggcatctcttttggagggatactggtgctgaatcacctggcacaggccaggcaggctgcagggctggtggcagcactgactctgtctgcatgctgggattcctttgagaccactcgctccctggaaaccccactcaactcactgctcttcaatcagcccctcactgctgggctctgccaacttgtggaacgcctatcctatggtaagacctgcaggcccgtacaatccgccagtttgatgagcgctacacatctgtggcctttggatatcaagactgtgttacctactacaaagcagcaagccctagaaccaagatagatgccatccggatccctgtgctctatctcagtgcagcagatgaccccttctcccccgtctgtgcccttcccatacaggccgcccaacactccccctacgttgcgctgctcatcacagcccggggtggccacatcggcttcctggaagggctgctcccgtggcagcactggtacatgagccgcctcttgcatcagtacgccaaagccatcttccaggacccagaggggctgcctgacctcagggctctcttaccttctgaggacagaaacagctgacaagagtaccatttggggtctcagttcactctttccttgtttattaaatatcaacttttcctgcct

SEQ ID NO: 285407 - DNA, 589 bp, Homo sapiens
acctgcacaggccgcctatggcgggcggcgggtgggaccgcgagttacagccggccaactggggccagccaggagcctgagggtcggaagcccccaacacaagatgctgagctccttcctgagcccccagaatggcacctgggcagacaccttctctctgctcttggctcttgccgttgccctctacttgggctactactgggcatgtgtgcttcaggtgggtgcgggtccaccgctctggccagcgggtttgggtgtagggggcagcttccagacacgggcttgggcccttggtgggaactgggatggttgggcttccccacaggtgaaatttgctaccaccgaatggagagtcggctctgcctctctagtgcctctgcatcccatgtgatccccatgccagctgggccttttgggtaccggagggtgctgctccctataatgtggacaagcatttggggaaaggtggggtggaaggcatcctgaggtatcagagatgtgcacactttgcgttcctttttaggtggtttagctgagtctttcagctgcactgaaggaaggaaccagaggtctgtgggtcatggctaac

SEQ ID NO: 285408 - DNA, 932 bp, Homo sapiens
tcagtttttgctaaatattgtctttctttattcacagatgatagtcaatgggcacaacatataagtagttacaatgaaatgagaagcaatatagcagtcaggctatatgcatgatttaacaacaaaattatcacttccttttaatttagaataagggacaatttaaaaagcatctcttggccctatcatttctgttccagtagttagtgttcatatgtgaatactaagtttgacattcctttctcccatagaaccattttggtgatttggatggtggccactacactgctttctgcaagaattcagtcacccaggcctgatatagctttgataacacacgagtcagtgagattccagatacttctgttcaaaatgctatggatctcctgttctatagctgccagcccttttccataccaatacaaaagcgttaagagccaggaaaatggtgtttcctgaacactgcaaaacaagcagtcagcatctggtggtagagttttgcttggtcattaaactcttagaacttacttgcatcattaacatttttatgccttgtgggcatgttatacaacctttcatcttaagataaatctgtcgtccagaagatgggtcttggttcactaaaaaaggcagtgtgaatataatgcaatgctaatggatgcaggccttcaaaacactgcaattatatagtgagttcaggtttcaaaattcagtgtttatcagaaaatatctcataatcatatatattcaacaaattattttccaaagatactcatgaagctaaacaaaaataatttttgttcaaatggctcgatgagtttaagaatatgatttgaatatatttgatataataatttagccaagaagtggtctcttagactaattgtaaaacatgaaaagttgtcagcttcacaatttgaaccccatccttt

SEQ ID NO: 285409 - DNA, 968 bp, Homo sapiens
ttccttaacaggactgtctccaatgtttttttcaacaagacgcactgacctggaacaacgaaattcactgctccttttgtgaaaccaagcaagaaactgctgtgagggccagtatttccaaagcaccaaaaataattattttccacctaaaaaggtttgacattcagggtacaacaaaaaggaagctgagaacggatattcattacccactcactaacttggacctcactccttatatttgctcaattttccggaaatatcctaaatacaacctctgtgcagtggtgaaccattttggtgatttggatggtggccactacactgctttctgcaagaattcagtcacccaggcctgatatagctttgataacacacgagtcagtgagattccagatacttctgttcaaaatgctatggatctcctgttctatagctgccagcccttttccataccaatacaaaagcgttaagagccaggaaaatggtgtttcctgaacactgcaaaacaagcagtcagcatctggtggtagagttttgcttggtcattaaactcttagaacttacttgcatcattaacatttttatgccttgtgggcatgttatacaacctttcatcttaagataaatctgtcgtccagaagatgggtcttggttcactaaaaaaggcagtgtgaatataatgcaatgctaatggatgcaggccttcaaaacactgcaattatatagtgagttcaggtttcaaaattcagtgtttatcagaaaatatctcataatcatatatattcaacaaattattttccaaagatactcatgaagctaaacaaaaataatttttgttcaaatggctcgatgagtttaagaatatgatttgaatatatttgatataataatttagccaagaagtggtctcttagactaattgtaaaacatgaaaagttgtcagcttcacaatttgaaccccatccttt

SEQ ID NO: 285410 - DNA, 955 bp, Homo sapiens
ttccttaacaggactgtctccaatgtttttttcaacaagacgcactgacctggaacaacgaaattcactgctccttttgtgaaaccaagcaagaaactgctgtgagggccagtatttccaaagcaccaaaaataattattttccacctaaaaagaagcatgaggagatttgtctctaatatttaccgtgcgagtgtggttgggctcctggaaggaaaattcacaaagtgtggtccccctgtgactggattctttggagtttttaactctcagactctgcactgagcctctagcaattcatcaattacagttcaggttttcctacgcagacctgttccctcagaggtttctgctcggcagttttggctctggtttgacattcagggtacaacaaaaaggaagctgagaacggatattcattacccactcactaacttggacctcactccttatatttgctcaattttccggaaatatcctaaatacaacctctgtgcagtggtgtttcgctcttgtctcgaactcatgacctcaggtgatccacctccctcatcctcccaaagtgctgggattacaggtgtgagctaccgcgccaagcatactttttcattaaatattttaaagatatatccatattgttgcatgtggttataatttcactagcctatgatgtatattgtgtgaatatatcataaattatccattttcctattgatatttcattgtttccaaatttttgctggcatgaacaacattatgcagacattcctgcatatatatgtgcataagagtttctctcatgtatatacttaggagtgaggtcacttagatcataaagtatgtgcatatttaactttctacaagtgattataccaatacatacccctaccaggatcatcagacttcttaatttttgccatctaatggatacaaaattatctcattttagtttttcc

SEQ ID NO: 285411 - DNA, 878 bp, Homo sapiens
tcagtttttgctaaatattgtctttctttattcacagatgatagtcaatgggcacaacatataagtagttacaatgaaatgagaagcaatatagcagtcaggctatatgcatgatttaacaacaaaattatcacttccttttaatttagaataagggacaatttaaaaagcatctcttggccctatcatttctgttccagtagttagtgttcatatgtgaatactaagtttgacattcctttctcccatagaaccattttggtgatttggatggtggccactacactgctttctgcaagaattcagtcacccaggcctgatatagctttgataacacacgagtcagtgagattccagccataccaatacaaaagcgttaagagccaggaaaatggtgtttcctgaacactgcaaaacaagcagtcagcatctggtggtagagttttgcttggtcattaaactcttagaacttacttgcatcattaacatttttatgccttgtgggcatgttatacaacctttcatcttaagataaatctgtcgtccagaagatgggtcttggttcactaaaaaaggcagtgtgaatataatgcaatgctaatggatgcaggccttcaaaacactgcaattatatagtgagttcaggtttcaaaattcagtgtttatcagaaaatatctcataatcatatatattcaacaaattattttccaaagatactcatgaagctaaacaaaaataatttttgttcaaatggctcgatgagtttaagaatatgatttgaatatatttgatataataatttagccaagaagtggtctcttagactaattgtaaaacatgaaaagttgtcagcttcacaatttgaaccccatccttt

SEQ ID NO: 285412 - DNA, 408 bp, Homo sapiens
ttatacttacactttaaatatgtgcagtttattattagttataacacaatgaggttgtcagaaaaagagaaatacttttaaaaatatttaaaattaattgacccaagtatcaattaattttattactcacttccggccagtgtgcctcgtcaatctaaccatcagcttgcgtgcctcttctgagctagattgagtgtttttaacaaatgaaattggtttctcgagtccatgtttttccaaaagctctgacacactataagtgaaaaaagaattatttaatgtcttgctaccaaacaaaaagagtctaagaatcttaggcatagaggtagcccttcagtgtttagtattaaaaaaaaattatcccatagtgtaatccaattttacatataacgttgattctcagcaaaa

SEQ ID NO: 285413 - DNA, 472 bp, Homo sapiens
attttttatttattttattttattttgcttataaacattcaactaaacaaatgacctgtaatggaattgatgaatgacttatgagcatatgctggtttggccagacagtatacacaaacttatatactacagaatgttattacacttgtgaaattctcttgtctaacctgaatttacattccatggtgataacatggtatatgtattgttattaaagtaagtgactatgtcaaaaaaaaaaagaaagaaatatccgtgtagtgttcaggcaacaatagggagcccccttgcccgtgtggagctggttctcatgcagccccactgctagcctggcccgggcctgctctcttccatccacaccccaagatccgcagggccaagctctccccctgggcacccagcatcgttcaggcccccaaggccccacttggtgtccctgaccctgggctctgggtggcccctcacctcggga

SEQ ID NO: 285414 - DNA, 1248 bp, Homo sapiens
gtgagggaggaagaaagaaacatttgccagccaggctagtgacagaaatggattcgaaatatcagtgtgtgaagctgaatgatggtcacttcatgcctgtcctgggatttggcacctatgcgcctgcagaggttcctaaaagtaaagctttagaggccaccaaattggcaattgaagctggcttccgccatattgattctgctcatttatacaataatgaggagcaggttggactggccatccgaagcaagattgcagatggcagtgtgaagagagaagacatattctacacttcaaagctttggtgcaattcccatcgaccagagttggtccgaccagccttggaaaggtcactgaaaaatcttcaattggattatgttgacctctaccttattcattttccagtgtctgtaaagccaggtgaggaagtgatcccaaaagatgaaaatggaaaaatactatttgacacagtggatctctgtgccacgtgggaggccgtggagaagtgtaaagatgcaggattggccaagtccatcggggtgtccaacttcaaccgcaggcagctggagatgatcctcaacaagccagggctcaagtacaagcctgtctgcaaccaggtggaatgtcatccttacttcaaccagagaaaactgctggatttctgcaagtcaaaagacattgttctggttgcctatagtgctctgggatcccaccgagaagaaccatgggtggacccgaactccccggtgctcttggaggacccagtcctttgtgccttggcaaaaaagcacaagcgaaccccagccctgattgccctgcgctaccagctacagcgtggggttgtggtcctggccaagagctacaatgagcagcgcatcagacagaacgtgcaggtgtttgaattccagttgacttcagaggagatgaaagccatagatggcctaaacagaaatgtgcgatatttgacccttgatatttttgctggcccccctaattatccattttctgatgaatattaacatggagggcattgcatgaggtctgccagaaggccctgcgtgtggatggtgacacagaggatggctctatgctggtgactggacacatcgcctctggttaaatctctcctgcttggtgatttcagcaagctacagcaaagcccattggccagaaaggaaagacaataattttgttttttcattttgaaaaaattaaatgctctctcctaaagattcttcacctaaaaaa

SEQ ID NO: 285415 - DNA, 1214 bp, Homo sapiens
gtgagggaggaagaaagaaacatttgccagccaggctagtgacagaaatggattcgaaatatcagtgtgtgaagctgaatgatggtcacttcatgcctgtcctgggatttggcacctatgcgcctgcagaggttcctaaaagtaaagctttagaggccaccaaattggcaattgaagctggcttccgccatattgattctgctcatttatacaataatgaggagcaggttggactggccatccgaagcaagattgcagatggcagtgtgaagagagaagacatattctacacttcaaagctttggtgcaattcccatcgaccagagttggtccgaccagccttggaaaggtcactgaaaaatcttcaattggattatgttgacctctaccttattcattttccagtgtctgtaaagccaggtgaggaagtgatcccaaaagatgaaaatggaaaaatactatttgacacagtggatctctgtgccacgtgggaggccgtggagaagtgtaaagatgcaggattggccaagtccatcggggtgtccaacttcaaccgcaggcagctggagatgatcctcaacaagccagggctcaagtacaagcctgtctgcaaccaggtggaatgtcatccttacttcaaccagagaaaactgctggatttctgcaagtcaaaagacattgttctggttgcctatagtgctctgggatcccaccgagaagaaccatgggtggacccgaactccccggtgctcttggaggacccagtcctttgtgccttggcaaaaaagcacaagcgaaccccagccctgattgccctgcgctaccagctacagcgtggggttgtggtcctggccaagagctacaatgagcagcgcatcagacagaacgtgcaggtgtttgaattccagttgacttcagaggagatgaaagccatagatggcctaaacagaaatgtgcgatatttgacccttgatatttttgctggcccccctaattatccattttctgatgaatattaacatggagggcattgcatgaggtctgccagaaggccctgcgtgtggatggtgacacagaggatggctctatgctggtgaatattaacatggagggcattgcatgaggtctgccagaaggccctgcgttgtggatggtgacacataggatggctctatgctggtgacgggacacatcgcctctggttaaatcaccaa

SEQ ID NO: 285416 - DNA, 810 bp, Homo sapiens
  misc_feature (784)..(784): n is a, c, g, or t
  misc_feature (797)..(797): n is a, c, g, or t
gtgagggaggaagaaagaaacatttgccagccaggctagtgacagaaatggattcgaaatatcagtgtgtgaagctgaatgatggtcacttcatgcctgtcctgggatttggcacctatgcgcctgcagaggttcctaaaagtaaagctttagaggccaccaaattggcaattgaagctggcttccgccatattgattctgctcatttatacaataatgaggagcaggttggactggccatccgaagcaagattgcagatggcagtgtgaagagagaagacatattctacacttcaaagctttggtgcaattcccatcgaccagagttggtccgaccagccttggaaaggtcactgaaaaatcttcaattggattatgttgacctctaccttattcattttccagtgtctgtaaagccaggtgaggaagtgatcccaaaagatgaaaatggaaaaatactatttgacacagtggatctctgtgccacgtgggaggccgtggagaagtgtaaagatgcaggattggccaagtccatcggggtgtccaacttcaaccgcaggcagctggagatgatcctcaacaagccagggctcaagtacaagcctgtctgcaaccaggtggaatgtcatccttacttcaaccagagaaaactgctggatttctgcaagtcaaaagacattgttctggttgcctatagtgctctgggatcccaccgagaagaaccatgggtggacccgaactccccggtgctcttggaggacccagtcctttgtgccttggaagntgtggtcctggcnagagcctctgagc

SEQ ID NO: 285417 - DNA, 515 bp, Homo sapiens
tctcaatgtgagtttctatcccagctagtcaagggttctctatgttactctgcatgactcccctttaaacgtcagtctttgttctgcaatgccatcttgtcacagggtcatctactgcttatttgtggcactgttttgtcttctgtttatgtttatttcacagcttgtcagagtctatacaactcagcagaaagaacacggcttgcctgctccctctcttgaagattgattgcaatgggagtggtttctctgtttctttgtatagtcgaacagatatttacttcttccaagaagatacaattcagaggaatttttatggcaaaagttagtggagacggggtggatgaaatctgttgggagagtatcactgttctgatgggcggccttgagcaccacactgtaatactagacctggcctaaagagaatttctcatgtactattctcacctctgggaaaattacctgaaacgataaaatatcctcattttaagaaaaaaaaaatactagaacctaac

SEQ ID NO: 285418 - DNA, 1165 bp, Homo sapiens
gtgagggaggaagaaagaaacatttgccagccaggctagtgacagaaatggattcgaaatatcagtgtgtgaagctgaatgatggtcacttcatgcctgtcctgggatttggcacctatgcgcctgcagaggttcctaaaagtaaagctttagaggccaccaaattggcaattgaagctggcttccgccatattgattctgctcatttatacaataatgaggagcaggttggactggccatccgaagcaagattgcagatggcagtgtgaagagagaagacatattctacacttcaaagctttggtgcaattcccatcgaccagagttggtccgaccagccttggaaaggtcactgaaaaatcttcaattggattatgttgacctctaccttattcattttccagtgtctgtaaagccaggtgaggaagtgatcccaaaagatgaaaatggaaaaatactatttgacacagtggatctctgtgccacgtgggaggccgtggagaagtgtaaagatgcaggattggccaagtccatcggggtgtccaacttcaaccgcaggcagctggagatgatcctcaacaagccagggctcaagtacaagcctgtctgcaaccaggtggaatgtcatccttacttcaaccagagaaaactgctggatttctgcaagtcaaaagacattgttctggttgcctatagtgctctgggatcccaccgagaagaaccatgggtggacccgaactccccggtgctcttggaggacccagtcctttgtgccttggcaaaaaagcacaagcgaaccccagccctgattgccctgcgctaccagctacagcgtggggttgtggtcctggccaagagctacaatgagcagcgcatcagacagaacgtgcagttttgctggcccccctaattatccattttctgatgaatattaacatggagggcattgcatgaggtctgccagaaggccctgcgtgtggatggtgacacagaggatggctctatgctggtgactggacacatcgcctctggttaaatctctcctgcttggtgatttcagcaagctacagcaaagcccattggccagaaaggaaagacaataattttgttttttcattttgaaaaaattaaatgctctctcctaaagattcttcacctaaaaaa

SEQ ID NO: 285419 - DNA, 1195 bp, Homo sapiens
gtgagggaggaagaaagaaacatttgccagccaggctagtgacagaaatggattcgaaatatcagtgtgtgaagctgaatgatggtcacttcatgcctgtcctgggatttggcacctatgcgcctgcagaggttcctaaaagtaaagctttagaggccaccaaattggcaattgaagctggcttccgccatattgattctgctcatttatacaataatgaggagcaggttggactggccatccgaagcaagattgcagatggcagtgtgaagagagaagacatattctacacttcaaagctttggtgcaattcccatcgaccagagttggtccgaccagccttggaaaggtcactgaaaaatcttcaattggattatgttgacctctaccttattcattttccagtgtctgtaaagccaggtgaggaagtgatcccaaaagatgaaaatggaaaaatactatttgacacagtggatctctgtgccacgtgggaggccgtggagaagtgtaaagatgcaggattggccaagtccatcggggtgtccaacttcaaccgcaggcagctggagatgatcctcaacaagccagggctcaagtacaagcctgtctgcaaccaggtggaatgtcatccttacttcaaccagagaaaactgctggatttctgcaagtccatgggtggacccgaactccccggtgctcttggaggacccagtcctttgtgccttggcaaaaaagcacaagcgaaccccagccctgattgccctgcgctaccagctacagcgtggggttgtggtcctggccaagagctacaatgagcagcgcatcagacagaacgtgcaggtgtttgaattccagttgacttcagaggagatgaaagccatagatggcctaaacagaaatgtgcgatatttgacccttgatatttttgctggcccccctaattatccattttctgatgaatattaacatggagggcattgcatgaggtctgccagaaggccctgcgtgtggatggtgacacagaggatggctctatgctggtgactggacacatcgcctctggttaaatctctcctgcttggtgatttcagcaagctacagcaaagcccattggccagaaaggaaagacaataattttgttttttcattttgaaaaaattaaatgctctctcctaaagattcttcacctaaaaaa

SEQ ID NO: 285420 - DNA, 1152 bp, Homo sapiens
gtgagggaggaagaaagaaacatttgccagccaggctagtgacagaaatggattcgaaatatcagtgtgtgaagctgaatgatggtcacttcatgcctgtcctgggatttggcacctatgcgcctgcagaggttggactggccatccgaagcaagattgcagatggcagtgtgaagagagaagacatattctacacttcaaagctttggtgcaattcccatcgaccagagttggtccgaccagccttggaaaggtcactgaaaaatcttcaattggattatgttgacctctaccttattcattttccagtgtctgtaaagccaggtgaggaagtgatcccaaaagatgaaaatggaaaaatactatttgacacagtggatctctgtgccacgtgggaggccgtggagaagtgtaaagatgcaggattggccaagtccatcggggtgtccaacttcaaccgcaggcagctggagatgatcctcaacaagccagggctcaagtacaagcctgtctgcaaccaggtggaatgtcatccttacttcaaccagagaaaactgctggatttctgcaagtcaaaagacattgttctggttgcctatagtgctctgggatcccaccgagaagaaccatgggtggacccgaactccccggtgctcttggaggacccagtcctttgtgccttggcaaaaaagcacaagcgaaccccagccctgattgccctgcgctaccagctacagcgtggggttgtggtcctggccaagagctacaatgagcagcgcatcagacagaacgtgcaggtgtttgaattccagttgacttcagaggagatgaaagccatagatggcctaaacagaaatgtgcgatatttgacccttgatatttttgctggcccccctaattatccattttctgatgaatattaacatggagggcattgcatgaggtctgccagaaggccctgcgtgtggatggtgacacagaggatggctctatgctggtgactggacacatcgcctctggttaaatctctcctgcttggtgatttcagcaagctacagcaaagcccattggccagaaaggaaagacaataattttgttttttcattttgaaaaaattaaatgctctctcctaaagattcttcacctaaaaaa

SEQ ID NO: 285421 - DNA, 927 bp, Homo sapiens
  misc_feature (920)..(921): n is a, c, g, or t
gtgagggaggaagaaagaaacatttgccagccaggctagtgacagaaatggattcgaaatatcagtgtgtgaagctgaatgatggtcacttcatgcctgtcctgggatttggcacctatgcgcctgcagaggttcctaaaagtaaagctttagaggccaccaaattggcaattgaagctggcttccgccatattgattctgctcatttatacaataatgaggagcaggttggactggccatccgaagcaagattgcagatggcagtgtgaagagagaagacatattctacacttcaaagctttggtgcaattcccatcgaccagagttggtccgaccagccttggaaaggtcactgaaaaatcttcaattggattatgttgacctctaccttattcattttccagtgtctgtaaagccaggtgaggaagtgatcccaaaagatgaaaatggaaaaatactatttgacacagtggatctctgtgccacgtgggaggccgtggagaagtgtaaagatgcaggattggccaagtccatcggggtgtccaacttcaaccgcaggcagctggagatgatcctcaacaagccagggctcaagtacattccacctgcagacgagcaagatggaaaagcatcagataatccaaaagttacactaatattaaaatcaccaaaaaaatagaaatgctatttctgagcacaagcaactccatgaaccctatcctggtttctcaataactccgaccactagaaggagacacggccaatttcagagctgggatgaggaaccttcaactgggaaaaacaagttaactgatatcaaatacaacaatataaaaacaattgaattctggttaaaaaaagaagagctacaaaagatattttgattaagcaatgaaaaattaaaatatggaccggatannaaaaaa

SEQ ID NO: 285422 - DNA, 1684 bp, Homo sapiens
gtgagggaggaagaaagaaacatttgccagccaggctagtgacagaaatggattcgaaatatcagtgtgtgaagctgaatgatggtcacttcatgcctgtcctgggatttggcacctatgcgcctgcagaggttcctaaaagtaaagctttagaggccaccaaattggcaattgaagctggcttccgccatattgattctgctcatttatacaataatgaggagcaggttggactggccatccgaagcaagattgcagatggcagtgtgaagagagaagacatattctacacttcaaagctttggtgcaattcccatcgaccagagttggtccgaccagccttggaaaggtcactgaaaaatcttcaattggattatgttgacctctaccttattcattttccagtgtctgtaaagccaggtgaggaagtgatcccaaaagatgaaaatggaaaaatactatttgacacagtggatctctgtgccacgtgggaggtgagtgtttggaggtgagagaacggataagaaagatgaggtaggatacatctgtttcctatcttcttagtacaagtatggaaaatgcaccattggatcaaaaacttaggaactttacaaaggtagtttttgtgagcagtgaggaaaaagaaatgacaggcatacaaaagagagaagtggaggagaagaattgggggtaaggaggactgggatttatttccttgccttttcactaatctctccagtttcccaaggaggaaacagaaatacttactcttgcaatcactatcttcttccccaattttctgttttattttttcccttttaagaaccacggctagctagttttattgtcatatctagacagttgttactttcacagttctgtgtcacatttatcttgatcttccacacctcacaattcctttttcccagggccgtggagaagtgtaaagatgcaggattggccaagtccatcggggtgtccaacttcaaccgcaggcagctggagatgatcctcaacaagccagggctcaagtacaagcctgtctgcaaccaggtggaatgtcatccttacttcaaccagagaaaactgctggatttctgcaagtcaaaagacattgttctggttgcctatagtgctctgggatcccaccgagaagaaccatgggtggacccgaactccccggtgctcttggaggacccagtcctttgtgccttggcaaaaaagcacaagcgaaccccagccctgattgccctgcgctaccagctacagcgtggggttgtggtcctggccaagagctacaatgagcagcgcatcagacagaacgtgcaggtgtttgaattccagttgacttcagaggagatgaaagccatagatggcctaaacagaaatgtgcgatatttgacccttgatatttttgctggcccccctaattatccattttctgatgaatattaacatggagggcattgcatgaggtctgccagaaggccctgcgtgtggatggtgacacagaggatggctctatgctggtgactggacacatcgcctctggttaaatctctcctgcttggtgatttcagcaagctacagcaaagcccattggccagaaaggaaagacaataattttgttttttcattttgaaaaaattaaatgctctctcctaaagattcttcacctaaaaaa

SEQ ID NO: 285423 - DNA, 1467 bp, Homo sapiens
  misc_feature (1460)..(1461): n is a, c, g, or t
gtgagggaggaagaaagaaacatttgccagccaggctagtgacagaaatggattcgaaatatcagtgtgtgaagctgaatgatggtcacttcatgcctgtcctgggatttggcacctatgcgcctgcagaggttcctaaaagtaaagctttagaggccaccaaattggcaattgaagctggcttccgccatattgattctgctcatttatacaataatgaggagcaggttggactggccatccgaagcaagattgcagatggcagtgtgaagagagaagacatattctacacttcaaagctttggtgcaattcccatcgaccagagttggtccgaccagccttggaaaggtcactgaaaaatcttcaattggattatgttgacctctaccttattcattttccagtgtctgtaaagccaggtgaggaagtgatcccaaaagatgaaaatggaaaaatactatttgacacagtggatctctgtgccacgtgggaggtgagtgtttggaggtgagagaacggataagaaagatgaggtaggatacatctgtttcctatcttcttagtacaagtatggaaaatgcaccattggatcaaaaacttaggaactttacaaaggtagtttttgtgagcagtgaggaaaaagaaatgacaggcatacaaaagagagaagtggaggagaagaattgggggtaaggaggactgggatttatttccttgccttttcactaatctctccagtttcccaaggaggaaacagaaatacttactcttgcaatcactatcttcttccccaattttctgttttattttttcccttttaagaaccacggctagctagttttattgtcatatctagacagttgttactttcacagttctgtgtcacatttatcttgatcttccacacctcacaattcctttttcccagggccgtggagaagtgtaaagatgcaggattggccaagtccatcggggtgtccaacttcaaccgcaggcagctggagatgatcctcaacaagccagggctcaagtacattccacctgcagacgagcaagatggaaaagcatcagataatccaaaagttacactaatattaaaatcaccaaagtaaaagaagctgaataatgtagagcattaaatttgaactgagaatattattgtcaaaaatgatctttttcataaaaataaattttatgcccctctctcctaagaaaatagaaatgctatttctgagcacaagcaactccatgaaccctatcctggtttctcaataactccgaccactagaaggagacacggccaatttcagagctgggatgaggaaccttcaactgggaaaaacaagttaactgatatcaaatacaacaatataaaaacaattgaattctggttaaaaaaagaagagctacaaaagatattttgattaagcaatgaaaaattaaaatatggaccggatannaaaaaa

SEQ ID NO: 285424 - DNA, 1198 bp, Homo sapiens
gtgagggaggaagaaagaaacatttgccagccaggctagtgacagaaatggattcgaaatatcagtgtgtgaagctgaatgatggtcacttcatgcctgtcctgggatttggcacctatgcgcctgcagaggttcctaaaagtaaagctttagaggccaccaaattggcaattgaagctggcttccgccatattgattctgctcatttatacaataatgaggagcaggttggactggccatccgaagcaagattgcagatggcagtgtgaagagagaagacatattctacacttcaaagctttggtgcaattcccatcgaccagagttggtccgaccagccttggaaaggtcactgaaaaatcttcaattggattatgttgacctctaccttattcattttccagtgtctgtaaagccaggtgaggaagtgatcccaaaagatggccgtggagaagtgtaaagatgcaggattggccaagtccatcggggtgtccaacttcaaccgcaggcagctggagatgatcctcaacaagccagggctcaagtacaagcctgtctgcaaccaggtggaatgtcatccttacttcaaccagagaaaactgctggatttctgcaagtcaaaagacattgttctggttgcctatagtgctctgggatcccaccgagaagaaccatgggtggacccgaactccccggtgctcttggaggacccagtcctttgtgccttggcaaaaaagcacaagcgaaccccagccctgattgccctgcgctaccagctacagcgtggggttgtggtcctggccaagagctacaatgagcagcgcatcagacagaacgtgcaggtgtttgaattccagttgacttcagaggagatgaaagccatagatggcctaaacagaaatgtgcgatatttgacccttgatatttttgctggcccccctaattatccattttctgatgaatattaacatggagggcattgcatgaggtctgccagaaggccctgcgtgtggatggtgacacagaggatggctctatgctggtgactggacacatcgcctctggttaaatctctcctgcttggtgatttcagcaagctacagcaaagcccattggccagaaaggaaagacaataattttgttttttcattttgaaaaaattaaatgctctctcctaaagattcttcacctaaaaaa

SEQ ID NO: 285425 - DNA, 597 bp, Homo sapiens
gtgagggaggaagaaagaaacatttgccagccaggctagtgacagaaatggattcgaaatatcagtgtgtgaagctgaatgatggtcacttcatgcctgtcctgggatttggcacctatgcgcctgcagaggttcctaaaagtaaagctttagaggccaccaaattggcaattgaagctggcttccgccatattgattctgctcatttatacaataatgaggagcaggttggactggccatccgaagcaagattgcagatggcagtgtgaagagagaagacatattctacacttcaaagctttggtgcaattcccatcgaccagagttggtccgaccagccttggaaaggtcactgaaaaatcttcaattggattatgttgacctctaccttattcattttccagtgtctgtaaagccaggtgaggaagtgatcccaaaagatgaaaatggaaaaatactatttgacacagtggatctctgtgccacgtgggagccgtggagaagtataaagcgttgagagtacaacctgccggtggagtacaaccctgccggtggggtacaacctgccgctggagtacaacctaccggggatcctc

SEQ ID NO: 285426 - DNA, 1496 bp, Homo sapiens
tgaatactatttatttatacatgtaatagttgtaagagattagagggagcctgtcacctgaagacattccttataccttcatatgtagtacactctgtacataccactctctggagcactgcatcacctacctcatggaggattagtgtccttaaatgtacctcagagcatggctatgtgtggagaaattgacttgtgacatcactaaactgactgcttctacttcagccaggtgaggaagtgatcccaaaagatgaaaatggaaaaatactatttgacacagtggatctctgtgccacgtgggaggtgagtgtttggaggtgagagaacggataagaaagatgaggtaggatacatctgtttcctatcttcttagtacaagtatggaaaatgcaccattggatcaaaaacttaggaactttacaaaggtagtttttgtgagcagtgaggaaaaagaaatgacaggcatacaaaagagagaagtggaggagaagaattgggggtaaggaggactgggatttatttccttgccttttcactaatctctccagtttcccaaggaggaaacagaaatacttactcttgcaatcactatcttcttccccaattttctgttttattttttcccttttaagaaccacggctagctagttttattgtcatatctagacagttgttactttcacagttctgtgtcacatttatcttgatcttccacacctcacaattcctttttcccagggccgtggagaagtgtaaagatgcaggattggccaagtccatcggggtgtccaacttcaaccgcaggcagctggagatgatcctcaacaagccagggctcaagtacaagcctgtctgcaaccaggtggaatgtcatccttacttcaaccagagaaaactgctggatttctgcaagtcaaaagacattgttctggttgcctatagtgctctgggatcccaccgagaagaaccatgggtggacccgaactccccggtgctcttggaggacccagtcctttgtgccttggcaaaaaagcacaagcgaaccccagccctgattgccctgcgctaccagctacagcgtggggttgtggtcctggccaagagctacaatgagcagcgcatcagacagaacgtgcaggtgtttgaattccagttgacttcagaggagatgaaagccatagatggcctaaacagaaatgtgcgatatttgacccttgatatttttgctggcccccctaattatccattttctgatgaatattaacatggagggcattgcatgaggtctgccagaaggccctgcgtgtggatggtgacacagaggatggctctatgctggtgactggacacatcgcctctggttaaatctctcctgcttggtgatttcagcaagctacagcaaagcccattggccagaaaggaaagacaataattttgttttttcattttgaaaaaattaaatgctctctcctaaagattcttcacctaaaaaa

SEQ ID NO: 285427 - DNA, 455 bp, Homo sapiens
gctagtgacagaaatggattcgaaatatcagtgtgtgaagctgaatgatggtcacttcatgcctgtcctgggatttggcacctatgcgcctgcagaggtaacaataatatttttagtgttgagagttcaaaggagctagagtaagtggaagctgaccaggttgtcaggcttgtgttctctatgttactctgcatgactcccctttaaacgtcagtctttgttctgcaatgccatcttgtcacagggtcatctactgcttatttgtggcactgttttgtcttctgtttatgtttatttcacagcttgtcagagtctatacaactcagcagaaagaacacggcttgcctgctccctctcttgaagattgattgcaatgggagtggtttctctgtttctttgtatagtcgaacagatatttacttcttccaagaagatacaattcagaggaattttta

SEQ ID NO: 285428 - DNA, 1446 bp, Homo sapiens
agcggggggtgaggagccggcgtgcggcgcggcgggacgggacgtgcggcccagcgagttggtcggtcccggggtcacccgctacgggaagcaggcctcgccacagactaagaaaaatggctttgtcagcccaacagatacccagatggtttaactcagttaagttgaggagcctcattaatgctgcacaactcacaaaacgttttactagaccagcaagaacactgttacatggcttttctgctcagcctcagatatcctctgacaattgctttctccagtggggatttaagacttacaggacttcctccttatggaatagttcccagtctactagctcaagtagtcaggagaataattctgcccaaagcagtctgcttccttccatgaatgaacagtcacagaagacacaaaatatatccagctttgattctgagctgtttctagaagaactggatgaattgcctccattgtctccaatgcagccaatttcagaggaagaggctattcagattattgcagaccctccattgccaccagcttcattcacacttcgagactatgtggatcattctgagactctgcagaagttggttcttctaggcgtggatttgtccaagatagaaaaacatccagaagcagcaaacctccttctgagactggattttgaaaaagacattaagcaaatgcttctgtttcttaaagatgtgggtatagaggataaccaactgggagcattcctgacaaaaaatcatgcaattttctctgaagaccttgaaaatctgaagaccagggtggcttatctgcattcaaaaaatttcagtaaagcagatgttgcacagatggtcagaaaagcaccatttttgctgaacttttcagtggaaagactggataacagattgggattttttcagaaagaacttgaacttagtgtgaagaagactagagatctggtagttcgtctcccaaggctgctaactggaagtctggaacccgtgaaagaaaatatgaaggtttatcgtcttgaacttggttttaaacataacgaaattcaacatatgatcaccagaatcccaaagatgttaactgcaaataaaatgaaacttaccgagacgtttgattttgtgcacaatgtgatgagcattccccaccacatcattgtcaagttcccacaggtatttaatacaaggctgtttaaggtcaaagaaagacacttgtttcttacctatttaggaagagcacagtatgatccagcaaaacctaactacatctctttggacaaactagtatctattcctgatgaaatattttgtgaagagattgccaaagcatcagtacaggactttgaaaaattcttaaaaacgctttagatttttatgtatgttaaaatgcagtattgtaaagtgaatatatatatgaataaatgaatatatttttaaatgcctc

SEQ ID NO: 285429 - DNA, 1157 bp, Homo sapiens
cttacctcttaaaaggtgaaaaattagggacttggatgtttaattctaaaatgatcccaagatttaaccactgaaagaagcaaacaagggaagagctggtctttgcagaaatagttttaagtgtgcatattagagcactaatttgtttctctctttcaaagaactggatgaattgcctccattgtctccaatgcagccaatttcagaggaagaggctattcagattattgcagaccctccattgccaccagcttcattcacacttcgagactatgtggatcattctgagactctgcagaagttggttcttctaggcgtggatttgtccaagatagaaaaacatccagaagcagcaaacctccttctgagactggattttgaaaaagacattaagcaaatgcttctgtttcttaaagatgtgggtatagaggataaccaactgggagcattcctgacaaaaaatcatgcaattttctctgaagaccttgaaaatctgaagaccagggtggcttatctgcattcaaaaaatttcagtaaagcagatgttgcacagatggtcagaaaagcaccatttttgctgaacttttcagtggaaagactggataacagattgggattttttcagaaagaacttgaacttagtgtgaagaagactagagatctggtagttcgtctcccaaggctgctaactggaagtctggaacccgtgaaagaaaatatgaaggtttatcgtcttgaacttggttttaaacataacgaaattcaacatatgatcaccagaatcccaaagatgttaactgcaaataaaatgaaacttaccgagacgtttgattttgtgcacaatgtgatgagcattccccaccacatcattgtcaagttcccacaggtatttaatacaaggctgtttaaggtcaaagaaagacacttgtttcttacctatttaggaagagcacagtatgatccagcaaaacctaactacatctctttggacaaactagtatctattcctgatgaaatattttgtgaagagattgccaaagcatcagtacaggactttgaaaaattcttaaaaacgctttagatttttatgtatgttaaaatgcagtattgtaaagtgaatatatatatgaataaatgaatatatttttaaatgcctc

SEQ ID NO: 285430 - DNA, 1284 bp, Homo sapiens
agcggggggtgaggagccggcgtgcggcgcggcgggacgggacgtgcggcccagcgagttggtcggtcccggggtcacccgctacgggaagcaggcctcgccacagactaagaaaaatggctttgtcagcccaacagatacccagatggtttaactcagttaagttgaggagcctcattaatgctgcacaactcacaaaacgttttactagaccagcaagaacactgttacatggcttttctgctcagcctcagatatcctctgacaattgctttctccagtggggatttaagacttacaggacttcctccttatggaatagttcccagtctactagctcaagtagtcaggagaataattctgcccaaagcagtctgcttccttccatgaatgaacagtcacagaagacacaaaatatatccagctttgattctgagctgtttctagaagaactggatgaattgcctccattgtctccaatgcagccaatttcagaggaagaggctattcagattattgcagaccctccattgccaccagcttcattcacacttcgagactatgtggatcattctgagactctgcagaagttggttcttctaggcgtggatttgtccaagatagaaaaacatccagaagcagcaaacctccttctgagactggattttgaaaaagacattaagcaaatgcttctgtttcttaaagatgtgggtatagaggataaccaactgggagcattcctgacaaaaaatcatgcaattttctctgaagaccttgaaaatctgaagaccagggtggcttatctgcattcaaaaaatttcagtaaagcagatgttgcacagatggtcagaaaagcaccatttttgctgaacttttcagtggaaagactggataacagattgggattttttcagaaagaacttgaacttagtgtgaagaagactagagatctggtagttcgtctcccaaggctgctaactggaagtctggaacccgtgaaagaaaatatgaaggtatttaatacaaggctgtttaaggtcaaagaaagacacttgtttcttacctatttaggaagagcacagtatgatccagcaaaacctaactacatctctttggacaaactagtatctattcctgatgaaatattttgtgaagagattgccaaagcatcagtacaggactttgaaaaattcttaaaaacgctttagatttttatgtatgttaaaatgcagtattgtaaagtgaatatatatatgaataaatgaatatatttttaaatgcctc

SEQ ID NO: 285431 - DNA, 400 bp, Homo sapiens
atcctacttactgaacacatggtcagtacttggtattggttaacctattaaaatttttgccaagtaaactttttaatatttcatcctcccgtgtgcagtgttttttaaaaacttttttttcttttctaggtatttaatacaaggctgtttaaggtcaaagaaagacacttgtttcttacctatttaggaagagcacagtatgatccagcaaaacctaactacatctctttggacaaactagtatctattcctgatgaaatattttgtgaagagattgccaaagcatcagtacaggactttgaaaaattcttaaaaacgctttagatttttatgtatgttaaaatgcagtattgtaaagtgaatatatatatgaataaatgaatatatttttaaatgcctc

SEQ ID NO: 285432 - DNA, 15338 bp, Homo sapiens
agcggcgccggctgagccagcggctcttgggaggctgcgtccgcgcgccggcgaggcgaggcggccgggccctgcgcgtcaggcctgagacctgggaggaagctggagaaaagatgccctctgaatctttctgtttggctgcccaggctcgcctcgactccaaatggttgaaaacagatatacagcttgcattcacaagagatgggctctgtggtctgtggaatgaaatggttaaagatggagaaattgtatacactggaacagaatcaacccagaacggagagctccctcctagaaaagatgatagtgtcgaaccaagtggaacaaagaaagaagatctgaatgacaaagagaaaaaagatgaagaagaaactcctgcacctatatatagggccaagtcaattctggacagctgggtatggggcaagcaaccagatgtgaatgaactgaaggagtgtctttctgtgctggttaaagagcagcaggccctggccgtccagtcagccaccaccaccctctcagccctgcgactcaagcagaggctggtgatcttggagcgctatttcattgccttgaatagaaccgtttttcaggagaatgtcaaagttaagtggaaaagcagcggtatttctctgcctcctgtggacaaaaaaagttcccggcctgcgggcaaaggtgtggaggggctcgccagagtgggatcccgagcggcgctgtcttttgcctttgccttcctgcgcagggcctggcgatcaggcgaggatgcggacctctgcagtgagctgttgcaggagtccctggacgccctgcgagcacttcccgaggcctcgctctttgacgagagcaccgtgtcctctgtgtggctggaggtggtggagagagcgaccaggttcctcaggtccgtcgtgacgggggatgttcacggaacgccagccaccaaagggccaggaagcatccccctgcaggaccagcacttggccctggccatcctgctggagctggctgtgcagagaggcacgctgagccaaatgttgtctgccatcctgttgttgcttcagctgtgggacagcggggcacaggagactgacaatgagcgttccgcccagggcaccagcgccccacttttgcccttgctgcaaaggttccagagcatcatttgcaggaaggatgcaccccactccgagggcgacatgcaccttttgtctggccctctgagccccaatgagagtttcctgaggtacctcacccttccacaagacaacgagcttgccattgatctgcgacaaacggcggttgttgtcatggcccatttagaccgtctggctacgccctgtatgcctccgctgtgtagctctccgacatctcataagggatcattgcaagaggtcataggttgggggttaataggatggaaatactatgccaatgtgattggtccaatccagtgcgaaggcctggccaacctgggagtcacacagattgcctgtgcagagaagcgtttcctgattctgtcacgcaatggccgcgtgtacacacaggcctataatagtgacacgctggccccacagctggtccaaggccttgcctccagaaacattgtaaaaattgctgcccattctgatggtcaccactacctagccttggctgctactggagaggtgtactcctggggctgtggggacggcggacggctgggccatggggacactgtgcctttggaggagcctaaggtgatctccgccttctctggaaagcaggccgggaagcacgtggtgcacatcgcttgcgggagcacttacagtgcggccatcactgccgagggggagctgtacacctggggccgcgggaactacggccggctgggccatggctccagtgaggacgaggccattccgatgctggtagccgggcttaaaggactgaaggtcatcgatgtggcgtgtgggagtggggatgctcaaaccctggctgtcactgagaacgggcaagtgtggtcttggggagatggtgactatgggaaattgggcagaggtggtagtgatggctgcaaaaccccaaagctgattgaaaagcttcaagacttggatgtggtcaaagtccgctgtggaagtcagttttccattgctttgacgaaagatggccaagtttattcatggggaaaaggtgacaaccagagacttggacatggaacagaggaacatgttcgttatccaaaactcttagaaggcttgcaagggaagaaggtgattgatgtggctgcaggctccacccactgcctggctctgactgaggacagcgaggtccacagctgggggagcaacgaccagtgccagcactttgacaccttgcgcgtgaccaagccagaacctgcagcattgccaggactggacaccaaacacatagtgggaattgcctgtgggcctgcccagagctttgcttggtcatcatgttctgagtggtccattggcctccgtgtcccttttgtggtggacatctgctcaatgacttttgagcagctagatctcctgcttcggcaggtgagtgaggggatggatggctccgcggactggcccccgccccaggagaaagagtgtgtggccgtggcaacgctgaatcttctacgacttcagttgcatgctgccattagtcaccaggttgacccggaattccttggtttaggtctgggcagcatcctcctgaacagcctgaagcagacggtggtgaccctggccagcagtgcgggcgtgctgagcaccgtgcagtcggccgcccaggccgtgctgcagagtggctggtccgtgctgctgcccaccgcggaggagcgggcccgggcactctctgctctcctgccctgcgcagtttcaggcaatgaagtgaacataagtccaggtcgtcgattcatgattgatcttctggtgggcagcttgatggctgatggagggttggagtcagccttacacgcagccattactgcagagatccaggatattgaagccaaaaaagaagcacagaaggaaaaagaaattgatgaacaggaagcgaatgcctcaacatttcatagaagcaggactccactggataaagaccttattaatacggggatctgtgagtcttctggcaaacagtgtttgcctctggttcagctcatacaacagcttcttagaaacatcgcttctcagactgtagccagattgaaagatgttgcccgtcggatttcatcatgtctggactttgagcaacacagtcgtgaaagatctgcttcattggattggttactgcgtttccaacgtttgcttattagtaaactttatccaggagaaagtattggtcagacctcagatatttctagtccagagctaatgggtgttggttccttgctgaagaagtacacagccctcctgtgcacgcacattggagatatactgcctgtggccgccagcattgcttctaccagctggcggcacttcgcggaggtggcttacattgtggaaggggactttactggtgttctccttccagaactagtagtttctatagtgcttctgctcagtaaaaatgctgatctcatgcaagaggctggagctgtacctctgctgggtggcctgttggaacatctggatcggttcaaccatctggcaccaggaaaggaacgggatgatcatgaagagttagcctggcctggcataatggagtcattttttacaggtcagaactgtagaaataatgaggaagtgacacttatacgcaaagctgatttggagaaccataataaagatggaggcttctggactgtgattgacgggaaggtgtatgatataaaggacttccagacacagtcgttaacaggaaatagtattcttgctcagtttgcaggggaagacccagtggtagctttggaagctgctttgcagtttgaagacacccgggaatccatgcacgcgttttgtgttggccagtatttggagcctgaccaagaaatcgtcaccataccagatctggggagtctctcttcacctctgatagacacagagaggaatctgggcctgcttctcggattacacgcttcgtatttggcaatgagcacaccgctgtctcctgtcgagattgaatgtgccaaatggcttcagtcatccatcttctctggaggcctgcagaccagccagatccactacaggtacaacgaggagaaagacgaggaccactgcagctccccagggggcacacctgccagcaaatctcgactctgctcccacagacgggccctgggggaccattcccaggcatttctgcaagccattgcagacaacaacattcaggatcacaacgtgaaggactttttgtgtcaaatagaaaggtactgtaggcagtgccatttgaccacaccgatcatgtttccccccgagcatcccgtggaagaggtcggtcgcttgttgttatgttgcctcttaaaacatgaagatttaggtcatgtggcattatctttagttcatgcaggtgcacttggtattgagcaagtaaagcacagaacgttgcctaagtcagtggtggatgtttgtagagttgtctaccaagcaaaatgttcgctcattaagactcatcaagaacagggccgttcttacaaggaggtctgcgctcctgtcatcgaacgtttgagattcctctttaatgaattgagacctgctgtttgtaatgacctctctataatgtctaagtttaaattgttaagttctttgccccgttggaggaggatagctcaaaagataattcgagaacgaaggaaaaagagagttcctaagaagccagaatctatggatgatgaagaaaaaattggaaacgaagagagtgatttagaagaagcttgcattttgcctcatagtccaataaatgtggacaagagacccattgcaattaaatcacccaaggacaaatggcagccgctgttgagtactgttacaggtgttcacaaatacaagtggttgaagcagaatgtgcagggtctttatccgcagtctccactcctcagtacaattgctgaatttgcccttaaagaagagccagtggatgtggaaaaaatgagaaagtgcctactaaaacagttggagagagcagaggttcgcctggaagggatagatacaattttaaaactggcgagcaagaatttcttacttccatctgtgcagtatgcgatgttttgtggatggcaaagacttattcctgagggaatcgatataggggaacctcttactgattgtttaaaggatgttgatttgatcccgccttttaatcggatgctgctggaagtcacctttggcaagctgtacgcttgggctgtacagaacattcgaaatgttttgatggatgccagtgccacatttaaagagcttggtatccagccggttcccctccaaaccatcaccaatgagaacccgtcaggaccgagcctggggaccatcccgcaagcccgcttcctcctggtgatgctcagcatgctcaccctgcagcacggcgcaaacaacctcgaccttctgctcaattccggcatgctggccctcacgcagacggcactgcgcctgattggccccagttgtgacaacgttgaggaagatatgaatgcttctgctcaaggtgcttctgccacagttttggaagaaacaaggaaggaaacggctcctgtgcagctccctgtttcaggaccagaactggctgccatgatgaagattggaacaagggtcatgagaggtgtggactggaaatggggcgatcaggatgggcctcctccaggcctaggccgcgtgattggtgagctgggagaggacggatggataagagtccagtgggacacaggcagcaccaactcctacaggatggggaaagaaggaaaatacgacctcaagctggcagagctgccggctgctgcacagccctcagcagaggattcggacacagaggatgactctgaagccgaacaaactgaaaggaacattcaccccactgcaatgatgtttaccagcactattaacttactgcagactctttgtctgtctgctggagttcatgctgagatcatgcagagcgaagccaccaagactttatgcggactgctgcgaatgttagtggaaagcggaacgacggacaagacatcttctccaaacaggctggtgtacagggagcaacaccggagctggtgcacgctggggtttgtgcggagcatcgctctcacgccgcaggtatgcggcgccctcagctccccgcagtggatcacgctgctcatgaaggtcgtggaagggcacgcacccttcactgccacctcgctgcagaggcagatcttagctgtgcatttgttgcaagcagtccttccatcatgggacaagaccgaaagggcgagggacatgaaatgcctcgtggagaagctgtttgacttcttgggaagcttgctcactacctgctcctctgacgtgccattactcagagagtccacgctgaggcggcgcagggtgcgcccgcaggcctcgctgactgccacccacagcagcacactggcggaggaggtggtggcactgctgcgcacgctgcactccctgactcagtggaatgggctcatcaacaagtacatcaactcccagctccgctccatcacccacagctttgtgggaaggccttccgaaggggcccagttagaggactacttccccgactccgagaaccctgaagtggggggcctcatggcagtcctggctgtgattggaggcatcgatggtcgcctgcgcctgggcggtcaagttatgcacgatgagtttggagaaggcactgtgactcgcatcaccccaaagggcaaaatcaccgtgcagttctctgacatgcggacgtgtcgcgtttgcccattgaatcagctgaaaccactccctgccgtggcctttaatgtgaacaacctgcccttcacagagcccatgctgtctgtctgggctcagttggtgaacctcgctggaagcaagttagaaaagcacaaaataaagaaatcgactaaacaggcctttgcaggacaagtggacctggacctgctgcggtgccagcagttgaagctatacatcctgaaagcaggtcgggcgctgctctcccaccaggataaactgcggcagatcctgtctcagccagctgttcaggagactggaactgttcacacagatgatggagcagtggtatcacctgaccttggggacatgtctcctgaagggccgcagccccccatgatcctcttgcagcagctgctggcctcggccacccagccgtctcctgtgaaggccatatttgataaacaggaacttgaggctgctgcactggccgtttgccagtgcttggctgtggagtccactcacccttcgagcccaggatttgaagactgcagctccagtgaggccaccacgcctgtcgccgtgcagcacatccgccctgccagagtgaagaggcgcaagcagtcgcccgttcccgctctgccgatcgtggtgcagctcatggagatgggattttccagaaggaacatcgagtttgccctgaagtctctcactggtgcttccgggaatgcatccagcttgcctggtgtggaagccttggtcgggtggctgctggaccactccgacatacaggtcacggagctctcagatgcagacacggtgtccgacgagtattctgacgaggaggtggtggaggacgtggatgatgccgcctactccatgtctactggtgctgttgtgacggagagccagacgtacaaaaaacgagctgatttcttgagtaatgatgattatgctgtatatgtgagagagaatattcaggtgggaatgatggttagatgctgccgagcgtatgaagaagtgtgcgaaggtgatgttggcaaagtcatcaagctggacagagatggattgcatgatctcaatgtgcagtgtgactggcagcagaaagggggcacctactgggttaggtacattcatgtggaacttataggctatcctccaccaagttcttcttctcacatcaagattggtgataaagtgcgggtcaaagcctctgtcaccacaccaaaatacaaatggggatctgtgactcatcagagtgtgggggttgtgaaagctttcagtgccaatggaaaagatatcattgtcgactttccccagcagtctcactggactgggttgctatcagaaatggagttggtacccagtattcatcctggggttacgtgtgatggatgtcagatgtttcctatcaatggatccagattcaaatgcagaaactgtgatgactttgatttttgtgaaacgtgtttcaagaccaaaaaacacaataccaggcatacatttggcagaataaatgaaccaggtcagtctgcggtattttgtggccgttctggaaaacagctgaagcgttgccacagcagccagccaggcatgctgctggacagctggtcccgcatggtgaagagcctgaatgtgtcgtcctccgtgaaccaggcatcccgtctcattgacggcagcgagccctgctggcagtcatcggggtcgcaaggaaagcactggattcgtttggagattttcccagatgttcttgttcatagattaaaaatgatcgtagatcctgctgacagtagctacatgccgtccctggttgtagtgtcaggtggaaattccctgaataaccttattgaactaaagacaatcaatattaacccttctgacaccacagtgccccttctgaatgactacacagagtatcacaggtatattgaaattgctataaagcagtgcaggagctcaggaatcgattgtaaaatccatggtctcatcctgctgggacggatccgtgcagaagaggaagatttggctgcagttcctttcttagcttcggataatgaagaggaggaggatgagaaaggcaacagcggaagcctcattagaaagaaggctgctgggctggaatcagcagctacgataagaaccaaggtgtttgtgtggggcctgaatgacaaggaccagctgggcgggctgaaaggctccaagataaaggttccttcgttctctgagacactgtcagctttgaatgtggtacaggtggctggtggatctaaaagtttgtttgcagtgactgtggaagggaaggtgtatgcctgtggagaagccacgaatggccggctggggctgggcatttccagcgggacggtgcccatcccacggcagatcacagctctcagcagctacgtggtcaagaaggtggctgttcactcaggtggccggcacgcgacggctttaactgtcgatggaaaagtgttttcgtggggcgaaggtgacgatggaaaacttggacacttcagcagaatgaactgtgacaaaccaaggctgatcgaggccctgaaaaccaagcgtatccgggatatcgcctgtgggagctcgcacagcgcagccctcacatccagcggagaactgtacacctggggcctcggcgagtacggccggctgggacatggggataatacgacacagctaaagcccaaaatggtgaaagtccttctcggtcacagagtaatccaggttgcatgtgggagtagagacgcgcagaccctggctctgaccgatgaaggtttggtattttcctggggtgatggtgactttggaaaactgggccggggcggaagtgaaggctgtaacattccccagaacattgagagactaaatggacagggggtgtgccagattgagtgtggagctcagttctccctggcgctcaccaagtctggagtggtgtggacatggggaaagggggattacttcagattgggccacggctctgacgtgcacgtgcggaaaccacaggtggtggaagggctgagagggaagaagatcgtgcatgtggctgtcggggccctgcactgcctggcggtcacggactcggggcaggtgtatgcttggggtgacaacgaccacggccagcagggcaatggcacgaccacggttaacaggaagcccacactcgtgcaaggcttagaaggccagaagatcacacgcgtggcttgtgggtcgtcccacagtgtggcgtggacaactgtggatgtggccacgccctctgtccacgagcccgtcctcttccagactgcaagagacccgttaggtgcttcctacttaggcgtgccctcagatgctgattcttctgctgccagtaataaaataagtggtgcaagtaattctaagccaaatcgcccttctcttgccaagattctcttgtcattggatggaaatctggccaaacagcaggccttatcgcatattcttacagcattgcaaatcatgtatgccagagatgctgttgtcggggccctgatgccggccgccatgatcgccccggtggagtgcccctcgttctcctcggcggccccttccgacgcatctgcgatggctagtcccatgaatggagaagaatgcatgctggctgttgatatcgaagacagactgagtccaaatccatggcaagaaaagagagagattgtttcctctgaggacgcagtgaccccctctgcagtgactccgtcggccccctcagcctccgctcggccttttatcccagtgacggatgacctgggagctgcaagcatcattgcagaaaccatgaccaaaaccaaagaggatgttgaaagccaaaataaagcagcaggtccggagcctcaggccttggatgagttcaccagtctgctgattgcggatgacactcgtgtggtggtagacctgctcaagctgtcagtgtgcagccgggccggggacaggggcagggatgtgctctccgcggtgctttccggcatggggaccgcctacccacaggtggcagatatgctgttggagctctgtgtcaccgagttggaggatgtggccacagactcgcagagcggccgcctctcttctcagcctgtggtggtggagagtagccacccttacaccgacgacacctccaccagtggcacagtgaagataccaggtgcagaaggactcagggtagaatttgaccggcagtgctccacagagaggcgccacgaccctctcacagtcatggacggcgtcaacaggatcgtctccgtgcggtcaggccgagagtggtccgactggtccagcgagctgcgcatcccaggggatgagttaaagtggaagttcatcagcgatgggtctgtgaatggctggggctggcgcttcaccgtctatcccatcatgccagctgctggccctaaagaactcctctctgaccgctgcgtcctctcctgtccatccatggacttggtgacgtgtctgttagacttccgactcaaccttgcctctaacagaagcatcgtccctcgccttgcggcctcgctggcagcttgtgcacagctgagtgccctagctgccagtcacagaatgtgggcccttcagagactgaggaagctgcttacaactgaatttgggcagtcaattaacataaataggctgcttggagaaaatgatggggaaacaagagctttgagttttacaggtagtgctcttgctgctttggtgaaaggtcttccagaagctttgcaaaggcagtttgaatatgaagatcctattgtgaggggtggcaaacagctgctccacagcccattctttaaggtactagtagctcttgcttgtgacctggagctggacactctgccttgctgtgccgagacgcacaagtgggcctggttccggaggtactgcatggcctcccgtgttgctgtggcccttgacaaaagaacaccgttgccccgtctgtttcttgatgaggtggctaagaaaattcgtgaattaatggcagacagcgaaaacatggatgttctgcatgagagccatgacatttttaaaagagagcaagacgaacaacttgtgcagtggatgaacaggcgaccagatgactggactctctctgctggtggcagtggaacaatttatggatggggacataatcacaggggccagctcgggggcattgaaggcgcaaaagtcaaagttcccactccctgtgaagcccttgcaactctcagacccgtgcagttaatcggaggggaacagaccctctttgctgtgacggctgatgggaagctgtatgccactgggtatggtgcaggtggcagactaggcattggagggacagagtcggtgtccaccccaacattgcttgaatccattcagcatgtgtttattaagaaagtagctgtgaactctggaggaaagcactgccttgccctgtcttcagaaggagaagtttactcttggggtgaggcagaagatgggaagttggggcatggcaacagaagtccgtgtgaccgccctcgtgtcatcgagtctctgagaggaattgaagtggtcgatgttgctgctggcggagcccacagcgcctgtgtcacagcagccggggacctctacacatggggcaaaggccgctacggccggctggggcacagcgacagtgaggaccagctgaagccgaagctggtggaggcgctgcagggccaccgtgtggttgacatcgcctgtggcagtggagatgcccagaccctctgcctcacagatgacgacactgtctggtcctggggggacggggactacggcaagctcggccggggaggcagcgatggctgtaaagtgcctatgaagattgattctcttactggtcttggagtagttaaagtggaatgcggatcccagttttctgttgcccttaccaaatctggagctgtttatacctggggcaaaggcgattatcacaggttgggccatggatcagatgaccatgttcgaaggcctcggcaggtccaagggttgcaggggaagaaagtcatcgccatcgccactggctccctgcactgtgtgtgctgcacagaggatggtgaggtttatacatggggcgacaatgatgagggacaactgggagacggaaccaccaatgccatccagaggcctcggttggtagctgcccttcagggtaagaaggtcaaccgtgtggcctgtggctcagcacataccctcgcctggtcgaccagcaagcccgccagtgctggcaaactccctgcacaggtccccatggagtacaatcacctgcaggagatccccatcattgcgctgaggaaccgtctgctgctgctgcaccacctctccgagctcttctgcccctgcatccccatgttcgacctggaaggctcgctcgacgaaactggactcgggccttctgttgggttcgacactctccgaggaattctgatatcccagggaaaggaggcggctttccggaaagtagtacaagcaactatggtacgcgatcgtcagcatggccccgtcgtggagctgaaccgcatccaggtcaaacgatcaaggagcaaaggcgggctggccggccccgacggcaccaagtctgtctttgggcagatgtgtgctaagatgagctcgtttggtcccgacagcctcctccttcctcaccgtgtctggaaagtcaagtttgtgggtgaatctgtggatgactgtgggggcggctacagcgagtccatagctgagatctgtgaggagctgcagaacggactcacgcccctgctgatcgtgacacccaacgggagggatgagtctggggccaaccgagactgctacctgctcagcccggccgccagagcacccgtgcacagcagcatgttccgcttcctgggtgtgttgctgggcattgccatccgaaccgggagtcccctgagcctcaaccttgccgagcctgtctggaagcagctggctgggatgagcctcaccatcgcggacctcagtgaggttgataaggattttattcctggactcatgtacatccgagacaatgaagccacctcagaggagtttgaagccatgagcctgcccttcacagtgccaagtgccagtggccaggacattcagttgagctccaagcacacacacatcaccctggacaaccgcgcggagtacgtgcggctggcgataaactatagactccatgaatttgatgagcaggtggctgctgttcgggaaggaatggcccgcgttgtgcctgttcccctcctctctctgttcaccggctacgaactggagacgatggtgtgtggcagccctgacatcccgctgcaccttctcaagtcggtggccacctataaaggcatcgagccttccgcatcgctgatccagtggttctgggaggtgatggagtccttctccaacacagagcgctctcttttccttcgcttcgtctggggccggacgaggctgcccaggaccatcgccgacttccggggccgagacttcgtcatccaggtgttggataaatacaaccctccagaccacttcctccctgagtcctacacctgtttcttcttgctgaagctgcccaggtattcctgcaagcaggtgctggaggagaagctcaagtacgccatccacttctgcaagtccatagacacagatgactacgctcgcatcgcacttacaggagagccagccgccgacgacagcagcgacgattcagataacgaggatgtcgactcctttgcttcggactctacacaagattatttaacaggacactaagatggggaaacgtcctcgtgagatgagagcctgagccaggcagcagagcactcgctgctgtgtagactgtaggctgcctggtgtgtctgatgagaagcgtccgtcctcgagccaggcgggaggagggagtggagagactgactggccgtgatgggaatgacagtgagaaggtccgcctgtgcgcgtggaacactgtggacgctcgacttccaagggtcttctcacccgtaatgctgcattacatgtaggactgtgtttactaaagtgtgtaaatgtttatataaataccaaattgcagcatccccaaaatgaataaagcctttttacttgtgggtgcaatcgatttttttttctttctcctttctttcaagtgtcgtgagtcgtcttgattgtatattggaaataactgtgtaacaaatcgtattataaatatttcaattaattttactctgaatttgtttattaaaagacttttgaacatgaaatgattagtattacttgaatgcatccagaggatatttaaaccaaaatgaaaaaccagaaggccatttggtgtcccctctcccaggtgtccccttgtagcatatgcattatgtcatctgaattgaggcctttctgtgaacagcatcataacttctatcatggaaagtgtactatatataatgtttgtgtcatgtatatgcctaaattttaatcatctataaataaaacatctgacat

SEQ ID NO: 285433 - DNA, 516 bp, Homo sapiens
agcggcgccggctgagccagcggctcttgggaggctgcgtccgcgcgccggcgaggcgaggcggccgggccctgcgcgtcaggcctgagacctgggaggaagctggagaaaagatgccctctgaatctttctgtttggctgcccaggctcgcctcgactccaaatggttgaaaacagatatacaggtattgagtgttggtagatatgagagtccagtgtttagagctgtgttgcgtggccgggcgcagtggctcacgcctgtaatcccggcagtttgggaggccgaggcgggtggatgccctgaggtcaggagttggagaccagcctgaccaacatggtgaaaccccgtctctactaaaaatacaaaattagccaggcgtggtggtgtatgcctgtaatcccagccactcgggaggctgaggcaggagaatcgcttgaacccgggaggtggaggttgcaatgggtcaagatcatgccattgcactccagcctggacaatgagagcaaaactgtttc

SEQ ID NO: 285434 - DNA, 815 bp, Homo sapiens
  misc_feature (785)..(785): n is a, c, g, or t
agcggcgccggctgagccagcggctcttgggaggctgcgtccgcgcgccggcgaggcgaggcggccgggccctgcgcgtcaggcctgagacctgggaggaagctggagaaaagatgccctctgaatctttctgtttggctgcccaggctcgcctcgactccaaatggttgaaaacagatatacagcttgcattcacaagagatgggctctgtggtctgtggaatgaaatggttaaagatggagaaattgtatacactggaacagaatcaacccagaacggagagctccctcctagaaaagtagagacagggtttcaccgtgttagccaggatggtctcgagctcctgacctcgtgatccgcccgcctcagcctcccaaagtgctgggattataggcgtgagccaccgtgcctgatgatagtgtcgaaccaagtggaacaaagaaagaagatctgaatgacaaagagaaaaaagatgaagaagaaactcctgcacctatatatagggccaagtcaattctggacagctgggtatggggcaagcaaccagatgtgaatgaactgaaggagtgtctttctgtgctggttaaagagcagcaggccctggccgtccagtcagccaccaccaccctctcagccctgcgactcaagcagaggctggtgatcttggagcgctatttcattgccttgaatagaaccgtttttcaggagaatgtcaaagttaagtggaaaagcagcggtatttctctgcctcctgtggacaaaaaaagttcccggctggggcaangtgtggaagggctccccaaggggattccgg

SEQ ID NO: 285435 - DNA, 415 bp, Homo sapiens
atccacttgtgatcctgtcacttgaagaaaaccattggtcggattttggtacacaccctttcatagtattgattttatgtagtatctgcaccctctgctgctgactggttgtatgttccgtgtgtgtcgtctgcagttcccggcctgcgggcaaaggtgtggaggggctcgccagagtgggatcccgagcggcgctgtcttttgcctttgccttcctgcgcagggcctggcgatcaggtacggtccctggtgtggcgcgttgttctgcttccctaatacatcaacagactgggtttcgaactcggttcagccaccatgtgccctttggctgatcccatgtgctctctgtgcctcagtttccttgcttgtgagatgagaggctgcagaggctgtttggcttttcacatctgtgctt

SEQ ID NO: 285436 - DNA, 368 bp, Homo sapiens
gtttcgtgacatttcttagctgttcctaaaagacatgtgaagcttcacatggctgggtttggtaataccatccaagaggctggggctgcgaatataatttgtaattttgattattttttttagaagccgaacaaactgaaaggaacattcaccccactgcaatgatgtttaccagcactattaacttactgcagactctttgtctgtctgctggagttcatgctgagatcatgcagagcgaagccaccaagactttatgcggactgctgcgaatgttagtggaaagcggaacgacggacaagacatgtatggaatgagagatcgagggcccagggagtcagcgctgggggccgcacgcttgtgtctgg

SEQ ID NO: 285437 - DNA, 14138 bp, Homo sapiens
ccacctcccggggtcaagcaattctcatgcctcagctggattatagatattcaccaccatgcctggctaatttctgtatttttagtacagacagggttttgccatgttgcccaggctggtctcgaactcctgggctcaagtgatccgcccgccttggcctcccaaagttctgggattacaggtgtgagctaccatgcccagcctaacaattctgttttttagcaattcactttaagtttttgcaaagttttcagcttagttttcaccataaaaataaaaatatttacttttgcaattgcattttatccctttatgtaatatttaatcaacttacataattatgctgatatgcagttgggaacacatacagtggtacagttgaccaccggtcagcatggtggcaacagaagcaggcaggcaaacgggagggtggtccgcaagcatctgcaatgtgccaggccccagttactgtgtgttatggaggcagtgggcctttggttctgtgaagcagttaacattgagcccaggctagtaagagtcaggactttgtttttcatggaatgaaaacaaaaagaaaactcagctttccctttctttattgcttctatgtcaacctcaagtgtcacctagatttcgtttgctcagtagccacccttgtagtgttaactatgtacctgagtggtctagattagtgtgcgtttttcattatattatttgcagtcatttaaaatttttcgttaaaatgcagagttgttgttatttaaatgcatttgtattttttagggcaagtgtggtcttggggagatggtgactatgggaaattgggcagaggtggtagtgatggctgcaaaaccccaaagctgattgaaaagcttcaagacttggatgtggtcaaagtccgctgtggaagtcagttttccattgctttgacgaaagatggccaagtttattcatggggaaaaggtgacaaccagagacttggacatggaacagaggaacatgttcgttatccaaaactcttagaaggcttgcaagggaagaaggtgattgatgtggctgcaggctccacccactgcctggctctgactgaggacagcgaggtccacagctgggggagcaacgaccagtgccagcactttgacaccttgcgcgtgaccaagccagaacctgcagcattgccaggactggacaccaaacacatagtgggaattgcctgtgggcctgcccagagctttgcttggtcatcatgttctgagtggtccattggcctccgtgtcccttttgtggtggacatctgctcaatgacttttgagcagctagatctcctgcttcggcaggtgagtgaggggatggatggctccgcggactggcccccgccccaggagaaagagtgtgtggccgtggcaacgctgaatcttctacgacttcagttgcatgctgccattagtcaccaggttgacccggaattccttggtttaggtctgggcagcatcctcctgaacagcctgaagcagacggtggtgaccctggccagcagtgcgggcgtgctgagcaccgtgcagtcggccgcccaggccgtgctgcagagtggctggtccgtgctgctgcccaccgcggaggagcgggcccgggcactctctgctctcctgccctgcgcagtttcaggcaatgaagtgaacataagtccaggtcgtcgattcatgattgatcttctggtgggcagcttgatggctgatggagggttggagtcagccttacacgcagccattactgcagagatccaggatattgaagccaaaaaagaagcacagaaggaaaaagaaattgatgaacaggaagcgaatgcctcaacatttcatagaagcaggactccactggataaagaccttattaatacggggatctgtgagtcttctggcaaacagtgtttgcctctggttcagctcatacaacagcttcttagaaacatcgcttctcagactgtagccagattgaaagatgttgcccgtcggatttcatcatgtctggactttgagcaacacagtcgtgaaagatctgcttcattggattggttactgcgtttccaacgtttgcttattagtaaactttatccaggagaaagtattggtcagacctcagatatttctagtccagagctaatgggtgttggttccttgctgaagaagtacacagccctcctgtgcacgcacattggagatatactgcctgtggccgccagcattgcttctaccagctggcggcacttcgcggaggtggcttacattgtggaaggggactttactggtgttctccttccagaactagtagtttctatagtgcttctgctcagtaaaaatgctgatctcatgcaagaggctggagctgtacctctgctgggtggcctgttggaacatctggatcggttcaaccatctggcaccaggaaaggaacgggatgatcatgaagagttagcctggcctggcataatggagtcattttttacaggtcagaactgtagaaataatgaggaagtgacacttatacgcaaagctgatttggagaaccataataaagatggaggcttctggactgtgattgacgggaaggtgtatgatataaaggacttccagacacagtcgttaacaggaaatagtattcttgctcagtttgcaggggaagacccagtggtagctttggaagctgctttgcagtttgaagacacccgggaatccatgcacgcgttttgtgttggccagtatttggagcctgaccaagaaatcgtcaccataccagatctggggagtctctcttcacctctgatagacacagagaggaatctgggcctgcttctcggattacacgcttcgtatttggcaatgagcacaccgctgtctcctgtcgagattgaatgtgccaaatggcttcagtcatccatcttctctggaggcctgcagaccagccagatccactacaggtacaacgaggagaaagacgaggaccactgcagctccccagggggcacacctgccagcaaatctcgactctgctcccacagacgggccctgggggaccattcccaggcatttctgcaagccattgcagacaacaacattcaggatcacaacgtgaaggactttttgtgtcaaatagaaaggtactgtaggcagtgccatttgaccacaccgatcatgtttccccccgagcatcccgtggaagaggtcggtcgcttgttgttatgttgcctcttaaaacatgaagatttaggtcatgtggcattatctttagttcatgcaggtgcacttggtattgagcaagtaaagcacagaacgttgcctaagtcagtggtggatgtttgtagagttgtctaccaagcaaaatgttcgctcattaagactcatcaagaacagggccgttcttacaaggaggtctgcgctcctgtcatcgaacgtttgagattcctctttaatgaattgagacctgctgtttgtaatgacctctctataatgtctaagtttaaattgttaagttctttgccccgttggaggaggatagctcaaaagataattcgagaacgaaggaaaaagagagttcctaagaagccagaatctatggatgatgaagaaaaaattggaaacgaagagagtgatttagaagaagcttgcattttgcctcatagtccaataaatgtggacaagagacccattgcaattaaatcacccaaggacaaatggcagccgctgttgagtactgttacaggtgttcacaaatacaagtggttgaagcagaatgtgcagggtctttatccgcagtctccactcctcagtacaattgctgaatttgcccttaaagaagagccagtggatgtggaaaaaatgagaaagtgcctactaaaacagttggagagagcagaggttcgcctggaagggatagatacaattttaaaactggcgagcaagaatttcttacttccatctgtgcagtatgcgatgttttgtggatggcaaagacttattcctgagggaatcgatataggggaacctcttactgattgtttaaaggatgttgatttgatcccgccttttaatcggatgctgctggaagtcacctttggcaagctgtacgcttgggctgtacagaacattcgaaatgttttgatggatgccagtgccacatttaaagagcttggtatccagccggttcccctccaaaccatcaccaatgagaacccgtcaggaccgagcctggggaccatcccgcaagcccgcttcctcctggtgatgctcagcatgctcaccctgcagcacggcgcaaacaacctcgaccttctgctcaattccggcatgctggccctcacgcagacggcactgcgcctgattggccccagttgtgacaacgttgaggaagatatgaatgcttctgctcaaggtgcttctgccacagttttggaagaaacaaggaaggaaacggctcctgtgcagctccctgtttcaggaccagaactggctgccatgatgaagattggaacaagggtcatgagaggtgtggactggaaatggggcgatcaggatgggcctcctccaggcctaggccgcgtgattggtgagctgggagaggacggatggataagagtccagtgggacacaggcagcaccaactcctacaggatggggaaagaaggaaaatacgacctcaagctggcagagctgccggctgctgcacagccctcagcagaggattcggacacagaggatgactctgaagccgaacaaactgaaaggaacattcaccccactgcaatgatgtttaccagcactattaacttactgcagactctttgtctgtctgctggagttcatgctgagatcatgcagagcgaagccaccaagactttatgcggactgctgcgaatgttagtggaaagcggaacgacggacaagacatcttctccaaacaggctggtgtacagggagcaacaccggagctggtgcacgctggggtttgtgcggagcatcgctctcacgccgcaggtatgcggcgccctcagctccccgcagtggatcacgctgctcatgaaggtcgtggaagggcacgcacccttcactgccacctcgctgcagaggcagatcttagctgtgcatttgttgcaagcagtccttccatcatgggacaagaccgaaagggcgagggacatgaaatgcctcgtggagaagctgtttgacttcttgggaagcttgctcactacctgctcctctgacgtgccattactcagagagtccacgctgaggcggcgcagggtgcgcccgcaggcctcgctgactgccacccacagcagcacactggcggaggaggtggtggcactgctgcgcacgctgcactccctgactcagtggaatgggctcatcaacaagtacatcaactcccagctccgctccatcacccacagctttgtgggaaggccttccgaaggggcccagttagaggactacttccccgactccgagaaccctgaagtggggggcctcatggcagtcctggctgtgattggaggcatcgatggtcgcctgcgcctgggcggtcaagttatgcacgatgagtttggagaaggcactgtgactcgcatcaccccaaagggcaaaatcaccgtgcagttctctgacatgcggacgtgtcgcgtttgcccattgaatcagctgaaaccactccctgccgtggcctttaatgtgaacaacctgcccttcacagagcccatgctgtctgtctgggctcagttggtgaacctcgctggaagcaagttagaaaagcacaaaataaagaaatcgactaaacaggcctttgcaggacaagtggacctggacctgctgcggtgccagcagttgaagctatacatcctgaaagcaggtcgggcgctgctctcccaccaggataaactgcggcagatcctgtctcagccagctgttcaggagactggaactgttcacacagatgatggagcagtggtatcacctgaccttggggacatgtctcctgaagggccgcagccccccatgatcctcttgcagcagctgctggcctcggccacccagccgtctcctgtgaaggccatatttgataaacaggaacttgaggctgctgcactggccgtttgccagtgcttggctgtggagtccactcacccttcgagcccaggatttgaagactgcagctccagtgaggccaccacgcctgtcgccgtgcagcacatccgccctgccagagtgaagaggcgcaagcagtcgcccgttcccgctctgccgatcgtggtgcagctcatggagatgggattttccagaaggaacatcgagtttgccctgaagtctctcactggtgcttccgggaatgcatccagcttgcctggtgtggaagccttggtcgggtggctgctggaccactccgacatacaggtcacggagctctcagatgcagacacggtgtccgacgagtattctgacgaggaggtggtggaggacgtggatgatgccgcctactccatgtctactggtgctgttgtgacggagagccagacgtacaaaaaacgagctgatttcttgagtaatgatgattatgctgtatatgtgagagagaatattcaggtgggaatgatggttagatgctgccgagcgtatgaagaagtgtgcgaaggtgatgttggcaaagtcatcaagctggacagagatggattgcatgatctcaatgtgcagtgtgactggcagcagaaagggggcacctactgggttaggtacattcatgtggaacttataggctatcctccaccaagttcttcttctcacatcaagattggtgataaagtgcgggtcaaagcctctgtcaccacaccaaaatacaaatggggatctgtgactcatcagagtgtgggggttgtgaaagctttcagtgccaatggaaaagatatcattgtcgactttccccagcagtctcactggactgggttgctatcagaaatggagttggtacccagtattcatcctggggttacgtgtgatggatgtcagatgtttcctatcaatggatccagattcaaatgcagaaactgtgatgactttgatttttgtgaaacgtgtttcaagaccaaaaaacacaataccaggcatacatttggcagaataaatgaaccaggtcagtctgcggtattttgtggccgttctggaaaacagctgaagcgttgccacagcagccagccaggcatgctgctggacagctggtcccgcatggtgaagagcctgaatgtgtcgtcctccgtgaaccaggcatcccgtctcattgacggcagcgagccctgctggcagtcatcggggtcgcaaggaaagcactggattcgtttggagattttcccagatgttcttgttcatagattaaaaatgatcgtagatcctgctgacagtagctacatgccgtccctggttgtagtgtcaggtggaaattccctgaataaccttattgaactaaagacaatcaatattaacccttctgacaccacagtgccccttctgaatgactacacagagtatcacaggtatattgaaattgctataaagcagtgcaggagctcaggaatcgattgtaaaatccatggtctcatcctgctgggacggatccgtgcagaagaggaagatttggctgcagttcctttcttagcttcggataatgaagaggaggaggatgagaaaggcaacagcggaagcctcattagaaagaaggctgctgggctggaatcagcagctacgataagaaccaaggtgtttgtgtggggcctgaatgacaaggaccagctgggcgggctgaaaggctccaagataaaggttccttcgttctctgagacactgtcagctttgaatgtggtacaggtggctggtggatctaaaagtttgtttgcagtgactgtggaagggaaggtgtatgcctgtggagaagccacgaatggccggctggggctgggcatttccagcgggacggtgcccatcccacggcagatcacagctctcagcagctacgtggtcaagaaggtggctgttcactcaggtggccggcacgcgacggctttaactgtcgatggaaaagtgttttcgtggggcgaaggtgacgatggaaaacttggacacttcagcagaatgaactgtgacaaaccaaggctgatcgaggccctgaaaaccaagcgtatccgggatatcgcctgtgggagctcgcacagcgcagccctcacatccagcggagaactgtacacctggggcctcggcgagtacggccggctgggacatggggataatacgacacagctaaagcccaaaatggtgaaagtccttctcggtcacagagtaatccaggttgcatgtgggagtagagacgcgcagaccctggctctgaccgatgaaggtttggtattttcctggggtgatggtgactttggaaaactgggccggggcggaagtgaaggctgtaacattccccagaacattgagagactaaatggacagggggtgtgccagattgagtgtggagctcagttctccctggcgctcaccaagtctggagtggtgtggacatggggaaagggggattacttcagattgggccacggctctgacgtgcacgtgcggaaaccacaggtggtggaagggctgagagggaagaagatcgtgcatgtggctgtcggggccctgcactgcctggcggtcacggactcggggcaggtgtatgcttggggtgacaacgaccacggccagcagggcaatggcacgaccacggttaacaggaagcccacactcgtgcaaggcttagaaggccagaagatcacacgcgtggcttgtgggtcgtcccacagtgtggcgtggacaactgtggatgtggccacgccctctgtccacgagcccgtcctcttccagactgcaagagacccgttaggtgcttcctacttaggcgtgccctcagatgctgattcttctgctgccagtaataaaataagtggtgcaagtaattctaagccaaatcgcccttctcttgccaagattctcttgtcattggatggaaatctggccaaacagcaggccttatcgcatattcttacagcattgcaaatcatgtatgccagagatgctgttgtcggggccctgatgccggccgccatgatcgccccggtggagtgcccctcgttctcctcggcggccccttccgacgcatctgcgatggctagtcccatgaatggagaagaatgcatgctggctgttgatatcgaagacagactgagtccaaatccatggcaagaaaagagagagattgtttcctctgaggacgcagtgaccccctctgcagtgactccgtcggccccctcagcctccgctcggccttttatcccagtgacggatgacctgggagctgcaagcatcattgcagaaaccatgaccaaaaccaaagaggatgttgaaagccaaaataaagcagcaggtccggagcctcaggccttggatgagttcaccagtctgctgattgcggatgacactcgtgtggtggtagacctgctcaagctgtcagtgtgcagccgggccggggacaggggcagggatgtgctctccgcggtgctttccggcatggggaccgcctacccacaggtggcagatatgctgttggagctctgtgtcaccgagttggaggatgtggccacagactcgcagagcggccgcctctcttctcagcctgtggtggtggagagtagccacccttacaccgacgacacctccaccagtggcacagtgaagataccaggtgcagaaggactcagggtagaatttgaccggcagtgctccacagagaggcgccacgaccctctcacagtcatggacggcgtcaacaggatcgtctccgtgcggtcaggccgagagtggtccgactggtccagcgagctgcgcatcccaggggatgagttaaagtggaagttcatcagcgatgggtctgtgaatggctggggctggcgcttcaccgtctatcccatcatgccagctgctggccctaaagaactcctctctgaccgctgcgtcctctcctgtccatccatggacttggtgacgtgtctgttagacttccgactcaaccttgcctctaacagaagcatcgtccctcgccttgcggcctcgctggcagcttgtgcacagctgagtgccctagctgccagtcacagaatgtgggcccttcagagactgaggaagctgcttacaactgaatttgggcagtcaattaacataaataggctgcttggagaaaatgatggggaaacaagagctttgagttttacaggtagtgctcttgctgctttggtgaaaggtcttccagaagctttgcaaaggcagtttgaatatgaagatcctattgtgaggggtggcaaacagctgctccacagcccattctttaaggtactagtagctcttgcttgtgacctggagctggacactctgccttgctgtgccgagacgcacaagtgggcctggttccggaggtactgcatggcctcccgtgttgctgtggcccttgacaaaagaacaccgttgccccgtctgtttcttgatgaggtggctaagaaaattcgtgaattaatggcagacagcgaaaacatggatgttctgcatgagagccatgacatttttaaaagagagcaagacgaacaacttgtgcagtggatgaacaggcgaccagatgactggactctctctgctggtggcagtggaacaatttatggatggggacataatcacaggggccagctcgggggcattgaaggcgcaaaagtcaaagttcccactccctgtgaagcccttgcaactctcagacccgtgcagttaatcggaggggaacagaccctctttgctgtgacggctgatgggaagctgtatgccactgggtatggtgcaggtggcagactaggcattggagggacagagtcggtgtccaccccaacattgcttgaatccattcagcatgtgtttattaagaaagtagctgtgaactctggaggaaagcactgccttgccctgtcttcagaaggagaagtttactcttggggtgaggcagaagatgggaagttggggcatggcaacagaagtccgtgtgaccgccctcgtgtcatcgagtctctgagaggaattgaagtggtcgatgttgctgctggcggagcccacagcgcctgtgtcacagcagccggggacctctacacatggggcaaaggccgctacggccggctggggcacagcgacagtgaggaccagctgaagccgaagctggtggaggcgctgcagggccaccgtgtggttgacatcgcctgtggcagtggagatgcccagaccctctgcctcacagatgacgacactgtctggtcctggggggacggggactacggcaagctcggccggggaggcagcgatggctgtaaagtgcctatgaagattgattctcttactggtcttggagtagttaaagtggaatgcggatcccagttttctgttgcccttaccaaatctggagctgtttatacctggggcaaaggcgattatcacaggttgggccatggatcagatgaccatgttcgaaggcctcggcaggtccaagggttgcaggggaagaaagtcatcgccatcgccactggctccctgcactgtgtgtgctgcacagaggatggtgaggtttatacatggggcgacaatgatgagggacaactgggagacggaaccaccaatgccatccagaggcctcggttggtagctgcccttcagggtaagaaggtcaaccgtgtggcctgtggctcagcacataccctcgcctggtcgaccagcaagcccgccagtgctggcaaactccctgcacaggtccccatggagtacaatcacctgcaggagatccccatcattgcgctgaggaaccgtctgctgctgctgcaccacctctccgagctcttctgcccctgcatccccatgttcgacctggaaggctcgctcgacgaaactggactcgggccttctgttgggttcgacactctccgaggaattctgatatcccagggaaaggaggcggctttccggaaagtagtacaagcaactatggtacgcgatcgtcagcatggccccgtcgtggagctgaaccgcatccaggtcaaacgatcaaggagcaaaggcgggctggccggccccgacggcaccaagtctgtctttgggcagatgtgtgctaagatgagctcgtttggtcccgacagcctcctccttcctcaccgtgtctggaaagtcaagtttgtgggtgaatctgtggatgactgtgggggcggctacagcgagtccatagctgagatctgtgaggagctgcagaacggactcacgcccctgctgatcgtgacacccaacgggagggatgagtctggggccaaccgagactgctacctgctcagcccggccgccagagcacccgtgcacagcagcatgttccgcttcctgggtgtgttgctgggcattgccatccgaaccgggagtcccctgagcctcaaccttgccgagcctgtctggaagcagctggctgggatgagcctcaccatcgcggacctcagtgaggttgataaggattttattcctggactcatgtacatccgagacaatgaagccacctcagaggagtttgaagccatgagcctgcccttcacagtgccaagtgccagtggccaggacattcagttgagctccaagcacacacacatcaccctggacaaccgcgcggagtacgtgcggctggcgataaactatagactccatgaatttgatgagcaggtggctgctgttcgggaaggaatggcccgcgttgtgcctgttcccctcctctctctgttcaccggctacgaactggagacgatggtgtgtggcagccctgacatcccgctgcaccttctcaagtcggtggccacctataaaggcatcgagccttccgcatcgctgatccagtggttctgggaggtgatggagtccttctccaacacagagcgctctcttttccttcgcttcgtctggggccggacgaggctgcccaggaccatcgccgacttccggggccgagacttcgtcatccaggtgttggataaatacaaccctccagaccacttcctccctgagtcctacacctgtttcttcttgctgaagctgcccaggtattcctgcaagcaggtgctggaggagaagctcaagtacgccatccacttctgcaagtccatagacacagatgactacgctcgcatcgcacttacaggagagccagccgccgacgacagcagcgacgattcagataacgaggatgtcgactcctttgcttcggactctacacaagattatttaacaggacactaagatggggaaacgtcctcgtgagatgagagcctgagccaggcagcagagcactcgctgctgtgtagactgtaggctgcctggtgtgtctgatgagaagcgtccgtcctcgagccaggcgggaggagggagtggagagactgactggccgtgatgggaatgacagtgagaaggtccgcctgtgcgcgtggaacactgtggacgctcgacttccaagggtcttctcacccgtaatgctgcattacatgtaggactgtgtttactaaagtgtgtaaatgtttatataaataccaaattgcagcatccccaaaatgaataaagcctttttacttgtgggtgcaatcgatttttttttctttctcctttctttcaagtgtcgtgagtcgtcttgattgtatattggaaataactgtgtaacaaatcgtattataaatatttcaattaattttactctgaatttgtttattaaaagacttttgaacatgaaatgattagtattacttgaatgcatccagaggatatttaaaccaaaatgaaaaaccagaaggccatttggtgtcccctctcccaggtgtccccttgtagcatatgcattatgtcatctgaattgaggcctttctgtgaacagcatcataacttctatcatggaaagtgtactatatataatgtttgtgtcatgtatatgcctaaattttaatcatctataaataaaacatctgacat

SEQ ID NO: 285438 - DNA, 6589 bp, Homo sapiens
ccacctcccggggtcaagcaattctcatgcctcagctggattatagatattcaccaccatgcctggctaatttctgtatttttagtacagacagggttttgccatgttgcccaggctggtctcgaactcctgggctcaagtgatccgcccgccttggcctcccaaagttctgggattacaggtgtgagctaccatgcccagcctaacaattctgttttttagcaattcactttaagtttttgcaaagttttcagcttagttttcaccataaaaataaaaatatttacttttgcaattgcattttatccctttatgtaatatttaatcaacttacataattatgctgatatgcagttgggaacacatacagtggtacagttgaccaccggtcagcatggtggcaacagaagcaggcaggcaaacgggagggtggtccgcaagcatctgcaatgtgccaggccccagttactgtgtgttatggaggcagtgggcctttggttctgtgaagcagttaacattgagcccaggctagtaagagtcaggactttgtttttcatggaatgaaaacaaaaagaaaactcagctttccctttctttattgcttctatgtcaacctcaagtgtcacctagatttcgtttgctcagtagccacccttgtagtgttaactatgtacctgagtggtctagattagtgtgcgtttttcattatattatttgcagtcatttaaaatttttcgttaaaatgcagagttgttgttatttaaatgcatttgtattttttagggcaagtgtggtcttggggagatggtgactatgggaaattgggcagaggtggtagtgatggctgcaaaaccccaaagctgattgaaaagcttcaagacttggatgtggtcaaagtccgctgtggaagtcagttttccattgctttgacgaaagatggccaagtttattcatggggaaaaggtgacaaccagagacttggacatggaacagaggaacatgttcgttatccaaaactcttagaaggcttgcaagggaagaaggtgattgatgtggctgcaggctccacccactgcctggctctgactgaggacagcgaggtccacagctgggggagcaacgaccagtgccagcactttgacaccttgcgcgtgaccaagccagaacctgcagcattgccaggactggacaccaaacacatagtgggaattgcctgtgggcctgcccagagctttgcttggtcatcatgttctgagtggtccattggcctccgtgtcccttttgtggtggacatctgctcaatgacttttgagcagctagatctcctgcttcggcaggtgagtgaggggatggatggctccgcggactggcccccgccccaggagaaagagtgtgtggccgtggcaacgctgaatcttctacgacttcagttgcatgctgccattagtcaccaggttgacccggaattccttggtttaggtctgggcagcatcctcctgaacagcctgaagcagacggtggtgaccctggccagcagtgcgggcgtgctgagcaccgtgcagtcggccgcccaggccgtgctgcagagtggctggtccgtgctgctgcccaccgcggaggagcgggcccgggcactctctgctctcctgccctgcgcagtttcaggcaatgaagtgaacataagtccaggtcgtcgattcatgattgatcttctggtgggcagcttgatggctgatggagggttggagtcagccttacacgcagccattactgcagagatccaggatattgaagccaaaaaagaagcacagaaggaaaaagaaattgatgaacaggaagcgaatgcctcaacatttcatagaagcaggactccactggataaagaccttattaatacggggatctgtgagtcttctggcaaacagtgtttgcctctggttcagctcatacaacagcttcttagaaacatcgcttctcagactgtagccagattgaaagatgttgcccgtcggatttcatcatgtctggactttgagcaacacagtcgtgaaagatctgcttcattggattggttactgcgtttccaacgtttgcttattagtaaactttatccaggagaaagtattggtcagacctcagatatttctagtccagagctaatgggtgttggttccttgctgaagaagtacacagccctcctgtgcacgcacattggagatatactgcctgtggccgccagcattgcttctaccagctggcggcacttcgcggaggtggcttacattgtggaaggggactttactggtgttctccttccagaactagtagtttctatagtgcttctgctcagtaaaaatgctgatctcatgcaagaggctggagctgtacctctgctgggtggcctgttggaacatctggatcggttcaaccatctggcaccaggaaaggaacgggatgatcatgaagagttagcctggcctggcataatggagtcattttttacaggtcagaactgtagaaataatgaggaagtgacacttatacgcaaagctgatttggagaaccataataaagatggaggcttctggactgtgattgacgggaaggtgtatgatataaaggacttccagacacagtcgttaacaggaaatagtattcttgctcagtttgcaggggaagacccagtggtagctttggaagctgctttgcagtttgaagacacccgggaatccatgcacgcgttttgtgttggccagtatttggagcctgaccaagaaatcgtcaccataccagatctggggagtctctcttcacctctgatagacacagagaggaatctgggcctgcttctcggattacacgcttcgtatttggcaatgagcacaccgctgtctcctgtcgagattgaatgtgccaaatggcttcagtcatccatcttctctggaggcctgcagaccagccagatccactacaggtacaacgaggagaaagacgaggaccactgcagctccccagggggcacacctgccagcaaatctcgactctgctcccacagacgggccctgggggaccattcccaggcatttctgcaagccattgcagacaacaacattcaggatcacaacgtgaaggactttttgtgtcaaatagaaaggtactgtaggcagtgccatttgaccacaccgatcatgtttccccccgagcatcccgtggaagaggtcggtcgcttgttgttatgttgcctcttaaaacatgaagatttaggtcatgtggcattatctttagttcatgcaggtgcacttggtattgagcaagtaaagcacagaacgttgcctaagtcagtggtggatgtttgtagagttgtctaccaagcaaaatgttcgctcattaagactcatcaagaacagggccgttcttacaaggaggtctgcgctcctgtcatcgaacgtttgagattcctctttaatgaattgagacctgctgtttgtaatgacctctctataatgtctaagtttaaattgttaagttctttgccccgttggaggaggatagctcaaaagataattcgagaacgaaggaaaaagagagttcctaagaagccagaatctatggatgatgaagaaaaaattggaaacgaagagagtgatttagaagaagcttgcattttgcctcatagtccaataaatgtggacaagagacccattgcaattaaatcacccaaggacaaatggcagccgctgttgagtactgttacaggtgttcacaaatacaagtggttgaagcagaatgtgcagggtctttatccgcagtctccactcctcagtacaattgctgaatttgcccttaaagaagagccagtggatgtggaaaaaatgagaaagtgcctactaaaacagttggagagagcagaggttcgcctggaagggatagatacaattttaaaactggcgagcaagaatttcttacttccatctgtgcagtatgcgatgttttgtggatggcaaagacttattcctgagggaatcgatataggggaacctcttactgattgtttaaaggatgttgatttgatcccgccttttaatcggatgctgctggaagtcacctttggcaagctgtacgcttgggctgtacagaacattcgaaatgttttgatggatgccagtgccacatttaaagagcttggtatccagccggttcccctccaaaccatcaccaatgagaacccgtcaggaccgagcctggggaccatcccgcaagcccgcttcctcctggtgatgctcagcatgctcaccctgcagcacggcgcaaacaacctcgaccttctgctcaattccggcatgctggccctcacgcagacggcactgcgcctgattggccccagttgtgacaacgttgaggaagatatgaatgcttctgctcaaggtgcttctgccacagttttggaagaaacaaggaaggaaacggctcctgtgcagctccctgtttcaggaccagaactggctgccatgatgaagattggaacaagggtcatgagaggtgtggactggaaatggggcgatcaggatgggcctcctccaggcctaggccgcgtgattggtgagctgggagaggacggatggataagagtccagtgggacacaggcagcaccaactcctacaggatggggaaagaaggaaaatacgacctcaagctggcagagctgccggctgctgcacagccctcagcagaggattcggacacagaggatgactctgaagccgaacaaactgaaaggaacattcaccccactgcaatgatgtttaccagcactattaacttactgcagactctttgtctgtctgctggagttcatgctgagatcatgcagagcgaagccaccaagactttatgcggactgctgcgaatgttagtggaaagcggaacgacggacaagacatcttctccaaacaggctggtgtacagggagcaacaccggagctggtgcacgctggggtttgtgcggagcatcgctctcacgccgcaggtatgcggcgccctcagctccccgcagtggatcacgctgctcatgaaggtcgtggaagggcacgcacccttcactgccacctcgctgcagaggcagatcttagctgtgcatttgttgcaagcagtccttccatcatgggacaagaccgaaagggcgagggacatgaaatgcctcgtggagaagctgtttgacttcttgggaagcttgctcactacctgctcctctgacgtgccattactcagagagtccacgctgaggcggcgcagggtgcgcccgcaggcctcgctgactgccacccacagcagcacactggcggaggaggtggtggcactgctgcgcacgctgcactccctgactcagtggaatgggctcatcaacaagtacatcaactcccagctccgctccatcacccacagctttgtgggaaggccttccgaaggggcccagttagaggactacttccccgactccgagaaccctgaagtggggggcctcatggcagtcctggctgtgattggaggcatcgatggtcgcctgcgcctgggcggtcaagttatgcacgatgagtttggagaaggcactgtgactcgcatcaccccaaagggcaaaatcaccgtgcagttctctgacatgcggacgtgtcgcgtttgcccattgaatcagctgaaaccactccctgccgtggcctttaatgtgaacaacctgcccttcacagagcccatgctgtctgtctgggctcagttggtgaacctcgctggaagcaagttagaaaagcacaaaataaagaaatcgactaaacaggcctttgcaggacaagtggacctggacctgctgcggtgccagcagttgaagctatacatcctgaaagcaggtcgggcgctgctctcccaccaggataaactgcggcagatcctgtctcagccagctgttcaggagactggaactgttcacacagatgatggagcagtggtatcacctgaccttggggacatgtctcctgaagggccgcagccccccatgatcctcttgcagcagctgctggcctcggccacccagccgtctcctgtgaaggccatatttgataaacaggaacttgaggtacagccatgcagccttgacagtttttaatccacagcactaaattttgaacactttttttctagatgtatattttcttaaggatctattctgaatgttaaatgatagtacgcaaataattctaatgattcattggggtttaaccatgtttgtgcatagtctgcagaacattataatactaaagactgagagggttgaagtttaaccttattttgggtttgtgtaaattgtgaaaaaatattaactagatgcagcatgggttaaatgctcacatcttcatgaagggatctttttccaggaagtagaattattcaaagaggctcgtcaggactctggcagccgtttgtttcattcactcaggagcctcttgggggtgctctggtgccgccagcctctccgctctctccatgctgtggagcaggtgagggcagcagcgaggcacagggtcagggctacgggacgtt

SEQ ID NO: 285439 - DNA, 15335 bp, Homo sapiens
ttttcttttctggctttcgggagtgtctttgtaaactattaaaaagcgttaggtcttcagcgtatgtgtttacttgcaggcctgagacctgggaggaagctggagaaaagatgccctctgaatctttctgtttggctgcccaggctcgcctcgactccaaatggttgaaaacagatatacagcttgcattcacaagagatgggctctgtggtctgtggaatgaaatggttaaagatggagaaattgtatacactggaacagaatcaacccagaacggagagctccctcctagaaaagatgatagtgtcgaaccaagtggaacaaagaaagaagatctgaatgacaaagagaaaaaagatgaagaagaaactcctgcacctatatatagggccaagtcaattctggacagctgggtatggggcaagcaaccagatgtgaatgaactgaaggagtgtctttctgtgctggttaaagagcagcaggccctggccgtccagtcagccaccaccaccctctcagccctgcgactcaagcagaggctggtgatcttggagcgctatttcattgccttgaatagaaccgtttttcaggagaatgtcaaagttaagtggaaaagcagcggtatttctctgcctcctgtggacaaaaaaagttcccggcctgcgggcaaaggtgtggaggggctcgccagagtgggatcccgagcggcgctgtcttttgcctttgccttcctgcgcagggcctggcgatcaggcgaggatgcggacctctgcagtgagctgttgcaggagtccctggacgccctgcgagcacttcccgaggcctcgctctttgacgagagcaccgtgtcctctgtgtggctggaggtggtggagagagcgaccaggttcctcaggtccgtcgtgacgggggatgttcacggaacgccagccaccaaagggccaggaagcatccccctgcaggaccagcacttggccctggccatcctgctggagctggctgtgcagagaggcacgctgagccaaatgttgtctgccatcctgttgttgcttcagctgtgggacagcggggcacaggagactgacaatgagcgttccgcccagggcaccagcgccccacttttgcccttgctgcaaaggttccagagcatcatttgcaggaaggatgcaccccactccgagggcgacatgcaccttttgtctggccctctgagccccaatgagagtttcctgaggtacctcacccttccacaagacaacgagcttgccattgatctgcgacaaacggcggttgttgtcatggcccatttagaccgtctggctacgccctgtatgcctccgctgtgtagctctccgacatctcataagggatcattgcaagaggtcataggttgggggttaataggatggaaatactatgccaatgtgattggtccaatccagtgcgaaggcctggccaacctgggagtcacacagattgcctgtgcagagaagcgtttcctgattctgtcacgcaatggccgcgtgtacacacaggcctataatagtgacacgctggccccacagctggtccaaggccttgcctccagaaacattgtaaaaattgctgcccattctgatggtcaccactacctagccttggctgctactggagaggtgtactcctggggctgtggggacggcggacggctgggccatggggacactgtgcctttggaggagcctaaggtgatctccgccttctctggaaagcaggccgggaagcacgtggtgcacatcgcttgcgggagcacttacagtgcggccatcactgccgagggggagctgtacacctggggccgcgggaactacggccggctgggccatggctccagtgaggacgaggccattccgatgctggtagccgggcttaaaggactgaaggtcatcgatgtggcgtgtgggagtggggatgctcaaaccctggctgtcactgagaacgggcaagtgtggtcttggggagatggtgactatgggaaattgggcagaggtggtagtgatggctgcaaaaccccaaagctgattgaaaagcttcaagacttggatgtggtcaaagtccgctgtggaagtcagttttccattgctttgacgaaagatggccaagtttattcatggggaaaaggtgacaaccagagacttggacatggaacagaggaacatgttcgttatccaaaactcttagaaggcttgcaagggaagaaggtgattgatgtggctgcaggctccacccactgcctggctctgactgaggacagcgaggtccacagctgggggagcaacgaccagtgccagcactttgacaccttgcgcgtgaccaagccagaacctgcagcattgccaggactggacaccaaacacatagtgggaattgcctgtgggcctgcccagagctttgcttggtcatcatgttctgagtggtccattggcctccgtgtcccttttgtggtggacatctgctcaatgacttttgagcagctagatctcctgcttcggcaggtgagtgaggggatggatggctccgcggactggcccccgccccaggagaaagagtgtgtggccgtggcaacgctgaatcttctacgacttcagttgcatgctgccattagtcaccaggttgacccggaattccttggtttaggtctgggcagcatcctcctgaacagcctgaagcagacggtggtgaccctggccagcagtgcgggcgtgctgagcaccgtgcagtcggccgcccaggccgtgctgcagagtggctggtccgtgctgctgcccaccgcggaggagcgggcccgggcactctctgctctcctgccctgcgcagtttcaggcaatgaagtgaacataagtccaggtcgtcgattcatgattgatcttctggtgggcagcttgatggctgatggagggttggagtcagccttacacgcagccattactgcagagatccaggatattgaagccaaaaaagaagcacagaaggaaaaagaaattgatgaacaggaagcgaatgcctcaacatttcatagaagcaggactccactggataaagaccttattaatacggggatctgtgagtcttctggcaaacagtgtttgcctctggttcagctcatacaacagcttcttagaaacatcgcttctcagactgtagccagattgaaagatgttgcccgtcggatttcatcatgtctggactttgagcaacacagtcgtgaaagatctgcttcattggattggttactgcgtttccaacgtttgcttattagtaaactttatccaggagaaagtattggtcagacctcagatatttctagtccagagctaatgggtgttggttccttgctgaagaagtacacagccctcctgtgcacgcacattggagatatactgcctgtggccgccagcattgcttctaccagctggcggcacttcgcggaggtggcttacattgtggaaggggactttactggtgttctccttccagaactagtagtttctatagtgcttctgctcagtaaaaatgctgatctcatgcaagaggctggagctgtacctctgctgggtggcctgttggaacatctggatcggttcaaccatctggcaccaggaaaggaacgggatgatcatgaagagttagcctggcctggcataatggagtcattttttacaggtcagaactgtagaaataatgaggaagtgacacttatacgcaaagctgatttggagaaccataataaagatggaggcttctggactgtgattgacgggaaggtgtatgatataaaggacttccagacacagtcgttaacaggaaatagtattcttgctcagtttgcaggggaagacccagtggtagctttggaagctgctttgcagtttgaagacacccgggaatccatgcacgcgttttgtgttggccagtatttggagcctgaccaagaaatcgtcaccataccagatctggggagtctctcttcacctctgatagacacagagaggaatctgggcctgcttctcggattacacgcttcgtatttggcaatgagcacaccgctgtctcctgtcgagattgaatgtgccaaatggcttcagtcatccatcttctctggaggcctgcagaccagccagatccactacaggtacaacgaggagaaagacgaggaccactgcagctccccagggggcacacctgccagcaaatctcgactctgctcccacagacgggccctgggggaccattcccaggcatttctgcaagccattgcagacaacaacattcaggatcacaacgtgaaggactttttgtgtcaaatagaaaggtactgtaggcagtgccatttgaccacaccgatcatgtttccccccgagcatcccgtggaagaggtcggtcgcttgttgttatgttgcctcttaaaacatgaagatttaggtcatgtggcattatctttagttcatgcaggtgcacttggtattgagcaagtaaagcacagaacgttgcctaagtcagtggtggatgtttgtagagttgtctaccaagcaaaatgttcgctcattaagactcatcaagaacagggccgttcttacaaggaggtctgcgctcctgtcatcgaacgtttgagattcctctttaatgaattgagacctgctgtttgtaatgacctctctataatgtctaagtttaaattgttaagttctttgccccgttggaggaggatagctcaaaagataattcgagaacgaaggaaaaagagagttcctaagaagccagaatctatggatgatgaagaaaaaattggaaacgaagagagtgatttagaagaagcttgcattttgcctcatagtccaataaatgtggacaagagacccattgcaattaaatcacccaaggacaaatggcagccgctgttgagtactgttacaggtgttcacaaatacaagtggttgaagcagaatgtgcagggtctttatccgcagtctccactcctcagtacaattgctgaatttgcccttaaagaagagccagtggatgtggaaaaaatgagaaagtgcctactaaaacagttggagagagcagaggttcgcctggaagggatagatacaattttaaaactggcgagcaagaatttcttacttccatctgtgcagtatgcgatgttttgtggatggcaaagacttattcctgagggaatcgatataggggaacctcttactgattgtttaaaggatgttgatttgatcccgccttttaatcggatgctgctggaagtcacctttggcaagctgtacgcttgggctgtacagaacattcgaaatgttttgatggatgccagtgccacatttaaagagcttggtatccagccggttcccctccaaaccatcaccaatgagaacccgtcaggaccgagcctggggaccatcccgcaagcccgcttcctcctggtgatgctcagcatgctcaccctgcagcacggcgcaaacaacctcgaccttctgctcaattccggcatgctggccctcacgcagacggcactgcgcctgattggccccagttgtgacaacgttgaggaagatatgaatgcttctgctcaaggtgcttctgccacagttttggaagaaacaaggaaggaaacggctcctgtgcagctccctgtttcaggaccagaactggctgccatgatgaagattggaacaagggtcatgagaggtgtggactggaaatggggcgatcaggatgggcctcctccaggcctaggccgcgtgattggtgagctgggagaggacggatggataagagtccagtgggacacaggcagcaccaactcctacaggatggggaaagaaggaaaatacgacctcaagctggcagagctgccggctgctgcacagccctcagcagaggattcggacacagaggatgactctgaagccgaacaaactgaaaggaacattcaccccactgcaatgatgtttaccagcactattaacttactgcagactctttgtctgtctgctggagttcatgctgagatcatgcagagcgaagccaccaagactttatgcggactgctgcgaatgttagtggaaagcggaacgacggacaagacatcttctccaaacaggctggtgtacagggagcaacaccggagctggtgcacgctggggtttgtgcggagcatcgctctcacgccgcaggtatgcggcgccctcagctccccgcagtggatcacgctgctcatgaaggtcgtggaagggcacgcacccttcactgccacctcgctgcagaggcagatcttagctgtgcatttgttgcaagcagtccttccatcatgggacaagaccgaaagggcgagggacatgaaatgcctcgtggagaagctgtttgacttcttgggaagcttgctcactacctgctcctctgacgtgccattactcagagagtccacgctgaggcggcgcagggtgcgcccgcaggcctcgctgactgccacccacagcagcacactggcggaggaggtggtggcactgctgcgcacgctgcactccctgactcagtggaatgggctcatcaacaagtacatcaactcccagctccgctccatcacccacagctttgtgggaaggccttccgaaggggcccagttagaggactacttccccgactccgagaaccctgaagtggggggcctcatggcagtcctggctgtgattggaggcatcgatggtcgcctgcgcctgggcggtcaagttatgcacgatgagtttggagaaggcactgtgactcgcatcaccccaaagggcaaaatcaccgtgcagttctctgacatgcggacgtgtcgcgtttgcccattgaatcagctgaaaccactccctgccgtggcctttaatgtgaacaacctgcccttcacagagcccatgctgtctgtctgggctcagttggtgaacctcgctggaagcaagttagaaaagcacaaaataaagaaatcgactaaacaggcctttgcaggacaagtggacctggacctgctgcggtgccagcagttgaagctatacatcctgaaagcaggtcgggcgctgctctcccaccaggataaactgcggcagatcctgtctcagccagctgttcaggagactggaactgttcacacagatgatggagcagtggtatcacctgaccttggggacatgtctcctgaagggccgcagccccccatgatcctcttgcagcagctgctggcctcggccacccagccgtctcctgtgaaggccatatttgataaacaggaacttgaggctgctgcactggccgtttgccagtgcttggctgtggagtccactcacccttcgagcccaggatttgaagactgcagctccagtgaggccaccacgcctgtcgccgtgcagcacatccgccctgccagagtgaagaggcgcaagcagtcgcccgttcccgctctgccgatcgtggtgcagctcatggagatgggattttccagaaggaacatcgagtttgccctgaagtctctcactggtgcttccgggaatgcatccagcttgcctggtgtggaagccttggtcgggtggctgctggaccactccgacatacaggtcacggagctctcagatgcagacacggtgtccgacgagtattctgacgaggaggtggtggaggacgtggatgatgccgcctactccatgtctactggtgctgttgtgacggagagccagacgtacaaaaaacgagctgatttcttgagtaatgatgattatgctgtatatgtgagagagaatattcaggtgggaatgatggttagatgctgccgagcgtatgaagaagtgtgcgaaggtgatgttggcaaagtcatcaagctggacagagatggattgcatgatctcaatgtgcagtgtgactggcagcagaaagggggcacctactgggttaggtacattcatgtggaacttataggctatcctccaccaagttcttcttctcacatcaagattggtgataaagtgcgggtcaaagcctctgtcaccacaccaaaatacaaatggggatctgtgactcatcagagtgtgggggttgtgaaagctttcagtgccaatggaaaagatatcattgtcgactttccccagcagtctcactggactgggttgctatcagaaatggagttggtacccagtattcatcctggggttacgtgtgatggatgtcagatgtttcctatcaatggatccagattcaaatgcagaaactgtgatgactttgatttttgtgaaacgtgtttcaagaccaaaaaacacaataccaggcatacatttggcagaataaatgaaccaggtcagtctgcggtattttgtggccgttctggaaaacagctgaagcgttgccacagcagccagccaggcatgctgctggacagctggtcccgcatggtgaagagcctgaatgtgtcgtcctccgtgaaccaggcatcccgtctcattgacggcagcgagccctgctggcagtcatcggggtcgcaaggaaagcactggattcgtttggagattttcccagatgttcttgttcatagattaaaaatgatcgtagatcctgctgacagtagctacatgccgtccctggttgtagtgtcaggtggaaattccctgaataaccttattgaactaaagacaatcaatattaacccttctgacaccacagtgccccttctgaatgactacacagagtatcacaggtatattgaaattgctataaagcagtgcaggagctcaggaatcgattgtaaaatccatggtctcatcctgctgggacggatccgtgcagaagaggaagatttggctgcagttcctttcttagcttcggataatgaagaggaggaggatgagaaaggcaacagcggaagcctcattagaaagaaggctgctgggctggaatcagcagctacgataagaaccaaggtgtttgtgtggggcctgaatgacaaggaccagctgggcgggctgaaaggctccaagataaaggttccttcgttctctgagacactgtcagctttgaatgtggtacaggtggctggtggatctaaaagtttgtttgcagtgactgtggaagggaaggtgtatgcctgtggagaagccacgaatggccggctggggctgggcatttccagcgggacggtgcccatcccacggcagatcacagctctcagcagctacgtggtcaagaaggtggctgttcactcaggtggccggcacgcgacggctttaactgtcgatggaaaagtgttttcgtggggcgaaggtgacgatggaaaacttggacacttcagcagaatgaactgtgacaaaccaaggctgatcgaggccctgaaaaccaagcgtatccgggatatcgcctgtgggagctcgcacagcgcagccctcacatccagcggagaactgtacacctggggcctcggcgagtacggccggctgggacatggggataatacgacacagctaaagcccaaaatggtgaaagtccttctcggtcacagagtaatccaggttgcatgtgggagtagagacgcgcagaccctggctctgaccgatgaaggtttggtattttcctggggtgatggtgactttggaaaactgggccggggcggaagtgaaggctgtaacattccccagaacattgagagactaaatggacagggggtgtgccagattgagtgtggagctcagttctccctggcgctcaccaagtctggagtggtgtggacatggggaaagggggattacttcagattgggccacggctctgacgtgcacgtgcggaaaccacaggtggtggaagggctgagagggaagaagatcgtgcatgtggctgtcggggccctgcactgcctggcggtcacggactcggggcaggtgtatgcttggggtgacaacgaccacggccagcagggcaatggcacgaccacggttaacaggaagcccacactcgtgcaaggcttagaaggccagaagatcacacgcgtggcttgtgggtcgtcccacagtgtggcgtggacaactgtggatgtggccacgccctctgtccacgagcccgtcctcttccagactgcaagagacccgttaggtgcttcctacttaggcgtgccctcagatgctgattcttctgctgccagtaataaaataagtggtgcaagtaattctaagccaaatcgcccttctcttgccaagattctcttgtcattggatggaaatctggccaaacagcaggccttatcgcatattcttacagcattgcaaatcatgtatgccagagatgctgttgtcggggccctgatgccggccgccatgatcgccccggtggagtgcccctcgttctcctcggcggccccttccgacgcatctgcgatggctagtcccatgaatggagaagaatgcatgctggctgttgatatcgaagacagactgagtccaaatccatggcaagaaaagagagagattgtttcctctgaggacgcagtgaccccctctgcagtgactccgtcggccccctcagcctccgctcggccttttatcccagtgacggatgacctgggagctgcaagcatcattgcagaaaccatgaccaaaaccaaagaggatgttgaaagccaaaataaagcagcaggtccggagcctcaggccttggatgagttcaccagtctgctgattgcggatgacactcgtgtggtggtagacctgctcaagctgtcagtgtgcagccgggccggggacaggggcagggatgtgctctccgcggtgctttccggcatggggaccgcctacccacaggtggcagatatgctgttggagctctgtgtcaccgagttggaggatgtggccacagactcgcagagcggccgcctctcttctcagcctgtggtggtggagagtagccacccttacaccgacgacacctccaccagtggcacagtgaagataccaggtgcagaaggactcagggtagaatttgaccggcagtgctccacagagaggcgccacgaccctctcacagtcatggacggcgtcaacaggatcgtctccgtgcggtcaggccgagagtggtccgactggtccagcgagctgcgcatcccaggggatgagttaaagtggaagttcatcagcgatgggtctgtgaatggctggggctggcgcttcaccgtctatcccatcatgccagctgctggccctaaagaactcctctctgaccgctgcgtcctctcctgtccatccatggacttggtgacgtgtctgttagacttccgactcaaccttgcctctaacagaagcatcgtccctcgccttgcggcctcgctggcagcttgtgcacagctgagtgccctagctgccagtcacagaatgtgggcccttcagagactgaggaagctgcttacaactgaatttgggcagtcaattaacataaataggctgcttggagaaaatgatggggaaacaagagctttgagttttacaggtagtgctcttgctgctttggtgaaaggtcttccagaagctttgcaaaggcagtttgaatatgaagatcctattgtgaggggtggcaaacagctgctccacagcccattctttaaggtactagtagctcttgcttgtgacctggagctggacactctgccttgctgtgccgagacgcacaagtgggcctggttccggaggtactgcatggcctcccgtgttgctgtggcccttgacaaaagaacaccgttgccccgtctgtttcttgatgaggtggctaagaaaattcgtgaattaatggcagacagcgaaaacatggatgttctgcatgagagccatgacatttttaaaagagagcaagacgaacaacttgtgcagtggatgaacaggcgaccagatgactggactctctctgctggtggcagtggaacaatttatggatggggacataatcacaggggccagctcgggggcattgaaggcgcaaaagtcaaagttcccactccctgtgaagcccttgcaactctcagacccgtgcagttaatcggaggggaacagaccctctttgctgtgacggctgatgggaagctgtatgccactgggtatggtgcaggtggcagactaggcattggagggacagagtcggtgtccaccccaacattgcttgaatccattcagcatgtgtttattaagaaagtagctgtgaactctggaggaaagcactgccttgccctgtcttcagaaggagaagtttactcttggggtgaggcagaagatgggaagttggggcatggcaacagaagtccgtgtgaccgccctcgtgtcatcgagtctctgagaggaattgaagtggtcgatgttgctgctggcggagcccacagcgcctgtgtcacagcagccggggacctctacacatggggcaaaggccgctacggccggctggggcacagcgacagtgaggaccagctgaagccgaagctggtggaggcgctgcagggccaccgtgtggttgacatcgcctgtggcagtggagatgcccagaccctctgcctcacagatgacgacactgtctggtcctggggggacggggactacggcaagctcggccggggaggcagcgatggctgtaaagtgcctatgaagattgattctcttactggtcttggagtagttaaagtggaatgcggatcccagttttctgttgcccttaccaaatctggagctgtttatacctggggcaaaggcgattatcacaggttgggccatggatcagatgaccatgttcgaaggcctcggcaggtccaagggttgcaggggaagaaagtcatcgccatcgccactggctccctgcactgtgtgtgctgcacagaggatggtgaggtttatacatggggcgacaatgatgagggacaactgggagacggaaccaccaatgccatccagaggcctcggttggtagctgcccttcagggtaagaaggtcaaccgtgtggcctgtggctcagcacataccctcgcctggtcgaccagcaagcccgccagtgctggcaaactccctgcacaggtccccatggagtacaatcacctgcaggagatccccatcattgcgctgaggaaccgtctgctgctgctgcaccacctctccgagctcttctgcccctgcatccccatgttcgacctggaaggctcgctcgacgaaactggactcgggccttctgttgggttcgacactctccgaggaattctgatatcccagggaaaggaggcggctttccggaaagtagtacaagcaactatggtacgcgatcgtcagcatggccccgtcgtggagctgaaccgcatccaggtcaaacgatcaaggagcaaaggcgggctggccggccccgacggcaccaagtctgtctttgggcagatgtgtgctaagatgagctcgtttggtcccgacagcctcctccttcctcaccgtgtctggaaagtcaagtttgtgggtgaatctgtggatgactgtgggggcggctacagcgagtccatagctgagatctgtgaggagctgcagaacggactcacgcccctgctgatcgtgacacccaacgggagggatgagtctggggccaaccgagactgctacctgctcagcccggccgccagagcacccgtgcacagcagcatgttccgcttcctgggtgtgttgctgggcattgccatccgaaccgggagtcccctgagcctcaaccttgccgagcctgtctggaagcagctggctgggatgagcctcaccatcgcggacctcagtgaggttgataaggattttattcctggactcatgtacatccgagacaatgaagccacctcagaggagtttgaagccatgagcctgcccttcacagtgccaagtgccagtggccaggacattcagttgagctccaagcacacacacatcaccctggacaaccgcgcggagtacgtgcggctggcgataaactatagactccatgaatttgatgagcaggtggctgctgttcgggaaggaatggcccgcgttgtgcctgttcccctcctctctctgttcaccggctacgaactggagacgatggtgtgtggcagccctgacatcccgctgcaccttctcaagtcggtggccacctataaaggcatcgagccttccgcatcgctgatccagtggttctgggaggtgatggagtccttctccaacacagagcgctctcttttccttcgcttcgtctggggccggacgaggctgcccaggaccatcgccgacttccggggccgagacttcgtcatccaggtgttggataaatacaaccctccagaccacttcctccctgagtcctacacctgtttcttcttgctgaagctgcccaggtattcctgcaagcaggtgctggaggagaagctcaagtacgccatccacttctgcaagtccatagacacagatgactacgctcgcatcgcacttacaggagagccagccgccgacgacagcagcgacgattcagataacgaggatgtcgactcctttgcttcggactctacacaagattatttaacaggacactaagatggggaaacgtcctcgtgagatgagagcctgagccaggcagcagagcactcgctgctgtgtagactgtaggctgcctggtgtgtctgatgagaagcgtccgtcctcgagccaggcgggaggagggagtggagagactgactggccgtgatgggaatgacagtgagaaggtccgcctgtgcgcgtggaacactgtggacgctcgacttccaagggtcttctcacccgtaatgctgcattacatgtaggactgtgtttactaaagtgtgtaaatgtttatataaataccaaattgcagcatccccaaaatgaataaagcctttttacttgtgggtgcaatcgatttttttttctttctcctttctttcaagtgtcgtgagtcgtcttgattgtatattggaaataactgtgtaacaaatcgtattataaatatttcaattaattttactctgaatttgtttattaaaagacttttgaacatgaaatgattagtattacttgaatgcatccagaggatatttaaaccaaaatgaaaaaccagaaggccatttggtgtcccctctcccaggtgtccccttgtagcatatgcattatgtcatctgaattgaggcctttctgtgaacagcatcataacttctatcatggaaagtgtactatatataatgtttgtgtcatgtatatgcctaaattttaatcatctataaataaaacatctgacat

SEQ ID NO: 285440 - DNA, 8937 bp, Homo sapiens
tctggatctcccattcacatgtctggttggaggtgcagtgcatgcaaatcaccacatgtccgaaattcagctggctttctctagtagctgccgtttcccatcgtggtgaataaacctgtctgccagttagttgagccagtgtccgagcggcacctgcggccctccttccttcccaccccatgctctctgtgctgcttctgcggcctctgctatcagataagccttgggcattgctgccatcttcatcagttaaagagctagtggggctgacagattctctcagaggagtcttagaagaagagtgaaagcggctgaaacttcagcaacttggggaacatttgatcatattaatagtagctaacatggttctaaccgtgttaaacccattgaatcctgcgtcctatcaagttaggtgcctggagagcagggaaggaagacccaggaggcagaagatgcttacccagaagcaccgagtgtaactctgggaaaggcaagcccttcgtcacggacagtgtgtgcggtcggcagattcctgaagggcagagcgttactcgtcgccatgtggcggaggcttgctgctggcgaggagggagtctgagcagggcacgcccttctcactgagtctttccttccgcaggacaagtggacctggacctgctgcggtgccagcagttgaagctatacatcctgaaagcaggtcgggcgctgctctcccaccaggataaactgcggcagatcctgtctcagccagctgttcaggagactggaactgttcacacagatgatggagcagtggtatcacctgaccttggggacatgtctcctgaagggccgcagccccccatgatcctcttgcagcagctgctggcctcggccacccagccgtctcctgtgaaggccatatttgataaacaggaacttgaggctgctgcactggccgtttgccagtgcttggctgtggagtccactcacccttcgagcccaggatttgaagactgcagctccagtgaggccaccacgcctgtcgccgtgcagcacatccgccctgccagagtgaagaggcgcaagcagtcgcccgttcccgctctgccgatcgtggtgcagctcatggagatgggattttccagaaggaacatcgagtttgccctgaagtctctcactggtgcttccgggaatgcatccagcttgcctggtgtggaagccttggtcgggtggctgctggaccactccgacatacaggtcacggagctctcagatgcagacacggtgtccgacgagtattctgacgaggaggtggtggaggacgtggatgatgccgcctactccatgtctactggtgctgttgtgacggagagccagacgtacaaaaaacgagctgatttcttgagtaatgatgattatgctgtatatgtgagagagaatattcaggtgggaatgatggttagatgctgccgagcgtatgaagaagtgtgcgaaggtgatgttggcaaagtcatcaagctggacagagatggattgcatgatctcaatgtgcagtgtgactggcagcagaaagggggcacctactgggttaggtacattcatgtggaacttataggctatcctccaccaagttcttcttctcacatcaagattggtgataaagtgcgggtcaaagcctctgtcaccacaccaaaatacaaatggggatctgtgactcatcagagtgtgggggttgtgaaagctttcagtgccaatggaaaagatatcattgtcgactttccccagcagtctcactggactgggttgctatcagaaatggagttggtacccagtattcatcctggggttacgtgtgatggatgtcagatgtttcctatcaatggatccagattcaaatgcagaaactgtgatgactttgatttttgtgaaacgtgtttcaagaccaaaaaacacaataccaggcatacatttggcagaataaatgaaccaggtcagtctgcggtattttgtggccgttctggaaaacagctgaagcgttgccacagcagccagccaggcatgctgctggacagctggtcccgcatggtgaagagcctgaatgtgtcgtcctccgtgaaccaggcatcccgtctcattgacggcagcgagccctgctggcagtcatcggggtcgcaaggaaagcactggattcgtttggagattttcccagatgttcttgttcatagattaaaaatgatcgtagatcctgctgacagtagctacatgccgtccctggttgtagtgtcaggtggaaattccctgaataaccttattgaactaaagacaatcaatattaacccttctgacaccacagtgccccttctgaatgactacacagagtatcacaggtatattgaaattgctataaagcagtgcaggagctcaggaatcgattgtaaaatccatggtctcatcctgctgggacggatccgtgcagaagaggaagatttggctgcagttcctttcttagcttcggataatgaagaggaggaggatgagaaaggcaacagcggaagcctcattagaaagaaggctgctgggctggaatcagcagctacgataagaaccaaggtgtttgtgtggggcctgaatgacaaggaccagctgggcgggctgaaaggctccaagataaaggttccttcgttctctgagacactgtcagctttgaatgtggtacaggtggctggtggatctaaaagtttgtttgcagtgactgtggaagggaaggtgtatgcctgtggagaagccacgaatggccggctggggctgggcatttccagcgggacggtgcccatcccacggcagatcacagctctcagcagctacgtggtcaagaaggtggctgttcactcaggtggccggcacgcgacggctttaactgtcgatggaaaagtgttttcgtggggcgaaggtgacgatggaaaacttggacacttcagcagaatgaactgtgacaaaccaaggctgatcgaggccctgaaaaccaagcgtatccgggatatcgcctgtgggagctcgcacagcgcagccctcacatccagcggagaactgtacacctggggcctcggcgagtacggccggctgggacatggggataatacgacacagctaaagcccaaaatggtgaaagtccttctcggtcacagagtaatccaggttgcatgtgggagtagagacgcgcagaccctggctctgaccgatgaaggtttggtattttcctggggtgatggtgactttggaaaactgggccggggcggaagtgaaggctgtaacattccccagaacattgagagactaaatggacagggggtgtgccagattgagtgtggagctcagttctccctggcgctcaccaagtctggagtggtgtggacatggggaaagggggattacttcagattgggccacggctctgacgtgcacgtgcggaaaccacaggtggtggaagggctgagagggaagaagatcgtgcatgtggctgtcggggccctgcactgcctggcggtcacggactcggggcaggtgtatgcttggggtgacaacgaccacggccagcagggcaatggcacgaccacggttaacaggaagcccacactcgtgcaaggcttagaaggccagaagatcacacgcgtggcttgtgggtcgtcccacagtgtggcgtggacaactgtggatgtggccacgccctctgtccacgagcccgtcctcttccagactgcaagagacccgttaggtgcttcctacttaggcgtgccctcagatgctgattcttctgctgccagtaataaaataagtggtgcaagtaattctaagccaaatcgcccttctcttgccaagattctcttgtcattggatggaaatctggccaaacagcaggccttatcgcatattcttacagcattgcaaatcatgtatgccagagatgctgttgtcggggccctgatgccggccgccatgatcgccccggtggagtgcccctcgttctcctcggcggccccttccgacgcatctgcgatggctagtcccatgaatggagaagaatgcatgctggctgttgatatcgaagacagactgagtccaaatccatggcaagaaaagagagagattgtttcctctgaggacgcagtgaccccctctgcagtgactccgtcggccccctcagcctccgctcggccttttatcccagtgacggatgacctgggagctgcaagcatcattgcagaaaccatgaccaaaaccaaagaggatgttgaaagccaaaataaagcagcaggtccggagcctcaggccttggatgagttcaccagtctgctgattgcggatgacactcgtgtggtggtagacctgctcaagctgtcagtgtgcagccgggccggggacaggggcagggatgtgctctccgcggtgctttccggcatggggaccgcctacccacaggtggcagatatgctgttggagctctgtgtcaccgagttggaggatgtggccacagactcgcagagcggccgcctctcttctcagcctgtggtggtggagagtagccacccttacaccgacgacacctccaccagtggcacagtgaagataccaggtgcagaaggactcagggtagaatttgaccggcagtgctccacagagaggcgccacgaccctctcacagtcatggacggcgtcaacaggatcgtctccgtgcggtcaggccgagagtggtccgactggtccagcgagctgcgcatcccaggggatgagttaaagtggaagttcatcagcgatgggtctgtgaatggctggggctggcgcttcaccgtctatcccatcatgccagctgctggccctaaagaactcctctctgaccgctgcgtcctctcctgtccatccatggacttggtgacgtgtctgttagacttccgactcaaccttgcctctaacagaagcatcgtccctcgccttgcggcctcgctggcagcttgtgcacagctgagtgccctagctgccagtcacagaatgtgggcccttcagagactgaggaagctgcttacaactgaatttgggcagtcaattaacataaataggctgcttggagaaaatgatggggaaacaagagctttgagttttacaggtagtgctcttgctgctttggtgaaaggtcttccagaagctttgcaaaggcagtttgaatatgaagatcctattgtgaggggtggcaaacagctgctccacagcccattctttaaggtactagtagctcttgcttgtgacctggagctggacactctgccttgctgtgccgagacgcacaagtgggcctggttccggaggtactgcatggcctcccgtgttgctgtggcccttgacaaaagaacaccgttgccccgtctgtttcttgatgaggtggctaagaaaattcgtgaattaatggcagacagcgaaaacatggatgttctgcatgagagccatgacatttttaaaagagagcaagacgaacaacttgtgcagtggatgaacaggcgaccagatgactggactctctctgctggtggcagtggaacaatttatggatggggacataatcacaggggccagctcgggggcattgaaggcgcaaaagtcaaagttcccactccctgtgaagcccttgcaactctcagacccgtgcagttaatcggaggggaacagaccctctttgctgtgacggctgatgggaagctgtatgccactgggtatggtgcaggtggcagactaggcattggagggacagagtcggtgtccaccccaacattgcttgaatccattcagcatgtgtttattaagaaagtagctgtgaactctggaggaaagcactgccttgccctgtcttcagaaggagaagtttactcttggggtgaggcagaagatgggaagttggggcatggcaacagaagtccgtgtgaccgccctcgtgtcatcgagtctctgagaggaattgaagtggtcgatgttgctgctggcggagcccacagcgcctgtgtcacagcagccggggacctctacacatggggcaaaggccgctacggccggctggggcacagcgacagtgaggaccagctgaagccgaagctggtggaggcgctgcagggccaccgtgtggttgacatcgcctgtggcagtggagatgcccagaccctctgcctcacagatgacgacactgtctggtcctggggggacggggactacggcaagctcggccggggaggcagcgatggctgtaaagtgcctatgaagattgattctcttactggtcttggagtagttaaagtggaatgcggatcccagttttctgttgcccttaccaaatctggagctgtttatacctggggcaaaggcgattatcacaggttgggccatggatcagatgaccatgttcgaaggcctcggcaggtccaagggttgcaggggaagaaagtcatcgccatcgccactggctccctgcactgtgtgtgctgcacagaggatggtgaggtttatacatggggcgacaatgatgagggacaactgggagacggaaccaccaatgccatccagaggcctcggttggtagctgcccttcagggtaagaaggtcaaccgtgtggcctgtggctcagcacataccctcgcctggtcgaccagcaagcccgccagtgctggcaaactccctgcacaggtccccatggagtacaatcacctgcaggagatccccatcattgcgctgaggaaccgtctgctgctgctgcaccacctctccgagctcttctgcccctgcatccccatgttcgacctggaaggctcgctcgacgaaactggactcgggccttctgttgggttcgacactctccgaggaattctgatatcccagggaaaggaggcggctttccggaaagtagtacaagcaactatggtacgcgatcgtcagcatggccccgtcgtggagctgaaccgcatccaggtcaaacgatcaaggagcaaaggcgggctggccggccccgacggcaccaagtctgtctttgggcagatgtgtgctaagatgagctcgtttggtcccgacagcctcctccttcctcaccgtgtctggaaagtcaagtttgtgggtgaatctgtggatgactgtgggggcggctacagcgagtccatagctgagatctgtgaggagctgcagaacggactcacgcccctgctgatcgtgacacccaacgggagggatgagtctggggccaaccgagactgctacctgctcagcccggccgccagagcacccgtgcacagcagcatgttccgcttcctgggtgtgttgctgggcattgccatccgaaccgggagtcccctgagcctcaaccttgccgagcctgtctggaagcagctggctgggatgagcctcaccatcgcggacctcagtgaggttgataaggattttattcctggactcatgtacatccgagacaatgaagccacctcagaggagtttgaagccatgagcctgcccttcacagtgccaagtgccagtggccaggacattcagttgagctccaagcacacacacatcaccctggacaaccgcgcggagtacgtgcggctggcgataaactatagactccatgaatttgatgagcaggtggctgctgttcgggaaggaatggcccgcgttgtgcctgttcccctcctctctctgttcaccggctacgaactggagacgatggtgtgtggcagccctgacatcccgctgcaccttctcaagtcggtggccacctataaaggcatcgagccttccgcatcgctgatccagtggttctgggaggtgatggagtccttctccaacacagagcgctctcttttccttcgcttcgtctggggccggacgaggctgcccaggaccatcgccgacttccggggccgagacttcgtcatccaggtgttggataaatacaaccctccagaccacttcctccctgagtcctacacctgtttcttcttgctgaagctgcccaggtattcctgcaagcaggtgctggaggagaagctcaagtacgccatccacttctgcaagtccatagacacagatgactacgctcgcatcgcacttacaggagagccagccgccgacgacagcagcgacgattcagataacgaggatgtcgactcctttgcttcggactctacacaagattatttaacaggacactaagatggggaaacgtcctcgtgagatgagagcctgagccaggcagcagagcactcgctgctgtgtagactgtaggctgcctggtgtgtctgatgagaagcgtccgtcctcgagccaggcgggaggagggagtggagagactgactggccgtgatgggaatgacagtgagaaggtccgcctgtgcgcgtggaacactgtggacgctcgacttccaagggtcttctcacccgtaatgctgcattacatgtaggactgtgtttactaaagtgtgtaaatgtttatataaataccaaattgcagcatccccaaaatgaataaagcctttttacttgtgggtgcaatcgatttttttttctttctcctttctttcaagtgtcgtgagtcgtcttgattgtatattggaaataactgtgtaacaaatcgtattataaatatttcaattaattttactctgaatttgtttattaaaagacttttgaacatgaaatgattagtattacttgaatgcatccagaggatatttaaaccaaaatgaaaaaccagaaggccatttggtgtcccctctcccaggtgtccccttgtagcatatgcattatgtcatctgaattgaggcctttctgtgaacagcatcataacttctatcatggaaagtgtactatatataatgtttgtgtcatgtatatgcctaaattttaatcatctataaataaaacatctgacat

SEQ ID NO: 285441 - DNA, 10924 bp, Homo sapiens
acctgaggtacatattcatccctgcccttcttttaaatgtctttttacaggtcatgtggcattatctttagttcatgcaggtgcacttggtattgagcaagtaaagcacagaacgttgcctaagtcagtggtggatgtttgtagagttgtctaccaagcaaaatgttcgctcattaagactcatcaagaacagggccgttcttacaaggaggtctgcgctcctgtcatcgaacgtttgagattcctctttaatgaattgagacctgctgtttgtaatgacctctctataatgtctaagtttaaattgttaagttctttgccccgttggaggaggatagctcaaaagataattcgagaacgaaggaaaaagagagttcctaagaagccagaatctatggatgatgaagaaaaaattggaaacgaagagagtgatttagaagaagcttgcattttgcctcatagtccaataaatgtggacaagagacccattgcaattaaatcacccaaggacaaatggcagccgctgttgagtactgttacaggtgttcacaaatacaagtggttgaagcagaatgtgcagggtctttatccgcagtctccactcctcagtacaattgctgaatttgcccttaaagaagagccagtggatgtggaaaaaatgagaaagtgcctactaaaacagttggagagagcagaggttcgcctggaagggatagatacaattttaaaactggcgagcaagaatttcttacttccatctgtgcagtatgcgatgttttgtggatggcaaagacttattcctgagggaatcgatataggggaacctcttactgattgtttaaaggatgttgatttgatcccgccttttaatcggatgctgctggaagtcacctttggcaagctgtacgcttgggctgtacagaacattcgaaatgttttgatggatgccagtgccacatttaaagagcttggtatccagccggttcccctccaaaccatcaccaatgagaacccgtcaggaccgagcctggggaccatcccgcaagcccgcttcctcctggtgatgctcagcatgctcaccctgcagcacggcgcaaacaacctcgaccttctgctcaattccggcatgctggccctcacgcagacggcactgcgcctgattggccccagttgtgacaacgttgaggaagatatgaatgcttctgctcaaggtgcttctgccacagttttggaagaaacaaggaaggaaacggctcctgtgcagctccctgtttcaggaccagaactggctgccatgatgaagattggaacaagggtcatgagaggtgtggactggaaatggggcgatcaggatgggcctcctccaggcctaggccgcgtgattggtgagctgggagaggacggatggataagagtccagtgggacacaggcagcaccaactcctacaggatggggaaagaaggaaaatacgacctcaagctggcagagctgccggctgctgcacagccctcagcagaggattcggacacagaggatgactctgaagccgaacaaactgaaaggaacattcaccccactgcaatgatgtttaccagcactattaacttactgcagactctttgtctgtctgctggagttcatgctgagatcatgcagagcgaagccaccaagactttatgcggactgctgcgaatgttagtggaaagcggaacgacggacaagacatcttctccaaacaggctggtgtacagggagcaacaccggagctggtgcacgctggggtttgtgcggagcatcgctctcacgccgcaggtatgcggcgccctcagctccccgcagtggatcacgctgctcatgaaggtcgtggaagggcacgcacccttcactgccacctcgctgcagaggcagatcttagctgtgcatttgttgcaagcagtccttccatcatgggacaagaccgaaagggcgagggacatgaaatgcctcgtggagaagctgtttgacttcttgggaagcttgctcactacctgctcctctgacgtgccattactcagagagtccacgctgaggcggcgcagggtgcgcccgcaggcctcgctgactgccacccacagcagcacactggcggaggaggtggtggcactgctgcgcacgctgcactccctgactcagtggaatgggctcatcaacaagtacatcaactcccagctccgctccatcacccacagctttgtgggaaggccttccgaaggggcccagttagaggactacttccccgactccgagaaccctgaagtggggggcctcatggcagtcctggctgtgattggaggcatcgatggtcgcctgcgcctgggcggtcaagttatgcacgatgagtttggagaaggcactgtgactcgcatcaccccaaagggcaaaatcaccgtgcagttctctgacatgcggacgtgtcgcgtttgcccattgaatcagctgaaaccactccctgccgtggcctttaatgtgaacaacctgcccttcacagagcccatgctgtctgtctgggctcagttggtgaacctcgctggaagcaagttagaaaagcacaaaataaagaaatcgactaaacaggcctttgcaggacaagtggacctggacctgctgcggtgccagcagttgaagctatacatcctgaaagcaggtcgggcgctgctctcccaccaggataaactgcggcagatcctgtctcagccagctgttcaggagactggaactgttcacacagatgatggagcagtggtatcacctgaccttggggacatgtctcctgaagggccgcagccccccatgatcctcttgcagcagctgctggcctcggccacccagccgtctcctgtgaaggccatatttgataaacaggaacttgaggctgctgcactggccgtttgccagtgcttggctgtggagtccactcacccttcgagcccaggatttgaagactgcagctccagtgaggccaccacgcctgtcgccgtgcagcacatccgccctgccagagtgaagaggcgcaagcagtcgcccgttcccgctctgccgatcgtggtgcagctcatggagatgggattttccagaaggaacatcgagtttgccctgaagtctctcactggtgcttccgggaatgcatccagcttgcctggtgtggaagccttggtcgggtggctgctggaccactccgacatacaggtcacggagctctcagatgcagacacggtgtccgacgagtattctgacgaggaggtggtggaggacgtggatgatgccgcctactccatgtctactggtgctgttgtgacggagagccagacgtacaaaaaacgagctgatttcttgagtaatgatgattatgctgtatatgtgagagagaatattcaggtgggaatgatggttagatgctgccgagcgtatgaagaagtgtgcgaaggtgatgttggcaaagtcatcaagctggacagagatggattgcatgatctcaatgtgcagtgtgactggcagcagaaagggggcacctactgggttaggtacattcatgtggaacttataggctatcctccaccaagttcttcttctcacatcaagattggtgataaagtgcgggtcaaagcctctgtcaccacaccaaaatacaaatggggatctgtgactcatcagagtgtgggggttgtgaaagctttcagtgccaatggaaaagatatcattgtcgactttccccagcagtctcactggactgggttgctatcagaaatggagttggtacccagtattcatcctggggttacgtgtgatggatgtcagatgtttcctatcaatggatccagattcaaatgcagaaactgtgatgactttgatttttgtgaaacgtgtttcaagaccaaaaaacacaataccaggcatacatttggcagaataaatgaaccaggtcagtctgcggtattttgtggccgttctggaaaacagctgaagcgttgccacagcagccagccaggcatgctgctggacagctggtcccgcatggtgaagagcctgaatgtgtcgtcctccgtgaaccaggcatcccgtctcattgacggcagcgagccctgctggcagtcatcggggtcgcaaggaaagcactggattcgtttggagattttcccagatgttcttgttcatagattaaaaatgatcgtagatcctgctgacagtagctacatgccgtccctggttgtagtgtcaggtggaaattccctgaataaccttattgaactaaagacaatcaatattaacccttctgacaccacagtgccccttctgaatgactacacagagtatcacaggtatattgaaattgctataaagcagtgcaggagctcaggaatcgattgtaaaatccatggtctcatcctgctgggacggatccgtgcagaagaggaagatttggctgcagttcctttcttagcttcggataatgaagaggaggaggatgagaaaggcaacagcggaagcctcattagaaagaaggctgctgggctggaatcagcagctacgataagaaccaaggtgtttgtgtggggcctgaatgacaaggaccagctgggcgggctgaaaggctccaagataaaggttccttcgttctctgagacactgtcagctttgaatgtggtacaggtggctggtggatctaaaagtttgtttgcagtgactgtggaagggaaggtgtatgcctgtggagaagccacgaatggccggctggggctgggcatttccagcgggacggtgcccatcccacggcagatcacagctctcagcagctacgtggtcaagaaggtggctgttcactcaggtggccggcacgcgacggctttaactgtcgatggaaaagtgttttcgtggggcgaaggtgacgatggaaaacttggacacttcagcagaatgaactgtgacaaaccaaggctgatcgaggccctgaaaaccaagcgtatccgggatatcgcctgtgggagctcgcacagcgcagccctcacatccagcggagaactgtacacctggggcctcggcgagtacggccggctgggacatggggataatacgacacagctaaagcccaaaatggtgaaagtccttctcggtcacagagtaatccaggttgcatgtgggagtagagacgcgcagaccctggctctgaccgatgaaggtttggtattttcctggggtgatggtgactttggaaaactgggccggggcggaagtgaaggctgtaacattccccagaacattgagagactaaatggacagggggtgtgccagattgagtgtggagctcagttctccctggcgctcaccaagtctggagtggtgtggacatggggaaagggggattacttcagattgggccacggctctgacgtgcacgtgcggaaaccacaggtggtggaagggctgagagggaagaagatcgtgcatgtggctgtcggggccctgcactgcctggcggtcacggactcggggcaggtgtatgcttggggtgacaacgaccacggccagcagggcaatggcacgaccacggttaacaggaagcccacactcgtgcaaggcttagaaggccagaagatcacacgcgtggcttgtgggtcgtcccacagtgtggcgtggacaactgtggatgtggccacgccctctgtccacgagcccgtcctcttccagactgcaagagacccgttaggtgcttcctacttaggcgtgccctcagatgctgattcttctgctgccagtaataaaataagtggtgcaagtaattctaagccaaatcgcccttctcttgccaagattctcttgtcattggatggaaatctggccaaacagcaggccttatcgcatattcttacagcattgcaaatcatgtatgccagagatgctgttgtcggggccctgatgccggccgccatgatcgccccggtggagtgcccctcgttctcctcggcggccccttccgacgcatctgcgatggctagtcccatgaatggagaagaatgcatgctggctgttgatatcgaagacagactgagtccaaatccatggcaagaaaagagagagattgtttcctctgaggacgcagtgaccccctctgcagtgactccgtcggccccctcagcctccgctcggccttttatcccagtgacggatgacctgggagctgcaagcatcattgcagaaaccatgaccaaaaccaaagaggatgttgaaagccaaaataaagcagcaggtccggagcctcaggccttggatgagttcaccagtctgctgattgcggatgacactcgtgtggtggtagacctgctcaagctgtcagtgtgcagccgggccggggacaggggcagggatgtgctctccgcggtgctttccggcatggggaccgcctacccacaggtggcagatatgctgttggagctctgtgtcaccgagttggaggatgtggccacagactcgcagagcggccgcctctcttctcagcctgtggtggtggagagtagccacccttacaccgacgacacctccaccagtggcacagtgaagataccaggtgcagaaggactcagggtagaatttgaccggcagtgctccacagagaggcgccacgaccctctcacagtcatggacggcgtcaacaggatcgtctccgtgcggtcaggccgagagtggtccgactggtccagcgagctgcgcatcccaggggatgagttaaagtggaagttcatcagcgatgggtctgtgaatggctggggctggcgcttcaccgtctatcccatcatgccagctgctggccctaaagaactcctctctgaccgctgcgtcctctcctgtccatccatggacttggtgacgtgtctgttagacttccgactcaaccttgcctctaacagaagcatcgtccctcgccttgcggcctcgctggcagcttgtgcacagctgagtgccctagctgccagtcacagaatgtgggcccttcagagactgaggaagctgcttacaactgaatttgggcagtcaattaacataaataggctgcttggagaaaatgatggggaaacaagagctttgagttttacaggtagtgctcttgctgctttggtgaaaggtcttccagaagctttgcaaaggcagtttgaatatgaagatcctattgtgaggggtggcaaacagctgctccacagcccattctttaaggtactagtagctcttgcttgtgacctggagctggacactctgccttgctgtgccgagacgcacaagtgggcctggttccggaggtactgcatggcctcccgtgttgctgtggcccttgacaaaagaacaccgttgccccgtctgtttcttgatgaggtggctaagaaaattcgtgaattaatggcagacagcgaaaacatggatgttctgcatgagagccatgacatttttaaaagagagcaagacgaacaacttgtgcagtggatgaacaggcgaccagatgactggactctctctgctggtggcagtggaacaatttatggatggggacataatcacaggggccagctcgggggcattgaaggcgcaaaagtcaaagttcccactccctgtgaagcccttgcaactctcagacccgtgcagttaatcggaggggaacagaccctctttgctgtgacggctgatgggaagctgtatgccactgggtatggtgcaggtggcagactaggcattggagggacagagtcggtgtccaccccaacattgcttgaatccattcagcatgtgtttattaagaaagtagctgtgaactctggaggaaagcactgccttgccctgtcttcagaaggagaagtttactcttggggtgaggcagaagatgggaagttggggcatggcaacagaagtccgtgtgaccgccctcgtgtcatcgagtctctgagaggaattgaagtggtcgatgttgctgctggcggagcccacagcgcctgtgtcacagcagccggggacctctacacatggggcaaaggccgctacggccggctggggcacagcgacagtgaggaccagctgaagccgaagctggtggaggcgctgcagggccaccgtgtggttgacatcgcctgtggcagtggagatgcccagaccctctgcctcacagatgacgacactgtctggtcctggggggacggggactacggcaagctcggccggggaggcagcgatggctgtaaagtgcctatgaagattgattctcttactggtcttggagtagttaaagtggaatgcggatcccagttttctgttgcccttaccaaatctggagctgtttatacctggggcaaaggcgattatcacaggttgggccatggatcagatgaccatgttcgaaggcctcggcaggtccaagggttgcaggggaagaaagtcatcgccatcgccactggctccctgcactgtgtgtgctgcacagaggatggtgaggtttatacatggggcgacaatgatgagggacaactgggagacggaaccaccaatgccatccagaggcctcggttggtagctgcccttcagggtaagaaggtcaaccgtgtggcctgtggctcagcacataccctcgcctggtcgaccagcaagcccgccagtgctggcaaactccctgcacaggtccccatggagtacaatcacctgcaggagatccccatcattgcgctgaggaaccgtctgctgctgctgcaccacctctccgagctcttctgcccctgcatccccatgttcgacctggaaggctcgctcgacgaaactggactcgggccttctgttgggttcgacactctccgaggaattctgatatcccagggaaaggaggcggctttccggaaagtagtacaagcaactatggtacgcgatcgtcagcatggccccgtcgtggagctgaaccgcatccaggtcaaacgatcaaggagcaaaggcgggctggccggccccgacggcaccaagtctgtctttgggcagatgtgtgctaagatgagctcgtttggtcccgacagcctcctccttcctcaccgtgtctggaaagtcaagtttgtgggtgaatctgtggatgactgtgggggcggctacagcgagtccatagctgagatctgtgaggagctgcagaacggactcacgcccctgctgatcgtgacacccaacgggagggatgagtctggggccaaccgagactgctacctgctcagcccggccgccagagcacccgtgcacagcagcatgttccgcttcctgggtgtgttgctgggcattgccatccgaaccgggagtcccctgagcctcaaccttgccgagcctgtctggaagcagctggctgggatgagcctcaccatcgcggacctcagtgaggttgataaggattttattcctggactcatgtacatccgagacaatgaagccacctcagaggagtttgaagccatgagcctgcccttcacagtgccaagtgccagtggccaggacattcagttgagctccaagcacacacacatcaccctggacaaccgcgcggagtacgtgcggctggcgataaactatagactccatgaatttgatgagcaggtggctgctgttcgggaaggaatggcccgcgttgtgcctgttcccctcctctctctgttcaccggctacgaactggagacgatggtgtgtggcagccctgacatcccgctgcaccttctcaagtcggtggccacctataaaggcatcgagccttccgcatcgctgatccagtggttctgggaggtgatggagtccttctccaacacagagcgctctcttttccttcgcttcgtctggggccggacgaggctgcccaggaccatcgccgacttccggggccgagacttcgtcatccaggtgttggataaatacaaccctccagaccacttcctccctgagtcctacacctgtttcttcttgctgaagctgcccaggtattcctgcaagcaggtgctggaggagaagctcaagtacgccatccacttctgcaagtccatagacacagatgactacgctcgcatcgcacttacaggagagccagccgccgacgacagcagcgacgattcagataacgaggatgtcgactcctttgcttcggactctacacaagattatttaacaggacactaagatggggaaacgtcctcgtgagatgagagcctgagccaggcagcagagcactcgctgctgtgtagactgtaggctgcctggtgtgtctgatgagaagcgtccgtcctcgagccaggcgggaggagggagtggagagactgactggccgtgatgggaatgacagtgagaaggtccgcctgtgcgcgtggaacactgtggacgctcgacttccaagggtcttctcacccgtaatgctgcattacatgtaggactgtgtttactaaagtgtgtaaatgtttatataaataccaaattgcagcatccccaaaatgaataaagcctttttacttgtgggtgcaatcgatttttttttctttctcctttctttcaagtgtcgtgagtcgtcttgattgtatattggaaataactgtgtaacaaatcgtattataaatatttcaattaattttactctgaatttgtttattaaaagacttttgaacatgaaatgattagtattacttgaatgcatccagaggatatttaaaccaaaatgaaaaaccagaaggccatttggtgtcccctctcccaggtgtccccttgtagcatatgcattatgtcatctgaattgaggcctttctgtgaacagcatcataacttctatcatggaaagtgtactatatataatgtttgtgtcatgtatatgcctaaattttaatcatctataaataaaacatctgacat

SEQ ID NO: 285442 - DNA, 10158 bp, Homo sapiens
tggtggtgttctagaggtccctcataggtcgaggctgagggaatcgatataggggaacctcttactgattgtttaaaggatgttgatttgatcccgccttttaatcggatgctgctggaagtcacctttggcaagctgtacgcttgggctgtacagaacattcgaaatgttttgatggatgccagtgccacatttaaagagcttggtatccagccggttcccctccaaaccatcaccaatgagaacccgtcaggaccgagcctggggaccatcccgcaagcccgcttcctcctggtgatgctcagcatgctcaccctgcagcacggcgcaaacaacctcgaccttctgctcaattccggcatgctggccctcacgcagacggcactgcgcctgattggccccagttgtgacaacgttgaggaagatatgaatgcttctgctcaaggtgcttctgccacagttttggaagaaacaaggaaggaaacggctcctgtgcagctccctgtttcaggaccagaactggctgccatgatgaagattggaacaagggtcatgagaggtgtggactggaaatggggcgatcaggatgggcctcctccaggcctaggccgcgtgattggtgagctgggagaggacggatggataagagtccagtgggacacaggcagcaccaactcctacaggatggggaaagaaggaaaatacgacctcaagctggcagagctgccggctgctgcacagccctcagcagaggattcggacacagaggatgactctgaagccgaacaaactgaaaggaacattcaccccactgcaatgatgtttaccagcactattaacttactgcagactctttgtctgtctgctggagttcatgctgagatcatgcagagcgaagccaccaagactttatgcggactgctgcgaatgttagtggaaagcggaacgacggacaagacatcttctccaaacaggctggtgtacagggagcaacaccggagctggtgcacgctggggtttgtgcggagcatcgctctcacgccgcaggtatgcggcgccctcagctccccgcagtggatcacgctgctcatgaaggtcgtggaagggcacgcacccttcactgccacctcgctgcagaggcagatcttagctgtgcatttgttgcaagcagtccttccatcatgggacaagaccgaaagggcgagggacatgaaatgcctcgtggagaagctgtttgacttcttgggaagcttgctcactacctgctcctctgacgtgccattactcagagagtccacgctgaggcggcgcagggtgcgcccgcaggcctcgctgactgccacccacagcagcacactggcggaggaggtggtggcactgctgcgcacgctgcactccctgactcagtggaatgggctcatcaacaagtacatcaactcccagctccgctccatcacccacagctttgtgggaaggccttccgaaggggcccagttagaggactacttccccgactccgagaaccctgaagtggggggcctcatggcagtcctggctgtgattggaggcatcgatggtcgcctgcgcctgggcggtcaagttatgcacgatgagtttggagaaggcactgtgactcgcatcaccccaaagggcaaaatcaccgtgcagttctctgacatgcggacgtgtcgcgtttgcccattgaatcagctgaaaccactccctgccgtggcctttaatgtgaacaacctgcccttcacagagcccatgctgtctgtctgggctcagttggtgaacctcgctggaagcaagttagaaaagcacaaaataaagaaatcgactaaacaggcctttgcaggacaagtggacctggacctgctgcggtgccagcagttgaagctatacatcctgaaagcaggtcgggcgctgctctcccaccaggataaactgcggcagatcctgtctcagccagctgttcaggagactggaactgttcacacagatgatggagcagtggtatcacctgaccttggggacatgtctcctgaagggccgcagccccccatgatcctcttgcagcagctgctggcctcggccacccagccgtctcctgtgaaggccatatttgataaacaggaacttgaggctgctgcactggccgtttgccagtgcttggctgtggagtccactcacccttcgagcccaggatttgaagactgcagctccagtgaggccaccacgcctgtcgccgtgcagcacatccgccctgccagagtgaagaggcgcaagcagtcgcccgttcccgctctgccgatcgtggtgcagctcatggagatgggattttccagaaggaacatcgagtttgccctgaagtctctcactggtgcttccgggaatgcatccagcttgcctggtgtggaagccttggtcgggtggctgctggaccactccgacatacaggtcacggagctctcagatgcagacacggtgtccgacgagtattctgacgaggaggtggtggaggacgtggatgatgccgcctactccatgtctactggtgctgttgtgacggagagccagacgtacaaaaaacgagctgatttcttgagtaatgatgattatgctgtatatgtgagagagaatattcaggtgggaatgatggttagatgctgccgagcgtatgaagaagtgtgcgaaggtgatgttggcaaagtcatcaagctggacagagatggattgcatgatctcaatgtgcagtgtgactggcagcagaaagggggcacctactgggttaggtacattcatgtggaacttataggctatcctccaccaagttcttcttctcacatcaagattggtgataaagtgcgggtcaaagcctctgtcaccacaccaaaatacaaatggggatctgtgactcatcagagtgtgggggttgtgaaagctttcagtgccaatggaaaagatatcattgtcgactttccccagcagtctcactggactgggttgctatcagaaatggagttggtacccagtattcatcctggggttacgtgtgatggatgtcagatgtttcctatcaatggatccagattcaaatgcagaaactgtgatgactttgatttttgtgaaacgtgtttcaagaccaaaaaacacaataccaggcatacatttggcagaataaatgaaccaggtcagtctgcggtattttgtggccgttctggaaaacagctgaagcgttgccacagcagccagccaggcatgctgctggacagctggtcccgcatggtgaagagcctgaatgtgtcgtcctccgtgaaccaggcatcccgtctcattgacggcagcgagccctgctggcagtcatcggggtcgcaaggaaagcactggattcgtttggagattttcccagatgttcttgttcatagattaaaaatgatcgtagatcctgctgacagtagctacatgccgtccctggttgtagtgtcaggtggaaattccctgaataaccttattgaactaaagacaatcaatattaacccttctgacaccacagtgccccttctgaatgactacacagagtatcacaggtatattgaaattgctataaagcagtgcaggagctcaggaatcgattgtaaaatccatggtctcatcctgctgggacggatccgtgcagaagaggaagatttggctgcagttcctttcttagcttcggataatgaagaggaggaggatgagaaaggcaacagcggaagcctcattagaaagaaggctgctgggctggaatcagcagctacgataagaaccaaggtgtttgtgtggggcctgaatgacaaggaccagctgggcgggctgaaaggctccaagataaaggttccttcgttctctgagacactgtcagctttgaatgtggtacaggtggctggtggatctaaaagtttgtttgcagtgactgtggaagggaaggtgtatgcctgtggagaagccacgaatggccggctggggctgggcatttccagcgggacggtgcccatcccacggcagatcacagctctcagcagctacgtggtcaagaaggtggctgttcactcaggtggccggcacgcgacggctttaactgtcgatggaaaagtgttttcgtggggcgaaggtgacgatggaaaacttggacacttcagcagaatgaactgtgacaaaccaaggctgatcgaggccctgaaaaccaagcgtatccgggatatcgcctgtgggagctcgcacagcgcagccctcacatccagcggagaactgtacacctggggcctcggcgagtacggccggctgggacatggggataatacgacacagctaaagcccaaaatggtgaaagtccttctcggtcacagagtaatccaggttgcatgtgggagtagagacgcgcagaccctggctctgaccgatgaaggtttggtattttcctggggtgatggtgactttggaaaactgggccggggcggaagtgaaggctgtaacattccccagaacattgagagactaaatggacagggggtgtgccagattgagtgtggagctcagttctccctggcgctcaccaagtctggagtggtgtggacatggggaaagggggattacttcagattgggccacggctctgacgtgcacgtgcggaaaccacaggtggtggaagggctgagagggaagaagatcgtgcatgtggctgtcggggccctgcactgcctggcggtcacggactcggggcaggtgtatgcttggggtgacaacgaccacggccagcagggcaatggcacgaccacggttaacaggaagcccacactcgtgcaaggcttagaaggccagaagatcacacgcgtggcttgtgggtcgtcccacagtgtggcgtggacaactgtggatgtggccacgccctctgtccacgagcccgtcctcttccagactgcaagagacccgttaggtgcttcctacttaggcgtgccctcagatgctgattcttctgctgccagtaataaaataagtggtgcaagtaattctaagccaaatcgcccttctcttgccaagattctcttgtcattggatggaaatctggccaaacagcaggccttatcgcatattcttacagcattgcaaatcatgtatgccagagatgctgttgtcggggccctgatgccggccgccatgatcgccccggtggagtgcccctcgttctcctcggcggccccttccgacgcatctgcgatggctagtcccatgaatggagaagaatgcatgctggctgttgatatcgaagacagactgagtccaaatccatggcaagaaaagagagagattgtttcctctgaggacgcagtgaccccctctgcagtgactccgtcggccccctcagcctccgctcggccttttatcccagtgacggatgacctgggagctgcaagcatcattgcagaaaccatgaccaaaaccaaagaggatgttgaaagccaaaataaagcagcaggtccggagcctcaggccttggatgagttcaccagtctgctgattgcggatgacactcgtgtggtggtagacctgctcaagctgtcagtgtgcagccgggccggggacaggggcagggatgtgctctccgcggtgctttccggcatggggaccgcctacccacaggtggcagatatgctgttggagctctgtgtcaccgagttggaggatgtggccacagactcgcagagcggccgcctctcttctcagcctgtggtggtggagagtagccacccttacaccgacgacacctccaccagtggcacagtgaagataccaggtgcagaaggactcagggtagaatttgaccggcagtgctccacagagaggcgccacgaccctctcacagtcatggacggcgtcaacaggatcgtctccgtgcggtcaggccgagagtggtccgactggtccagcgagctgcgcatcccaggggatgagttaaagtggaagttcatcagcgatgggtctgtgaatggctggggctggcgcttcaccgtctatcccatcatgccagctgctggccctaaagaactcctctctgaccgctgcgtcctctcctgtccatccatggacttggtgacgtgtctgttagacttccgactcaaccttgcctctaacagaagcatcgtccctcgccttgcggcctcgctggcagcttgtgcacagctgagtgccctagctgccagtcacagaatgtgggcccttcagagactgaggaagctgcttacaactgaatttgggcagtcaattaacataaataggctgcttggagaaaatgatggggaaacaagagctttgagttttacaggtagtgctcttgctgctttggtgaaaggtcttccagaagctttgcaaaggcagtttgaatatgaagatcctattgtgaggggtggcaaacagctgctccacagcccattctttaaggtactagtagctcttgcttgtgacctggagctggacactctgccttgctgtgccgagacgcacaagtgggcctggttccggaggtactgcatggcctcccgtgttgctgtggcccttgacaaaagaacaccgttgccccgtctgtttcttgatgaggtggctaagaaaattcgtgaattaatggcagacagcgaaaacatggatgttctgcatgagagccatgacatttttaaaagagagcaagacgaacaacttgtgcagtggatgaacaggcgaccagatgactggactctctctgctggtggcagtggaacaatttatggatggggacataatcacaggggccagctcgggggcattgaaggcgcaaaagtcaaagttcccactccctgtgaagcccttgcaactctcagacccgtgcagttaatcggaggggaacagaccctctttgctgtgacggctgatgggaagctgtatgccactgggtatggtgcaggtggcagactaggcattggagggacagagtcggtgtccaccccaacattgcttgaatccattcagcatgtgtttattaagaaagtagctgtgaactctggaggaaagcactgccttgccctgtcttcagaaggagaagtttactcttggggtgaggcagaagatgggaagttggggcatggcaacagaagtccgtgtgaccgccctcgtgtcatcgagtctctgagaggaattgaagtggtcgatgttgctgctggcggagcccacagcgcctgtgtcacagcagccggggacctctacacatggggcaaaggccgctacggccggctggggcacagcgacagtgaggaccagctgaagccgaagctggtggaggcgctgcagggccaccgtgtggttgacatcgcctgtggcagtggagatgcccagaccctctgcctcacagatgacgacactgtctggtcctggggggacggggactacggcaagctcggccggggaggcagcgatggctgtaaagtgcctatgaagattgattctcttactggtcttggagtagttaaagtggaatgcggatcccagttttctgttgcccttaccaaatctggagctgtttatacctggggcaaaggcgattatcacaggttgggccatggatcagatgaccatgttcgaaggcctcggcaggtccaagggttgcaggggaagaaagtcatcgccatcgccactggctccctgcactgtgtgtgctgcacagaggatggtgaggtttatacatggggcgacaatgatgagggacaactgggagacggaaccaccaatgccatccagaggcctcggttggtagctgcccttcagggtaagaaggtcaaccgtgtggcctgtggctcagcacataccctcgcctggtcgaccagcaagcccgccagtgctggcaaactccctgcacaggtccccatggagtacaatcacctgcaggagatccccatcattgcgctgaggaaccgtctgctgctgctgcaccacctctccgagctcttctgcccctgcatccccatgttcgacctggaaggctcgctcgacgaaactggactcgggccttctgttgggttcgacactctccgaggaattctgatatcccagggaaaggaggcggctttccggaaagtagtacaagcaactatggtacgcgatcgtcagcatggccccgtcgtggagctgaaccgcatccaggtcaaacgatcaaggagcaaaggcgggctggccggccccgacggcaccaagtctgtctttgggcagatgtgtgctaagatgagctcgtttggtcccgacagcctcctccttcctcaccgtgtctggaaagtcaagtttgtgggtgaatctgtggatgactgtgggggcggctacagcgagtccatagctgagatctgtgaggagctgcagaacggactcacgcccctgctgatcgtgacacccaacgggagggatgagtctggggccaaccgagactgctacctgctcagcccggccgccagagcacccgtgcacagcagcatgttccgcttcctgggtgtgttgctgggcattgccatccgaaccgggagtcccctgagcctcaaccttgccgagcctgtctggaagcagctggctgggatgagcctcaccatcgcggacctcagtgaggttgataaggattttattcctggactcatgtacatccgagacaatgaagccacctcagaggagtttgaagccatgagcctgcccttcacagtgccaagtgccagtggccaggacattcagttgagctccaagcacacacacatcaccctggacaaccgcgcggagtacgtgcggctggcgataaactatagactccatgaatttgatgagcaggtggctgctgttcgggaaggaatggcccgcgttgtgcctgttcccctcctctctctgttcaccggctacgaactggagacgatggtgtgtggcagccctgacatcccgctgcaccttctcaagtcggtggccacctataaaggcatcgagccttccgcatcgctgatccagtggttctgggaggtgatggagtccttctccaacacagagcgctctcttttccttcgcttcgtctggggccggacgaggctgcccaggaccatcgccgacttccggggccgagacttcgtcatccaggtgttggataaatacaaccctccagaccacttcctccctgagtcctacacctgtttcttcttgctgaagctgcccaggtattcctgcaagcaggtgctggaggagaagctcaagtacgccatccacttctgcaagtccatagacacagatgactacgctcgcatcgcacttacaggagagccagccgccgacgacagcagcgacgattcagataacgaggatgtcgactcctttgcttcggactctacacaagattatttaacaggacactaagatggggaaacgtcctcgtgagatgagagcctgagccaggcagcagagcactcgctgctgtgtagactgtaggctgcctggtgtgtctgatgagaagcgtccgtcctcgagccaggcgggaggagggagtggagagactgactggccgtgatgggaatgacagtgagaaggtccgcctgtgcgcgtggaacactgtggacgctcgacttccaagggtcttctcacccgtaatgctgcattacatgtaggactgtgtttactaaagtgtgtaaatgtttatataaataccaaattgcagcatccccaaaatgaataaagcctttttacttgtgggtgcaatcgatttttttttctttctcctttctttcaagtgtcgtgagtcgtcttgattgtatattggaaataactgtgtaacaaatcgtattataaatatttcaattaattttactctgaatttgtttattaaaagacttttgaacatgaaatgattagtattacttgaatgcatccagaggatatttaaaccaaaatgaaaaaccagaaggccatttggtgtcccctctcccaggtgtccccttgtagcatatgcattatgtcatctgaattgaggcctttctgtgaacagcatcataacttctatcatggaaagtgtactatatataatgtttgtgtcatgtatatgcctaaattttaatcatctataaataaaacatctgacat
